United States Patent Application Publication US 2025/0305002 A1 - sequence listing, part 3

SEQ ID NO: 1499 - protein, 2008 aa, synthetic construct
MPAAKRVKLDGGDKKYSIGLDIGTNSVGWAVITDEYKVPSKKFKVLGNTDRHSIKKNLIGALLFDSGETAEATRLKRTARRRYTRRKNRICYLQEIFSNEMAKVDDSFFHRLEESFLVEEDKKHERHPIFGNIVDEVAYHEKYPTIYHLRKKLVDSTDKADLRLIYLALAHMIKFRGHFLIEGDLNPDNSDVDKLFIQLVQTYNQLFEENPINASGVDAKAILSARLSKSRRLENLIAQLPGEKKNGLFGNLIALSLGLTPNFKSNFDLAEDAKLQLSKDTYDDDLDNLLAQIGDQYADLFLAAKNLSDAILLSDILRVNTEITKAPLSASMIKRYDEHHQDLTLLKALVRQQLPEKYKEIFFDQSKNGYAGYIDGGASQEEFYKFIKPILEKMDGTEELLVKLNREDLLRKQRTFDNGSIPHQIHLGELHAILRRQEDFYPFLKDNREKIEKILTFRIPYYVGPLARGNSRFAWMTRKSEETITPWNFEEVVDKGASAQSFIERMTNFDKNLPNEKVLPKHSLLYEYFTVYNELTKVKYVTEGMRKPAFLSGEQKKAIVDLLFKTNRKVTVKQLKEDYFKKIECFDSVEISGVEDRFNASLGTYHDLLKIIKDKDFLDNEENEDILEDIVLTLTLFEDREMIEERLKTYAHLFDDKVMKQLKRRRYTGWGRLSRKLINGIRDKQSGKTILDFLKSDGFANRNFMQLIHDDSLTFKEDIQKAQVSGQGDSLHEHIANLAGSPAIKKGILQTVKVVDELVKVMGRHKPENIVIEMARENQTTQKGQKNSRERMKRIEEGIKELGSQILKEHPVENTQLQNEKLYLYYLQNGRDMYVDQELDINRLSDYDVDHIVPQSFLKDDSIDNKVLTRSDKARGKSDNVPSEEVVKKMKNYWRQLLNAKLITQRKFDNLTKAERGGLSELDKAGFIKRQLVETRQITKHVAQILDSRMNTKYDENDKLIREVKVITLKSKLVSDFRKDFQFYKVREINNYHHAHDAYLNAVVGTALIKKYPKLESEFVYGDYKVYDVRKMIAKSEQEIGKATAKYFFYSNIMNFFKTEITLANGEIRKRPLIETNGETGEIVWDKGRDFATVRKVLSMPQVNIVKKTEVQTGGFSKESILPKRNSDKLIARKKDWDPKKYGGFDSPTVAYSVLVVAKVEKGKSKKLKSVKELLGITIMERSSFEKNPIDFLEAKGYKEVKKDLIIKLPKYSLFELENGRKRMLASAGELQKGNELALPSKYVNFLYLASHYEKLKGSPEDNEQKQLFVEQHKHYLDEIIEQISEFSKRVILADANLDKVLSAYNKHRDKPIREQAENIIHLFTLTNLGAPAAFKYFDTTIDRKRYTSTKEVLDATLIHQSITGLYETRIDLSQLGGDGGEAAAKGGSGGGGGGLEHLPRPPEISQFPLNPERLQALQHLVRKALEAGHIEPYTGPGNNPVFPVKKANGTWRFIHDLRATNSLTVDLSSSSPGPPDLSSLPTTLAHLQTIDLKDAFFQIPLPKQFQPYFAFTVPQQCNYGPGTRYAWKVLPQGFKNSPTLFEMQLASILQPIRQAFPQCVILQYMDDILLASPSPEDLQQLSEATMASLISHGLPVSQDKTQQTPGTIKFLGQIISPNHITYDAVPTVPIRSRWALPELQALLGEIQWVSKGTPTLRQPLHSLYCALQGHTDPRDQIYLNPSQVQSLMQLQQALSQNCRSRLAQTLPLLGAIMLTLTGTTTVVFQSKQQWPLVWLHAPLPHTSQCPWGQLLASAVLLLDKYTLQSYGLLCQTIHHNISIQTFNQFIQTSDHPSVPILLHHSHRFKNLGAQTGELWNTFLKTAAPLAPVKALTPVFTLSPIIINTAPCLFSDGSTSQAAYILWDKHILSQRSFPLPPPHKSAQQAELLGLLHGLSSARSWHCLNIFLDSKYLYHYLRTLALGTFQGKSSQAPFQALLPRLLAHKVIYLHHVRSHTNLPDPISKLNALTDALLITPILAGKRTADGSEFEKRTADGSEFESPKKKAKVE

SEQ ID NO: 1500 - protein, 2008 aa, synthetic construct
MPAAKRVKLDGGDKKYSIGLDIGTNSVGWAVITDEYKVPSKKFKVLGNTDRHSIKKNLIGALLFDSGETAEATRLKRTARRRYTRRKNRICYLQEIFSNEMAKVDDSFFHRLEESFLVEEDKKHERHPIFGNIVDEVAYHEKYPTIYHLRKKLVDSTDKADLRLIYLALAHMIKFRGHFLIEGDLNPDNSDVDKLFIQLVQTYNQLFEENPINASGVDAKAILSARLSKSRRLENLIAQLPGEKKNGLFGNLIALSLGLTPNFKSNFDLAEDAKLQLSKDTYDDDLDNLLAQIGDQYADLFLAAKNLSDAILLSDILRVNTEITKAPLSASMIKRYDEHHQDLTLLKALVRQQLPEKYKEIFFDQSKNGYAGYIDGGASQEEFYKFIKPILEKMDGTEELLVKLNREDLLRKQRTFDNGSIPHQIHLGELHAILRRQEDFYPFLKDNREKIEKILTFRIPYYVGPLARGNSRFAWMTRKSEETITPWNFEEVVDKGASAQSFIERMTNFDKNLPNEKVLPKHSLLYEYFTVYNELTKVKYVTEGMRKPAFLSGEQKKAIVDLLFKTNRKVTVKQLKEDYFKKIECFDSVEISGVEDRFNASLGTYHDLLKIIKDKDFLDNEENEDILEDIVLTLTLFEDREMIEERLKTYAHLFDDKVMKQLKRRRYTGWGRLSRKLINGIRDKQSGKTILDFLKSDGFANRNFMQLIHDDSLTFKEDIQKAQVSGQGDSLHEHIANLAGSPAIKKGILQTVKVVDELVKVMGRHKPENIVIEMARENQTTQKGQKNSRERMKRIEEGIKELGSQILKEHPVENTQLQNEKLYLYYLQNGRDMYVDQELDINRLSDYDVDHIVPQSFLKDDSIDNKVLTRSDKARGKSDNVPSEEVVKKMKNYWRQLLNAKLITQRKFDNLTKAERGGLSELDKAGFIKRQLVETRQITKHVAQILDSRMNTKYDENDKLIREVKVITLKSKLVSDFRKDFQFYKVREINNYHHAHDAYLNAVVGTALIKKYPKLESEFVYGDYKVYDVRKMIAKSEQEIGKATAKYFFYSNIMNFFKTEITLANGEIRKRPLIETNGETGEIVWDKGRDFATVRKVLSMPQVNIVKKTEVQTGGFSKESILPKRNSDKLIARKKDWDPKKYGGFDSPTVAYSVLVVAKVEKGKSKKLKSVKELLGITIMERSSFEKNPIDFLEAKGYKEVKKDLIIKLPKYSLFELENGRKRMLASAGELQKGNELALPSKYVNFLYLASHYEKLKGSPEDNEQKQLFVEQHKHYLDEIIEQISEFSKRVILADANLDKVLSAYNKHRDKPIREQAENIIHLFTLTNLGAPAAFKYFDTTIDRKRYTSTKEVLDATLIHQSITGLYETRIDLSQLGGDGGPAPAPAPAPAPGGGLEHLPRPPEISQFPLNPERLQALQHLVRKALEAGHIEPYTGPGNNPVFPVKKANGTWRFIHDLRATNSLTVDLSSSSPGPPDLSSLPTTLAHLQTIDLKDAFFQIPLPKQFQPYFAFTVPQQCNYGPGTRYAWKVLPQGFKNSPTLFQMQLASILQPIRQAFPQCVILQYMDDILLASPSPEDLQQLSEATMASLISHGLPVSQDKTQQTPGTIKFLGQIISPNHITYDAVPTVPIRSRWALPELQALLGEIQWVSKGTPTLRQPLHSLYCALQGHTDPRDQIYLNPSQVQSLMQLQQALSQNCRSRLAQTLPLLGAIMLTLTGTTTVVFQSKQQWPLVWLHAPLPHTSQCPWGQLLASAVLLLDKYTLQSYGLLCQTIHHNISIQTFNQFIQTSDHPSVPILLHHSHRFKNLGAQTGELWNTFLKTAAPLAPVKALTPVFTLSPIIINTAPCLFSDGSTSQAAYILWDKHILSQRSFPLPPPHKSAQQAELLGLLHGLSSARSWHCLNIFLDSKYLYHYLRTLAWGTFQGKSSQAPFQALLPRLLAHKVIYLHHVRSHTNLPDPISKLNALTDALLITPILAGKRTADGSEFEKRTADGSEFESPKKKAKVE

SEQ ID NO: 1501 - protein, 2006 aa, synthetic construct
MPAAKRVKLDGGDKKYSIGLDIGTNSVGWAVITDEYKVPSKKFKVLGNTDRHSIKKNLIGALLFDSGETAEATRLKRTARRRYTRRKNRICYLQEIFSNEMAKVDDSFFHRLEESFLVEEDKKHERHPIFGNIVDEVAYHEKYPTIYHLRKKLVDSTDKADLRLIYLALAHMIKFRGHFLIEGDLNPDNSDVDKLFIQLVQTYNQLFEENPINASGVDAKAILSARLSKSRRLENLIAQLPGEKKNGLFGNLIALSLGLTPNFKSNFDLAEDAKLQLSKDTYDDDLDNLLAQIGDQYADLFLAAKNLSDAILLSDILRVNTEITKAPLSASMIKRYDEHHQDLTLLKALVRQQLPEKYKEIFFDQSKNGYAGYIDGGASQEEFYKFIKPILEKMDGTEELLVKLNREDLLRKQRTFDNGSIPHQIHLGELHAILRRQEDFYPFLKDNREKIEKILTFRIPYYVGPLARGNSRFAWMTRKSEETITPWNFEEVVDKGASAQSFIERMTNFDKNLPNEKVLPKHSLLYEYFTVYNELTKVKYVTEGMRKPAFLSGEQKKAIVDLLFKTNRKVTVKQLKEDYFKKIECFDSVEISGVEDRFNASLGTYHDLLKIIKDKDFLDNEENEDILEDIVLTLTLFEDREMIEERLKTYAHLFDDKVMKQLKRRRYTGWGRLSRKLINGIRDKQSGKTILDFLKSDGFANRNFMQLIHDDSLTFKEDIQKAQVSGQGDSLHEHIANLAGSPAIKKGILQTVKVVDELVKVMGRHKPENIVIEMARENQTTQKGQKNSRERMKRIEEGIKELGSQILKEHPVENTQLQNEKLYLYYLQNGRDMYVDQELDINRLSDYDVDHIVPQSFLKDDSIDNKVLTRSDKARGKSDNVPSEEVVKKMKNYWRQLLNAKLITQRKFDNLTKAERGGLSELDKAGFIKRQLVETRQITKHVAQILDSRMNTKYDENDKLIREVKVITLKSKLVSDFRKDFQFYKVREINNYHHAHDAYLNAVVGTALIKKYPKLESEFVYGDYKVYDVRKMIAKSEQEIGKATAKYFFYSNIMNFFKTEITLANGEIRKRPLIETNGETGEIVWDKGRDFATVRKVLSMPQVNIVKKTEVQTGGFSKESILPKRNSDKLIARKKDWDPKKYGGFDSPTVAYSVLVVAKVEKGKSKKLKSVKELLGITIMERSSFEKNPIDFLEAKGYKEVKKDLIIKLPKYSLFELENGRKRMLASAGELQKGNELALPSKYVNFLYLASHYEKLKGSPEDNEQKQLFVEQHKHYLDEIIEQISEFSKRVILADANLDKVLSAYNKHRDKPIREQAENIIHLFTLTNLGAPAAFKYFDTTIDRKRYTSTKEVLDATLIHQSITGLYETRIDLSQLGGDGGGGGGGSPAPGGGLEHLPRPPEISQFPLNPERLQALQHLVRKALEAGHIEPYTGPGNNPVFPVKKANGTWRFIHDLRATNSLTVDLSSSSPGPPDLSSLPTTLAHLQTIDLKDAFFQIPLPKQFQPYFAFTVPQQCNYGPGTRYAWKVLPQGFKNSPTLFQMQLASILQPIRQAFPQCVILQYMDDILLASPSPEDLQQLSEATMASLISHGLPVSQDKTQQTPGTIKFLGQIISPNHITYDAVPTVPIRSRWALPELQALLGEIQWVSKGTPTLRQPLHSLYCALQGHTDPRDQIYLNPSQVQSLMQLQQALSQNCRSRLAQTLPLLGAIMLTLTGTTTVVFQSKQQWPLVWLHAPLPHTSQCPWGQLLASAVLLLDKYTLQSYGLLCQTIHHNISIQTFNQFIQTSDHPSVPILLHHSHRFKNLGAQTGELWNTFLKTAAPLAPVKALTPVFTLSPIIINTAPCLFSDGSTSQAAYILWDKHILSQRSFPLPPPHKSAQQAELLGLLHGLSSARSWHCLNIFLDSKYLYHYLRTLAWGTFQGKSSQAPFQALLPRLLAHKVIYLHHVRSHTNLPDPISKLNALTDALLITPILAGKRTADGSEFEKRTADGSEFESPKKKAKVE

SEQ ID NO: 1502 - protein, 2012 aa, synthetic construct
MPAAKRVKLDGGDKKYSIGLDIGTNSVGWAVITDEYKVPSKKFKVLGNTDRHSIKKNLIGALLFDSGETAEATRLKRTARRRYTRRKNRICYLQEIFSNEMAKVDDSFFHRLEESFLVEEDKKHERHPIFGNIVDEVAYHEKYPTIYHLRKKLVDSTDKADLRLIYLALAHMIKFRGHFLIEGDLNPDNSDVDKLFIQLVQTYNQLFEENPINASGVDAKAILSARLSKSRRLENLIAQLPGEKKNGLFGNLIALSLGLTPNFKSNFDLAEDAKLQLSKDTYDDDLDNLLAQIGDQYADLFLAAKNLSDAILLSDILRVNTEITKAPLSASMIKRYDEHHQDLTLLKALVRQQLPEKYKEIFFDQSKNGYAGYIDGGASQEEFYKFIKPILEKMDGTEELLVKLNREDLLRKQRTFDNGSIPHQIHLGELHAILRRQEDFYPFLKDNREKIEKILTFRIPYYVGPLARGNSRFAWMTRKSEETITPWNFEEVVDKGASAQSFIERMTNFDKNLPNEKVLPKHSLLYEYFTVYNELTKVKYVTEGMRKPAFLSGEQKKAIVDLLFKTNRKVTVKQLKEDYFKKIECFDSVEISGVEDRFNASLGTYHDLLKIIKDKDFLDNEENEDILEDIVLTLTLFEDREMIEERLKTYAHLFDDKVMKQLKRRRYTGWGRLSRKLINGIRDKQSGKTILDFLKSDGFANRNFMQLIHDDSLTFKEDIQKAQVSGQGDSLHEHIANLAGSPAIKKGILQTVKVVDELVKVMGRHKPENIVIEMARENQTTQKGQKNSRERMKRIEEGIKELGSQILKEHPVENTQLQNEKLYLYYLQNGRDMYVDQELDINRLSDYDVDHIVPQSFLKDDSIDNKVLTRSDKARGKSDNVPSEEVVKKMKNYWRQLLNAKLITQRKFDNLTKAERGGLSELDKAGFIKRQLVETRQITKHVAQILDSRMNTKYDENDKLIREVKVITLKSKLVSDFRKDFQFYKVREINNYHHAHDAYLNAVVGTALIKKYPKLESEFVYGDYKVYDVRKMIAKSEQEIGKATAKYFFYSNIMNFFKTEITLANGEIRKRPLIETNGETGEIVWDKGRDFATVRKVLSMPQVNIVKKTEVQTGGFSKESILPKRNSDKLIARKKDWDPKKYGGFDSPTVAYSVLVVAKVEKGKSKKLKSVKELLGITIMERSSFEKNPIDFLEAKGYKEVKKDLIIKLPKYSLFELENGRKRMLASAGELQKGNELALPSKYVNFLYLASHYEKLKGSPEDNEQKQLFVEQHKHYLDEIIEQISEFSKRVILADANLDKVLSAYNKHRDKPIREQAENIIHLFTLTNLGAPAAFKYFDTTIDRKRYTSTKEVLDATLIHQSITGLYETRIDLSQLGGDGGGGSGGSGGSGGSGGSGGGLEHLPRPPEISQFPLNPERLQALQHLVRKALEAGHIEPYTGPGNNPVFPVKKANGTWRFIHDLRATNSLTVDLSSSSPGPPDLSSLPTTLAHLQTIDLKDAFFQIPLPKQFQPYFAFTVPQQCNYGPGTRYAWKVLPQGFKNSPTLFQMQLASILQPIRQAFPQCVILQYMDDILLASPSPEDLQQLSEATMASLISHGLPVSQDKTQQTPGTIKFLGQIISPNHITYDAVPTVPIRSRWALPELQALLGEIQWVSKGTPTLRQPLHSLYCALQGHTDPRDQIYLNPSQVQSLMQLQQALSQNCRSRLAQTLPLLGAIMLTLTGTTTVVFQSKQQWPLVWLHAPLPHTSQCPWGQLLASAVLLLDKYTLQSYGLLCQTIHHNISIQTFNQFIQTSDHPSVPILLHHSHRFKNLGAQTGELWNTFLKTAAPLAPVKALTPVFTLSPIIINTAPCLFSDGSTSQAAYILWDKHILSQRSFPLPPPHKSAQQAELLGLLHGLSSARSWHCLNIFLDSKYLYHYLRTLAWGTFQGKSSQAPFQALLPRLLAHKVIYLHHVRSHTNLPDPISKLNALTDALLITPILAGKRTADGSEFEKRTADGSEFESPKKKAKVE

SEQ ID NO: 1503 - protein, 2015 aa, synthetic construct
MPAAKRVKLDGGDKKYSIGLDIGTNSVGWAVITDEYKVPSKKFKVLGNTDRHSIKKNLIGALLFDSGETAEATRLKRTARRRYTRRKNRICYLQEIFSNEMAKVDDSFFHRLEESFLVEEDKKHERHPIFGNIVDEVAYHEKYPTIYHLRKKLVDSTDKADLRLIYLALAHMIKFRGHFLIEGDLNPDNSDVDKLFIQLVQTYNQLFEENPINASGVDAKAILSARLSKSRRLENLIAQLPGEKKNGLFGNLIALSLGLTPNFKSNFDLAEDAKLQLSKDTYDDDLDNLLAQIGDQYADLFLAAKNLSDAILLSDILRVNTEITKAPLSASMIKRYDEHHQDLTLLKALVRQQLPEKYKEIFFDQSKNGYAGYIDGGASQEEFYKFIKPILEKMDGTEELLVKLNREDLLRKQRTFDNGSIPHQIHLGELHAILRRQEDFYPFLKDNREKIEKILTFRIPYYVGPLARGNSRFAWMTRKSEETITPWNFEEVVDKGASAQSFIERMTNFDKNLPNEKVLPKHSLLYEYFTVYNELTKVKYVTEGMRKPAFLSGEQKKAIVDLLFKTNRKVTVKQLKEDYFKKIECFDSVEISGVEDRFNASLGTYHDLLKIIKDKDFLDNEENEDILEDIVLTLTLFEDREMIEERLKTYAHLFDDKVMKQLKRRRYTGWGRLSRKLINGIRDKQSGKTILDFLKSDGFANRNFMQLIHDDSLTFKEDIQKAQVSGQGDSLHEHIANLAGSPAIKKGILQTVKVVDELVKVMGRHKPENIVIEMARENQTTQKGQKNSRERMKRIEEGIKELGSQILKEHPVENTQLQNEKLYLYYLQNGRDMYVDQELDINRLSDYDVDHIVPQSFLKDDSIDNKVLTRSDKARGKSDNVPSEEVVKKMKNYWRQLLNAKLITQRKFDNLTKAERGGLSELDKAGFIKRQLVETRQITKHVAQILDSRMNTKYDENDKLIREVKVITLKSKLVSDFRKDFQFYKVREINNYHHAHDAYLNAVVGTALIKKYPKLESEFVYGDYKVYDVRKMIAKSEQEIGKATAKYFFYSNIMNFFKTEITLANGEIRKRPLIETNGETGEIVWDKGRDFATVRKVLSMPQVNIVKKTEVQTGGFSKESILPKRNSDKLIARKKDWDPKKYGGFDSPTVAYSVLVVAKVEKGKSKKLKSVKELLGITIMERSSFEKNPIDFLEAKGYKEVKKDLIIKLPKYSLFELENGRKRMLASAGELQKGNELALPSKYVNFLYLASHYEKLKGSPEDNEQKQLFVEQHKHYLDEIIEQISEFSKRVILADANLDKVLSAYNKHRDKPIREQAENIIHLFTLTNLGAPAAFKYFDTTIDRKRYTSTKEVLDATLIHQSITGLYETRIDLSQLGGDGGGGSGGSGGSGGSGGSGGSGGGLEHLPRPPEISQFPLNPERLQALQHLVRKALEAGHIEPYTGPGNNPVFPVKKANGTWRFIHDLRATNSLTVDLSSSSPGPPDLSSPPTTLAHLQTIDLKDAFFQIPLPKQFQPYFAFTVPQQCNYGPGTRYAWKVLPQGFKNSPTLFQMQLASILQPIRQAFPQCVILQYMDDILLASPSPEDLQQLSEATMASLISHGLPVSQDKTQQTPGTIKFLGQIISPNHITYDAVPTVPIRSRWALPELQALLGEIQWVSKGTPTLRQPLHSLYCALQGHTDPRDQIYLNPSQVQSLMQLQQALSQNCRSRLAQTLPLLGAIMLTLTGTTTVVFQSKQQWPLVWLHAPLPHTSQCPWGQLLASAVLLLDKYTLQSYGLLCQTIHHNISIQTFNQFIQTSDHPSVPILLHHSHRFKNLGAQTGELWNTFLKTAAPLAPVKALTPVFTLSPIIINTAPCLFSDGSTSQAAYILWDKHILSQRSFPLPPPHKSAQQAELLGLLHGLSSARSWHCLNIFLDSKYLYHYLRTLAWGTFQGKSSQAPFQALLPRLLAHKVIYLHHVRSHTNLPDPISKLNALTDALLITPILAGKRTADGSEFEKRTADGSEFESPKKKAKVE

SEQ ID NO: 1504 - protein, 2099 aa, synthetic construct
MPAAKRVKLDGGDKKYSIGLDIGTNSVGWAVITDEYKVPSKKFKVLGNTDRHSIKKNLIGALLFDSGETAEATRLKRTARRRYTRRKNRICYLQEIFSNEMAKVDDSFFHRLEESFLVEEDKKHERHPIFGNIVDEVAYHEKYPTIYHLRKKLVDSTDKADLRLIYLALAHMIKFRGHFLIEGDLNPDNSDVDKLFIQLVQTYNQLFEENPINASGVDAKAILSARLSKSRRLENLIAQLPGEKKNGLFGNLIALSLGLTPNFKSNFDLAEDAKLQLSKDTYDDDLDNLLAQIGDQYADLFLAAKNLSDAILLSDILRVNTEITKAPLSASMIKRYDEHHQDLTLLKALVRQQLPEKYKEIFFDQSKNGYAGYIDGGASQEEFYKFIKPILEKMDGTEELLVKLNREDLLRKQRTFDNGSIPHQIHLGELHAILRRQEDFYPFLKDNREKIEKILTFRIPYYVGPLARGNSRFAWMTRKSEETITPWNFEEVVDKGASAQSFIERMTNFDKNLPNEKVLPKHSLLYEYFTVYNELTKVKYVTEGMRKPAFLSGEQKKAIVDLLFKTNRKVTVKQLKEDYFKKIECFDSVEISGVEDRFNASLGTYHDLLKIIKDKDFLDNEENEDILEDIVLTLTLFEDREMIEERLKTYAHLFDDKVMKQLKRRRYTGWGRLSRKLINGIRDKQSGKTILDFLKSDGFANRNFMQLIHDDSLTFKEDIQKAQVSGQGDSLHEHIANLAGSPAIKKGILQTVKVVDELVKVMGRHKPENIVIEMARENQTTQKGQKNSRERMKRIEEGIKELGSQILKEHPVENTQLQNEKLYLYYLQNGRDMYVDQELDINRLSDYDVDHIVPQSFLKDDSIDNKVLTRSDKARGKSDNVPSEEVVKKMKNYWRQLLNAKLITQRKFDNLTKAERGGLSELDKAGFIKRQLVETRQITKHVAQILDSRMNTKYDENDKLIREVKVITLKSKLVSDFRKDFQFYKVREINNYHHAHDAYLNAVVGTALIKKYPKLESEFVYGDYKVYDVRKMIAKSEQEIGKATAKYFFYSNIMNFFKTEITLANGEIRKRPLIETNGETGEIVWDKGRDFATVRKVLSMPQVNIVKKTEVQTGGFSKESILPKRNSDKLIARKKDWDPKKYGGFDSPTVAYSVLVVAKVEKGKSKKLKSVKELLGITIMERSSFEKNPIDFLEAKGYKEVKKDLIIKLPKYSLFELENGRKRMLASAGELQKGNELALPSKYVNFLYLASHYEKLKGSPEDNEQKQLFVEQHKHYLDEIIEQISEFSKRVILADANLDKVLSAYNKHRDKPIREQAENIIHLFTLTNLGAPAAFKYFDTTIDRKRYTSTKEVLDATLIHQSITGLYETRIDLSQLGGDGGEAAAKPAPGGTVSLQDEHRLFDIPVTTSLPDVWLQDFPQAWAETGGLGRAKCQAPIIIDLKPTAVPVSIKQYPMSLEAHMGIRQHIIKFLELGVLRPCRSPWNTPLLPVKKPGTQDYRPVQDLREINKRTVDIHPTVPNPYNLLSTLKPDYSWYTVLDLKDAFFCLPLAPQSQELFAFEWKDPERGISGQLTWTRLPQGFKNSPTLFDEALHRDLTDFRTQHPEVTLLQYVDDLLLAAPTKKACTQGTRHLLQELGEKGYRASAKKAQICQTKVTYLGYILSEGKRWLTPGRIETVARIPPPRNPREVREFLGTAGFCRLWIPGFAELAAPLYALTKESTPFTWQTEHQLAFEALKKALLSAPALGLPDTSKPFTLFLDERQGIAKGVLTQKLGPWKRPVAYLSKKLDPVAAGWPPCLRIMAATAMLVKDSAKLTLGQPLTVITPHTLEAIVRQPPDRWITNARLTHYQALLLDTDRVQFGPPVTLNPATLLPVPENQPSPHDCRQVLAETHGTREDLKDQELPDADHTWYTDGSSYLDSGTRRAGAAVVDGHNTIWAQSLPPGTSAQKAELIALTKALELSKGKKANIYTDSRYAFATAHTHGSIYERRGLLTSEGKEIKNKAEIIALLKALFLPQEVAIIHCPGHQKGQDPVAVGNRQADRVARQAAMAEVLTLATEPDNTSHITAGKRTADGSEFEKRTADGSEFESPKKKAKVE

SEQ ID NO: 1505 - protein, 2100 aa, synthetic construct
MPAAKRVKLDGGDKKYSIGLDIGTNSVGWAVITDEYKVPSKKFKVLGNTDRHSIKKNLIGALLFDSGETAEATRLKRTARRRYTRRKNRICYLQEIFSNEMAKVDDSFFHRLEESFLVEEDKKHERHPIFGNIVDEVAYHEKYPTIYHLRKKLVDSTDKADLRLIYLALAHMIKFRGHFLIEGDLNPDNSDVDKLFIQLVQTYNQLFEENPINASGVDAKAILSARLSKSRRLENLIAQLPGEKKNGLFGNLIALSLGLTPNFKSNFDLAEDAKLQLSKDTYDDDLDNLLAQIGDQYADLFLAAKNLSDAILLSDILRVNTEITKAPLSASMIKRYDEHHQDLTLLKALVRQQLPEKYKEIFFDQSKNGYAGYIDGGASQEEFYKFIKPILEKMDGTEELLVKLNREDLLRKQRTFDNGSIPHQIHLGELHAILRRQEDFYPFLKDNREKIEKILTFRIPYYVGPLARGNSRFAWMTRKSEETITPWNFEEVVDKGASAQSFIERMTNFDKNLPNEKVLPKHSLLYEYFTVYNELTKVKYVTEGMRKPAFLSGEQKKAIVDLLFKTNRKVTVKQLKEDYFKKIECFDSVEISGVEDRFNASLGTYHDLLKIIKDKDFLDNEENEDILEDIVLTLTLFEDREMIEERLKTYAHLFDDKVMKQLKRRRYTGWGRLSRKLINGIRDKQSGKTILDFLKSDGFANRNFMQLIHDDSLTFKEDIQKAQVSGQGDSLHEHIANLAGSPAIKKGILQTVKVVDELVKVMGRHKPENIVIEMARENQTTQKGQKNSRERMKRIEEGIKELGSQILKEHPVENTQLQNEKLYLYYLQNGRDMYVDQELDINRLSDYDVDHIVPQSFLKDDSIDNKVLTRSDKARGKSDNVPSEEVVKKMKNYWRQLLNAKLITQRKFDNLTKAERGGLSELDKAGFIKRQLVETRQITKHVAQILDSRMNTKYDENDKLIREVKVITLKSKLVSDFRKDFQFYKVREINNYHHAHDAYLNAVVGTALIKKYPKLESEFVYGDYKVYDVRKMIAKSEQEIGKATAKYFFYSNIMNFFKTEITLANGEIRKRPLIETNGETGEIVWDKGRDFATVRKVLSMPQVNIVKKTEVQTGGFSKESILPKRNSDKLIARKKDWDPKKYGGFDSPTVAYSVLVVAKVEKGKSKKLKSVKELLGITIMERSSFEKNPIDFLEAKGYKEVKKDLIIKLPKYSLFELENGRKRMLASAGELQKGNELALPSKYVNFLYLASHYEKLKGSPEDNEQKQLFVEQHKHYLDEIIEQISEFSKRVILADANLDKVLSAYNKHRDKPIREQAENIIHLFTLTNLGAPAAFKYFDTTIDRKRYTSTKEVLDATLIHQSITGLYETRIDLSQLGGDGGGGGGSSPAPGGTVSLQDEHRLFDIPVTTSLPDVWLQDFPQAWAETGGLGRAKCQAPIIIDLKPTAVPVSIKQYPMSLEAHMGIRQHIIKFLELGVLRPCRSPWNTPLLPVKKPGTQDYRPVQDLREINKRTVDIHPTVPNPYNLLSTLKPDYSWYTVLDLKDAFFCLPLAPQSQELFAFEWKDPERGISGQLTWTRLPQGFKNSPTLFDEALHRDLTDFRTQHPEVTLLQYVDDLLLAAPTKKACTQGTRHLLQELGEKGYRASAKKAQICQTKVTYLGYILSEGKRWLTPGRIETVARIPPPRNPREVREFLGTAGFCRLWIPGFAELAAPLYALTKESTPFTWQTEHQLAFEALKKALLSAPALGLPDTSKPFTLFLDERQGIAKGVLTQKLGPWKRPVAYLSKKLDPVAAGWPPCLRIMAATAMLVKDSAKLTLGQPLTVITPHTLEAIVRQPPDRWITNARLTHYQALLLDTDRVQFGPPVTLNPATLLPVPENQPSPHDCRQVLAETHGTREDLKDQELPDADHTWYTDGSSYLDSGTRRAGAAVVDGHNTIWAQSLPPGTSAQKAELIALTKALELSKGKKANIYTDSRYAFATAHTHGSIYERRGLLTSEGKEIKNKAEIIALLKALFLPQEVAIIHCPGHQKGQDPVAVGNRQADRVARQAAMAEVLTLATEPDNTSHITAGKRTADGSEFEKRTADGSEFESPKKKAKVE

SEQ ID NO: 1506 - protein, 2100 aa, synthetic construct
MPAAKRVKLDGGDKKYSIGLDIGTNSVGWAVITDEYKVPSKKFKVLGNTDRHSIKKNLIGALLFDSGETAEATRLKRTARRRYTRRKNRICYLQEIFSNEMAKVDDSFFHRLEESFLVEEDKKHERHPIFGNIVDEVAYHEKYPTIYHLRKKLVDSTDKADLRLIYLALAHMIKFRGHFLIEGDLNPDNSDVDKLFIQLVQTYNQLFEENPINASGVDAKAILSARLSKSRRLENLIAQLPGEKKNGLFGNLIALSLGLTPNFKSNFDLAEDAKLQLSKDTYDDDLDNLLAQIGDQYADLFLAAKNLSDAILLSDILRVNTEITKAPLSASMIKRYDEHHQDLTLLKALVRQQLPEKYKEIFFDQSKNGYAGYIDGGASQEEFYKFIKPILEKMDGTEELLVKLNREDLLRKQRTFDNGSIPHQIHLGELHAILRRQEDFYPFLKDNREKIEKILTFRIPYYVGPLARGNSRFAWMTRKSEETITPWNFEEVVDKGASAQSFIERMTNFDKNLPNEKVLPKHSLLYEYFTVYNELTKVKYVTEGMRKPAFLSGEQKKAIVDLLFKTNRKVTVKQLKEDYFKKIECFDSVEISGVEDRFNASLGTYHDLLKIIKDKDFLDNEENEDILEDIVLTLTLFEDREMIEERLKTYAHLFDDKVMKQLKRRRYTGWGRLSRKLINGIRDKQSGKTILDFLKSDGFANRNFMQLIHDDSLTFKEDIQKAQVSGQGDSLHEHIANLAGSPAIKKGILQTVKVVDELVKVMGRHKPENIVIEMARENQTTQKGQKNSRERMKRIEEGIKELGSQILKEHPVENTQLQNEKLYLYYLQNGRDMYVDQELDINRLSDYDVDHIVPQSFLKDDSIDNKVLTRSDKARGKSDNVPSEEVVKKMKNYWRQLLNAKLITQRKFDNLTKAERGGLSELDKAGFIKRQLVETRQITKHVAQILDSRMNTKYDENDKLIREVKVITLKSKLVSDFRKDFQFYKVREINNYHHAHDAYLNAVVGTALIKKYPKLESEFVYGDYKVYDVRKMIAKSEQEIGKATAKYFFYSNIMNFFKTEITLANGEIRKRPLIETNGETGEIVWDKGRDFATVRKVLSMPQVNIVKKTEVQTGGFSKESILPKRNSDKLIARKKDWDPKKYGGFDSPTVAYSVLVVAKVEKGKSKKLKSVKELLGITIMERSSFEKNPIDFLEAKGYKEVKKDLIIKLPKYSLFELENGRKRMLASAGELQKGNELALPSKYVNFLYLASHYEKLKGSPEDNEQKQLFVEQHKHYLDEIIEQISEFSKRVILADANLDKVLSAYNKHRDKPIREQAENIIHLFTLTNLGAPAAFKYFDTTIDRKRYTSTKEVLDATLIHQSITGLYETRIDLSQLGGDGGPAPGGSGGGGGTVSLQDEHRLFDIPVTTSLPDVWLQDFPQAWAETGGLGRAKCQAPIIIDLKPTAVPVSIKQYPMSLEAHMGIRQHIIKFLELGVLRPCRSPWNTPLLPVKKPGTQDYRPVQDLREINKRTVDIHPTVPNPYNLLSTLKPDYSWYTVLDLKDAFFCLPLAPQSQELFAFEWKDPERGISGQLTWTRLPQGFKNSPTLFDEALHRDLTDFRTQHPEVTLLQYVDDLLLAAPTKKACTQGTRHLLQELGEKGYRASAKKAQICQTKVTYLGYILSEGKRWLTPGRIETVARIPPPRNPREVREFLGTAGFCRLWIPGFAELAAPLYALTKESTPFTWQTEHQLAFEALKKALLSAPALGLPDTSKPFTLFLDERQGIAKGVLTQKLGPWKRPVAYLSKKLDPVAAGWPPCLRIMAATAMLVKDSAKLTLGQPLTVITPHTLEAIVRQPPDRWITNARLTHYQALLLDTDRVQFGPPVTLNPATLLPVPENQPSPHDCRQVLAETHGTREDLKDQELPDADHTWYTDGSSYLDSGTRRAGAAVVDGHNTIWAQSLPPGTSAQKAELIALTKALELSKGKKANIYTDSRYAFATAHTHGSIYERRGLLTSEGKEIKNKAEIIALLKALFLPQEVAIIHCPGHQKGQDPVAVGNRQADRVARQAAMAEVLTLATEPDNTSHITAGKRTADGSEFEKRTADGSEFESPKKKAKVE

SEQ ID NO: 1507 - protein, 2106 aa, synthetic construct
MPAAKRVKLDGGDKKYSIGLDIGTNSVGWAVITDEYKVPSKKFKVLGNTDRHSIKKNLIGALLFDSGETAEATRLKRTARRRYTRRKNRICYLQEIFSNEMAKVDDSFFHRLEESFLVEEDKKHERHPIFGNIVDEVAYHEKYPTIYHLRKKLVDSTDKADLRLIYLALAHMIKFRGHFLIEGDLNPDNSDVDKLFIQLVQTYNQLFEENPINASGVDAKAILSARLSKSRRLENLIAQLPGEKKNGLFGNLIALSLGLTPNFKSNFDLAEDAKLQLSKDTYDDDLDNLLAQIGDQYADLFLAAKNLSDAILLSDILRVNTEITKAPLSASMIKRYDEHHQDLTLLKALVRQQLPEKYKEIFFDQSKNGYAGYIDGGASQEEFYKFIKPILEKMDGTEELLVKLNREDLLRKQRTFDNGSIPHQIHLGELHAILRRQEDFYPFLKDNREKIEKILTFRIPYYVGPLARGNSRFAWMTRKSEETITPWNFEEVVDKGASAQSFIERMTNFDKNLPNEKVLPKHSLLYEYFTVYNELTKVKYVTEGMRKPAFLSGEQKKAIVDLLFKTNRKVTVKQLKEDYFKKIECFDSVEISGVEDRFNASLGTYHDLLKIIKDKDFLDNEENEDILEDIVLTLTLFEDREMIEERLKTYAHLFDDKVMKQLKRRRYTGWGRLSRKLINGIRDKQSGKTILDFLKSDGFANRNFMQLIHDDSLTFKEDIQKAQVSGQGDSLHEHIANLAGSPAIKKGILQTVKVVDELVKVMGRHKPENIVIEMARENQTTQKGQKNSRERMKRIEEGIKELGSQILKEHPVENTQLQNEKLYLYYLQNGRDMYVDQELDINRLSDYDVDHIVPQSFLKDDSIDNKVLTRSDKARGKSDNVPSEEVVKKMKNYWRQLLNAKLITQRKFDNLTKAERGGLSELDKAGFIKRQLVETRQITKHVAQILDSRMNTKYDENDKLIREVKVITLKSKLVSDFRKDFQFYKVREINNYHHAHDAYLNAVVGTALIKKYPKLESEFVYGDYKVYDVRKMIAKSEQEIGKATAKYFFYSNIMNFFKTEITLANGEIRKRPLIETNGETGEIVWDKGRDFATVRKVLSMPQVNIVKKTEVQTGGFSKESILPKRNSDKLIARKKDWDPKKYGGFDSPTVAYSVLVVAKVEKGKSKKLKSVKELLGITIMERSSFEKNPIDFLEAKGYKEVKKDLIIKLPKYSLFELENGRKRMLASAGELQKGNELALPSKYVNFLYLASHYEKLKGSPEDNEQKQLFVEQHKHYLDEIIEQISEFSKRVILADANLDKVLSAYNKHRDKPIREQAENIIHLFTLTNLGAPAAFKYFDTTIDRKRYTSTKEVLDATLIHQSITGLYETRIDLSQLGGDGGGGSGGSGGSGGSGGSGGTVSLQDEHRLFDIPVTTSLPDVWLQDFPQAWAETGGLGRAKCQAPIIIDLKPTAVPVSIKQYPMSLEAHMGIRQHIIKFLELGVLRPCRSPWNTPLLPVKKPGTQDYRPVQDLREINKRTVDIHPTVPNPYNLLSTLKPDYSWYTVLDLKDAFFCLPLAPQSQELFAFEWKDPERGISGQLTWTRLPQGFKNSPTLFDEALHRDLTDFRTQHPEVTLLQYVDDLLLAAPTKKACTQGTRHLLQELGEKGYRASAKKAQICQTKVTYLGYILSEGKRWLTPGRIETVARIPPPRNPREVREFLGTAGFCRLWIPGFAELAAPLYALTKESTPFTWQTEHQLAFEALKKALLSAPALGLPDTSKPFTLFLDERQGIAKGVLTQKLGPWKRPVAYLSKKLDPVAAGWPPCLRIMAATAMLVKDSAKLTLGQPLTVITPHTLEAIVRQPPDRWITNARLTHYQALLLDTDRVQFGPPVTLNPATLLPVPENQPSPHDCRQVLAETHGTREDLKDQELPDADHTWYTDGSSYLDSGTRRAGAAVVDGHNTIWAQSLPPGTSAQKAELIALTKALELSKGKKANIYTDSRYAFATAHTHGSIYERRGLLTSEGKEIKNKAEIIALLKALFLPQEVAIIHCPGHQKGQDPVAVGNRQADRVARQAAMAEVLTLATEPDNTSHITAGKRTADGSEFEKRTADGSEFESPKKKAKVE

SEQ ID NO: 1508 - protein, 2100 aa, synthetic construct
MPAAKRVKLDGGDKKYSIGLDIGTNSVGWAVITDEYKVPSKKFKVLGNTDRHSIKKNLIGALLFDSGETAEATRLKRTARRRYTRRKNRICYLQEIFSNEMAKVDDSFFHRLEESFLVEEDKKHERHPIFGNIVDEVAYHEKYPTIYHLRKKLVDSTDKADLRLIYLALAHMIKFRGHFLIEGDLNPDNSDVDKLFIQLVQTYNQLFEENPINASGVDAKAILSARLSKSRRLENLIAQLPGEKKNGLFGNLIALSLGLTPNFKSNFDLAEDAKLQLSKDTYDDDLDNLLAQIGDQYADLFLAAKNLSDAILLSDILRVNTEITKAPLSASMIKRYDEHHQDLTLLKALVRQQLPEKYKEIFFDQSKNGYAGYIDGGASQEEFYKFIKPILEKMDGTEELLVKLNREDLLRKQRTFDNGSIPHQIHLGELHAILRRQEDFYPFLKDNREKIEKILTFRIPYYVGPLARGNSRFAWMTRKSEETITPWNFEEVVDKGASAQSFIERMTNFDKNLPNEKVLPKHSLLYEYFTVYNELTKVKYVTEGMRKPAFLSGEQKKAIVDLLFKTNRKVTVKQLKEDYFKKIECFDSVEISGVEDRFNASLGTYHDLLKIIKDKDFLDNEENEDILEDIVLTLTLFEDREMIEERLKTYAHLFDDKVMKQLKRRRYTGWGRLSRKLINGIRDKQSGKTILDFLKSDGFANRNFMQLIHDDSLTFKEDIQKAQVSGQGDSLHEHIANLAGSPAIKKGILQTVKVVDELVKVMGRHKPENIVIEMARENQTTQKGQKNSRERMKRIEEGIKELGSQILKEHPVENTQLQNEKLYLYYLQNGRDMYVDQELDINRLSDYDVDHIVPQSFLKDDSIDNKVLTRSDKARGKSDNVPSEEVVKKMKNYWRQLLNAKLITQRKFDNLTKAERGGLSELDKAGFIKRQLVETRQITKHVAQILDSRMNTKYDENDKLIREVKVITLKSKLVSDFRKDFQFYKVREINNYHHAHDAYLNAVVGTALIKKYPKLESEFVYGDYKVYDVRKMIAKSEQEIGKATAKYFFYSNIMNFFKTEITLANGEIRKRPLIETNGETGEIVWDKGRDFATVRKVLSMPQVNIVKKTEVQTGGFSKESILPKRNSDKLIARKKDWDPKKYGGFDSPTVAYSVLVVAKVEKGKSKKLKSVKELLGITIMERSSFEKNPIDFLEAKGYKEVKKDLIIKLPKYSLFELENGRKRMLASAGELQKGNELALPSKYVNFLYLASHYEKLKGSPEDNEQKQLFVEQHKHYLDEIIEQISEFSKRVILADANLDKVLSAYNKHRDKPIREQAENIIHLFTLTNLGAPAAFKYFDTTIDRKRYTSTKEVLDATLIHQSITGLYETRIDLSQLGGDGGGSSGGSPAPGGTVSLQDEHRLFDIPVTTSLPDVWLQDFPQAWAETGGLGRAKCQAPIIIDLKPTAVPVSIKQYPMSLEAHMGIRQHIIKFLELGVLRPCRSPWNTPLLPVKKPGTQDYRPVQDLREINKRTVDIHPTVPNPYNLLSTLKPDYSWYTVLDLKDAFFCLPLAPQSQELFAFEWKDPERGISGQLTWTRLPQGFKNSPTLFDEALHRDLTDFRTQHPEVTLLQYVDDLLLAAPTKKACTQGTRHLLQELGEKGYRASAKKAQICQTKVTYLGYILSEGKRWLTPGRIETVARIPPPRNPREVREFLGTAGFCRLWIPGFAELAAPLYALTKESTPFTWQTEHQLAFEALKKALLSAPALGLPDTSKPFTLFLDERQGIAKGVLTQKLGPWKRPVAYLSKKLDPVAAGWPPCLRIMAATAMLVKDSAKLTLGQPLTVITPHTLEAIVRQPPDRWITNARLTHYQALLLDTDRVQFGPPVTLNPATLLPVPENQPSPHDCRQVLAETHGTREDLKDQELPDADHTWYTDGSSYLDSGTRRAGAAVVDGHNTIWAQSLPPGTSAQKAELIALTKALELSKGKKANIYTDSRYAFATAHTHGSIYERRGLLTSEGKEIKNKAEIIALLKALFLPQEVAIIHCPGHQKGQDPVAVGNRQADRVARQAAMAEVLTLATEPDNTSHITAGKRTADGSEFEKRTADGSEFESPKKKAKVE

SEQ ID NO: 1509 - protein, 2097 aa, synthetic construct
MPAAKRVKLDGGDKKYSIGLDIGTNSVGWAVITDEYKVPSKKFKVLGNTDRHSIKKNLIGALLFDSGETAEATRLKRTARRRYTRRKNRICYLQEIFSNEMAKVDDSFFHRLEESFLVEEDKKHERHPIFGNIVDEVAYHEKYPTIYHLRKKLVDSTDKADLRLIYLALAHMIKFRGHFLIEGDLNPDNSDVDKLFIQLVQTYNQLFEENPINASGVDAKAILSARLSKSRRLENLIAQLPGEKKNGLFGNLIALSLGLTPNFKSNFDLAEDAKLQLSKDTYDDDLDNLLAQIGDQYADLFLAAKNLSDAILLSDILRVNTEITKAPLSASMIKRYDEHHQDLTLLKALVRQQLPEKYKEIFFDQSKNGYAGYIDGGASQEEFYKFIKPILEKMDGTEELLVKLNREDLLRKQRTFDNGSIPHQIHLGELHAILRRQEDFYPFLKDNREKIEKILTFRIPYYVGPLARGNSRFAWMTRKSEETITPWNFEEVVDKGASAQSFIERMTNFDKNLPNEKVLPKHSLLYEYFTVYNELTKVKYVTEGMRKPAFLSGEQKKAIVDLLFKTNRKVTVKQLKEDYFKKIECFDSVEISGVEDRFNASLGTYHDLLKIIKDKDFLDNEENEDILEDIVLTLTLFEDREMIEERLKTYAHLFDDKVMKQLKRRRYTGWGRLSRKLINGIRDKQSGKTILDFLKSDGFANRNFMQLIHDDSLTFKEDIQKAQVSGQGDSLHEHIANLAGSPAIKKGILQTVKVVDELVKVMGRHKPENIVIEMARENQTTQKGQKNSRERMKRIEEGIKELGSQILKEHPVENTQLQNEKLYLYYLQNGRDMYVDQELDINRLSDYDVDHIVPQSFLKDDSIDNKVLTRSDKARGKSDNVPSEEVVKKMKNYWRQLLNAKLITQRKFDNLTKAERGGLSELDKAGFIKRQLVETRQITKHVAQILDSRMNTKYDENDKLIREVKVITLKSKLVSDFRKDFQFYKVREINNYHHAHDAYLNAVVGTALIKKYPKLESEFVYGDYKVYDVRKMIAKSEQEIGKATAKYFFYSNIMNFFKTEITLANGEIRKRPLIETNGETGEIVWDKGRDFATVRKVLSMPQVNIVKKTEVQTGGFSKESILPKRNSDKLIARKKDWDPKKYGGFDSPTVAYSVLVVAKVEKGKSKKLKSVKELLGITIMERSSFEKNPIDFLEAKGYKEVKKDLIIKLPKYSLFELENGRKRMLASAGELQKGNELALPSKYVNFLYLASHYEKLKGSPEDNEQKQLFVEQHKHYLDEIIEQISEFSKRVILADANLDKVLSAYNKHRDKPIREQAENIIHLFTLTNLGAPAAFKYFDTTIDRKRYTSTKEVLDATLIHQSITGLYETRIDLSQLGGDGGPAPGSSGGTVSLQDEHRLFDIPVTTSLPDVWLQDFPQAWAETGGLGRAKCQAPIIIDLKPTAVPVSIKQYPMSLEAHMGIRQHIIKFLELGVLRPCRSPWNTPLLPVKKPGTQDYRPVQDLREINKRTVDIHPTVPNPYNLLSTLKPDYSWYTVLDLKDAFFCLPLAPQSQELFAFEWKDPERGISGQLTWTRLPQGFKNSPTLFDEALHRDLTDFRTQHPEVTLLQYVDDLLLAAPTKKACTQGTRHLLQELGEKGYRASAKKAQICQTKVTYLGYILSEGKRWLTPGRIETVARIPPPRNPREVREFLGTAGFCRLWIPGFAELAAPLYALTKESTPFTWQTEHQLAFEALKKALLSAPALGLPDTSKPFTLFLDERQGIAKGVLTQKLGPWKRPVAYLSKKLDPVAAGWPPCLRIMAATAMLVKDSAKLTLGQPLTVITPHTLEAIVRQPPDRWITNARLTHYQALLLDTDRVQFGPPVTLNPATLLPVPENQPSPHDCRQVLAETHGTREDLKDQELPDADHTWYTDGSSYLDSGTRRAGAAVVDGHNTIWAQSLPPGTSAQKAELIALTKALELSKGKKANIYTDSRYAFATAHTHGSIYERRGLLTSEGKEIKNKAEIIALLKALFLPQEVAIIHCPGHQKGQDPVAVGNRQADRVARQAAMAEVLTLATEPDNTSHITAGKRTADGSEFEKRTADGSEFESPKKKAKVE

SEQ ID NO: 1510 - protein, 2009 aa, synthetic construct
MPAAKRVKLDGGDKKYSIGLDIGTNSVGWAVITDEYKVPSKKFKVLGNTDRHSIKKNLIGALLFDSGETAEATRLKRTARRRYTRRKNRICYLQEIFSNEMAKVDDSFFHRLEESFLVEEDKKHERHPIFGNIVDEVAYHEKYPTIYHLRKKLVDSTDKADLRLIYLALAHMIKFRGHFLIEGDLNPDNSDVDKLFIQLVQTYNQLFEENPINASGVDAKAILSARLSKSRRLENLIAQLPGEKKNGLFGNLIALSLGLTPNFKSNFDLAEDAKLQLSKDTYDDDLDNLLAQIGDQYADLFLAAKNLSDAILLSDILRVNTEITKAPLSASMIKRYDEHHQDLTLLKALVRQQLPEKYKEIFFDQSKNGYAGYIDGGASQEEFYKFIKPILEKMDGTEELLVKLNREDLLRKQRTFDNGSIPHQIHLGELHAILRRQEDFYPFLKDNREKIEKILTFRIPYYVGPLARGNSRFAWMTRKSEETITPWNFEEVVDKGASAQSFIERMTNFDKNLPNEKVLPKHSLLYEYFTVYNELTKVKYVTEGMRKPAFLSGEQKKAIVDLLFKTNRKVTVKQLKEDYFKKIECFDSVEISGVEDRFNASLGTYHDLLKIIKDKDFLDNEENEDILEDIVLTLTLFEDREMIEERLKTYAHLFDDKVMKQLKRRRYTGWGRLSRKLINGIRDKQSGKTILDFLKSDGFANRNFMQLIHDDSLTFKEDIQKAQVSGQGDSLHEHIANLAGSPAIKKGILQTVKVVDELVKVMGRHKPENIVIEMARENQTTQKGQKNSRERMKRIEEGIKELGSQILKEHPVENTQLQNEKLYLYYLQNGRDMYVDQELDINRLSDYDVDHIVPQSFLKDDSIDNKVLTRSDKARGKSDNVPSEEVVKKMKNYWRQLLNAKLITQRKFDNLTKAERGGLSELDKAGFIKRQLVETRQITKHVAQILDSRMNTKYDENDKLIREVKVITLKSKLVSDFRKDFQFYKVREINNYHHAHDAYLNAVVGTALIKKYPKLESEFVYGDYKVYDVRKMIAKSEQEIGKATAKYFFYSNIMNFFKTEITLANGEIRKRPLIETNGETGEIVWDKGRDFATVRKVLSMPQVNIVKKTEVQTGGFSKESILPKRNSDKLIARKKDWDPKKYGGFDSPTVAYSVLVVAKVEKGKSKKLKSVKELLGITIMERSSFEKNPIDFLEAKGYKEVKKDLIIKLPKYSLFELENGRKRMLASAGELQKGNELALPSKYVNFLYLASHYEKLKGSPEDNEQKQLFVEQHKHYLDEIIEQISEFSKRVILADANLDKVLSAYNKHRDKPIREQAENIIHLFTLTNLGAPAAFKYFDTTIDRKRYTSTKEVLDATLIHQSITGLYETRIDLSQLGGDGGEAAAKGGGPAPGGGLEHLPPPPEVSQFPLNPERLQALTDLVSRALEAKHIEPYQGPGNNPIFPVKKPNGKWRFIHDLRATNSVTRDLASPSPGPPDLTSLPQGLPHLRTIDLTDAFFQIPLPTIFQPYFAFTLPQPNNYGPGTRYSWRVLPQGFKNSPTLFEQQLSHILTPVRKTFPNSLIIQYMDDILLASPAPGELAALTDKVTNALTKEGLPLSPEKTQATPGPIHFLGQVISQDCITYETLPSINVKSTWSLAELQSMLGELQWVSKGTPVLRSSLHQLYLALRGHRDPRDTIKLTSIQVQALRTIQKALTLNCRSRLVNQLPILALIMLRPTGTTAVLFQTKQKWPLVWLHTPHPATSLRPWGQLLANAVIILDKYSLQHYGQVCKSFHHNISNQALTYYLHTSDQSSVAILLQHSHRFHNLGAQPSGPWRSLLQMPQIFQNIDVLRPPFTISPVVINHAPCLFSDGSASKAAFIIWDRQVIHQQVLSLPSTCSAQAGELFGLLAGLQKSQPWVALNIFLDSKFLIGHLRRMALGAFPGPSTQCELHTQLLPLLQGKTVYVHHVRSHTLLQDPISRLNEATDALMLAPLLPLAGKRTADGSEFEKRTADGSEFESPKKKAKVE

SEQ ID NO: 1511 - protein, 2001 aa, synthetic construct
MPAAKRVKLDGGDKKYSIGLDIGTNSVGWAVITDEYKVPSKKFKVLGNTDRHSIKKNLIGALLFDSGETAEATRLKRTARRRYTRRKNRICYLQEIFSNEMAKVDDSFFHRLEESFLVEEDKKHERHPIFGNIVDEVAYHEKYPTIYHLRKKLVDSTDKADLRLIYLALAHMIKFRGHFLIEGDLNPDNSDVDKLFIQLVQTYNQLFEENPINASGVDAKAILSARLSKSRRLENLIAQLPGEKKNGLFGNLIALSLGLTPNFKSNFDLAEDAKLQLSKDTYDDDLDNLLAQIGDQYADLFLAAKNLSDAILLSDILRVNTEITKAPLSASMIKRYDEHHQDLTLLKALVRQQLPEKYKEIFFDQSKNGYAGYIDGGASQEEFYKFIKPILEKMDGTEELLVKLNREDLLRKQRTFDNGSIPHQIHLGELHAILRRQEDFYPFLKDNREKIEKILTFRIPYYVGPLARGNSRFAWMTRKSEETITPWNFEEVVDKGASAQSFIERMTNFDKNLPNEKVLPKHSLLYEYFTVYNELTKVKYVTEGMRKPAFLSGEQKKAIVDLLFKTNRKVTVKQLKEDYFKKIECFDSVEISGVEDRFNASLGTYHDLLKIIKDKDFLDNEENEDILEDIVLTLTLFEDREMIEERLKTYAHLFDDKVMKQLKRRRYTGWGRLSRKLINGIRDKQSGKTILDFLKSDGFANRNFMQLIHDDSLTFKEDIQKAQVSGQGDSLHEHIANLAGSPAIKKGILQTVKVVDELVKVMGRHKPENIVIEMARENQTTQKGQKNSRERMKRIEEGIKELGSQILKEHPVENTQLQNEKLYLYYLQNGRDMYVDQELDINRLSDYDVDHIVPQSFLKDDSIDNKVLTRSDKARGKSDNVPSEEVVKKMKNYWRQLLNAKLITQRKFDNLTKAERGGLSELDKAGFIKRQLVETRQITKHVAQILDSRMNTKYDENDKLIREVKVITLKSKLVSDFRKDFQFYKVREINNYHHAHDAYLNAVVGTALIKKYPKLESEFVYGDYKVYDVRKMIAKSEQEIGKATAKYFFYSNIMNFFKTEITLANGEIRKRPLIETNGETGEIVWDKGRDFATVRKVLSMPQVNIVKKTEVQTGGFSKESILPKRNSDKLIARKKDWDPKKYGGFDSPTVAYSVLVVAKVEKGKSKKLKSVKELLGITIMERSSFEKNPIDFLEAKGYKEVKKDLIIKLPKYSLFELENGRKRMLASAGELQKGNELALPSKYVNFLYLASHYEKLKGSPEDNEQKQLFVEQHKHYLDEIIEQISEFSKRVILADANLDKVLSAYNKHRDKPIREQAENIIHLFTLTNLGAPAAFKYFDTTIDRKRYTSTKEVLDATLIHQSITGLYETRIDLSQLGGDGGGGSGGGLEHLPPPPEVSQFPLNPERLQALTDLVSRALEAKHIEPYQGPGNNPIFPVKKPNGKWRFIHDLRATNSVTRDLASPSPGPPDLTSLPQGLPHLRTIDLTDAFFQIPLPTIFQPYFAFTLPQPNNYGPGTRYSWRVLPQGFKNSPTLFQQQLSHILTPVRKTFPNSLIIQYMDDILLASPAPGELAALTDKVTNALTKEGLPLSPEKTQATPGPIHFLGQVISQDCITYETLPSINVKSTWSLAELQSMLGELQWVSKGTPVLRSSLHQLYLALRGHRDPRDTIKLTSIQVQALRTIQKALTLNCRSRLVNQLPILALIMLRPTGTTAVLFQTKQKWPLVWLHTPHPATSLRPWGQLLANAVIILDKYSLQHYGQVCKSFHHNISNQALTYYLHTSDQSSVAILLQHSHRFHNLGAQPSGPWRSLLQMPQIFQNIDVLRPPFTISPVVINHAPCLFSDGSASKAAFIIWDRQVIHQQVLSLPSTCSAQAGELFGLLAGLQKSQPWVALNIFLDSKFLIGHLRRMAWGAFPGPSTQCELHTQLLPLLQGKTVYVHHVRSHTLLQDPISRLNEATDALMLAPLLPLAGKRTADGSEFEKRTADGSEFESPKKKAKVE

SEQ ID NO: 1512 - protein, 2004 aa, synthetic construct
MPAAKRVKLDGGDKKYSIGLDIGTNSVGWAVITDEYKVPSKKFKVLGNTDRHSIKKNLIGALLFDSGETAEATRLKRTARRRYTRRKNRICYLQEIFSNEMAKVDDSFFHRLEESFLVEEDKKHERHPIFGNIVDEVAYHEKYPTIYHLRKKLVDSTDKADLRLIYLALAHMIKFRGHFLIEGDLNPDNSDVDKLFIQLVQTYNQLFEENPINASGVDAKAILSARLSKSRRLENLIAQLPGEKKNGLFGNLIALSLGLTPNFKSNFDLAEDAKLQLSKDTYDDDLDNLLAQIGDQYADLFLAAKNLSDAILLSDILRVNTEITKAPLSASMIKRYDEHHQDLTLLKALVRQQLPEKYKEIFFDQSKNGYAGYIDGGASQEEFYKFIKPILEKMDGTEELLVKLNREDLLRKQRTFDNGSIPHQIHLGELHAILRRQEDFYPFLKDNREKIEKILTFRIPYYVGPLARGNSRFAWMTRKSEETITPWNFEEVVDKGASAQSFIERMTNFDKNLPNEKVLPKHSLLYEYFTVYNELTKVKYVTEGMRKPAFLSGEQKKAIVDLLFKTNRKVTVKQLKEDYFKKIECFDSVEISGVEDRFNASLGTYHDLLKIIKDKDFLDNEENEDILEDIVLTLTLFEDREMIEERLKTYAHLFDDKVMKQLKRRRYTGWGRLSRKLINGIRDKQSGKTILDFLKSDGFANRNFMQLIHDDSLTFKEDIQKAQVSGQGDSLHEHIANLAGSPAIKKGILQTVKVVDELVKVMGRHKPENIVIEMARENQTTQKGQKNSRERMKRIEEGIKELGSQILKEHPVENTQLQNEKLYLYYLQNGRDMYVDQELDINRLSDYDVDHIVPQSFLKDDSIDNKVLTRSDKARGKSDNVPSEEVVKKMKNYWRQLLNAKLITQRKFDNLTKAERGGLSELDKAGFIKRQLVETRQITKHVAQILDSRMNTKYDENDKLIREVKVITLKSKLVSDFRKDFQFYKVREINNYHHAHDAYLNAVVGTALIKKYPKLESEFVYGDYKVYDVRKMIAKSEQEIGKATAKYFFYSNIMNFFKTEITLANGEIRKRPLIETNGETGEIVWDKGRDFATVRKVLSMPQVNIVKKTEVQTGGFSKESILPKRNSDKLIARKKDWDPKKYGGFDSPTVAYSVLVVAKVEKGKSKKLKSVKELLGITIMERSSFEKNPIDFLEAKGYKEVKKDLIIKLPKYSLFELENGRKRMLASAGELQKGNELALPSKYVNFLYLASHYEKLKGSPEDNEQKQLFVEQHKHYLDEIIEQISEFSKRVILADANLDKVLSAYNKHRDKPIREQAENIIHLFTLTNLGAPAAFKYFDTTIDRKRYTSTKEVLDATLIHQSITGLYETRIDLSQLGGDGGGGSGGGGGGLEHLPPPPEVSQFPLNPERLQALTDLVSRALEAKHIEPYQGPGNNPIFPVKKPNGKWRFIHDLRATNSVTRDLASPSPGPPDLTSLPQGLPHLRTIDLTDAFFQIPLPTIFQPYFAFTLPQPNNYGPGTRYSWRVLPQGFKNSPTLFQQQLSHILTPVRKTFPNSLIIQYMDDILLASPAPGELAALTDKVTNALTKEGLPLSPEKTQATPGPIHFLGQVISQDCITYETLPSINVKSTWSLAELQSMLGELQWVSKGTPVLRSSLHQLYLALRGHRDPRDTIKLTSIQVQALRTIQKALTLNCRSRLVNQLPILALIMLRPTGTTAVLFQTKQKWPLVWLHTPHPATSLRPWGQLLANAVIILDKYSLQHYGQVCKSFHHNISNQALTYYLHTSDQSSVAILLQHSHRFHNLGAQPSGPWRSLLQMPQIFQNIDVLRPPFTISPVVINHAPCLFSDGSASKAAFIIWDRQVIHQQVLSLPSTCSAQAGELFGLLAGLQKSQPWVALNIFLDSKFLIGHLRRMAWGAFPGPSTQCELHTQLLPLLQGKTVYVHHVRSHTLLQDPISRLNEATDALMLAPLLPLAGKRTADGSEFEKRTADGSEFESPKKKAKVE

SEQ ID NO: 1513 - protein, 2007 aa, synthetic construct
MPAAKRVKLDGGDKKYSIGLDIGTNSVGWAVITDEYKVPSKKFKVLGNTDRHSIKKNLIGALLFDSGETAEATRLKRTARRRYTRRKNRICYLQEIFSNEMAKVDDSFFHRLEESFLVEEDKKHERHPIFGNIVDEVAYHEKYPTIYHLRKKLVDSTDKADLRLIYLALAHMIKFRGHFLIEGDLNPDNSDVDKLFIQLVQTYNQLFEENPINASGVDAKAILSARLSKSRRLENLIAQLPGEKKNGLFGNLIALSLGLTPNFKSNFDLAEDAKLQLSKDTYDDDLDNLLAQIGDQYADLFLAAKNLSDAILLSDILRVNTEITKAPLSASMIKRYDEHHQDLTLLKALVRQQLPEKYKEIFFDQSKNGYAGYIDGGASQEEFYKFIKPILEKMDGTEELLVKLNREDLLRKQRTFDNGSIPHQIHLGELHAILRRQEDFYPFLKDNREKIEKILTFRIPYYVGPLARGNSRFAWMTRKSEETITPWNFEEVVDKGASAQSFIERMTNFDKNLPNEKVLPKHSLLYEYFTVYNELTKVKYVTEGMRKPAFLSGEQKKAIVDLLFKTNRKVTVKQLKEDYFKKIECFDSVEISGVEDRFNASLGTYHDLLKIIKDKDFLDNEENEDILEDIVLTLTLFEDREMIEERLKTYAHLFDDKVMKQLKRRRYTGWGRLSRKLINGIRDKQSGKTILDFLKSDGFANRNFMQLIHDDSLTFKEDIQKAQVSGQGDSLHEHIANLAGSPAIKKGILQTVKVVDELVKVMGRHKPENIVIEMARENQTTQKGQKNSRERMKRIEEGIKELGSQILKEHPVENTQLQNEKLYLYYLQNGRDMYVDQELDINRLSDYDVDHIVPQSFLKDDSIDNKVLTRSDKARGKSDNVPSEEVVKKMKNYWRQLLNAKLITQRKFDNLTKAERGGLSELDKAGFIKRQLVETRQITKHVAQILDSRMNTKYDENDKLIREVKVITLKSKLVSDFRKDFQFYKVREINNYHHAHDAYLNAVVGTALIKKYPKLESEFVYGDYKVYDVRKMIAKSEQEIGKATAKYFFYSNIMNFFKTEITLANGEIRKRPLIETNGETGEIVWDKGRDFATVRKVLSMPQVNIVKKTEVQTGGFSKESILPKRNSDKLIARKKDWDPKKYGGFDSPTVAYSVLVVAKVEKGKSKKLKSVKELLGITIMERSSFEKNPIDFLEAKGYKEVKKDLIIKLPKYSLFELENGRKRMLASAGELQKGNELALPSKYVNFLYLASHYEKLKGSPEDNEQKQLFVEQHKHYLDEIIEQISEFSKRVILADANLDKVLSAYNKHRDKPIREQAENIIHLFTLTNLGAPAAFKYFDTTIDRKRYTSTKEVLDATLIHQSITGLYETRIDLSQLGGDGGPAPGGGGSSGGGLEHLPPPPEVSQFPLNPERLQALTDLVSRALEAKHIEPYQGPGNNPIFPVKKPNGKWRFIHDLRATNSVTRDLASPSPGPPDLTSLPQGLPHLRTIDLTDAFFQIPLPTIFQPYFAFTLPQPNNYGPGTRYSWRVLPQGFKNSPTLFQQQLSHILTPVRKTFPNSLIIQYMDDILLASPAPGELAALTDKVTNALTKEGLPLSPEKTQATPGPIHFLGQVISQDCITYETLPSINVKSTWSLAELQSMLGELQWVSKGTPVLRSSLHQLYLALRGHRDPRDTIKLTSIQVQALRTIQKALTLNCRSRLVNQLPILALIMLRPTGTTAVLFQTKQKWPLVWLHTPHPATSLRPWGQLLANAVIILDKYSLQHYGQVCKSFHHNISNQALTYYLHTSDQSSVAILLQHSHRFHNLGAQPSGPWRSLLQMPQIFQNIDVLRPPFTISPVVINHAPCLFSDGSASKAAFIIWDRQVIHQQVLSLPSTCSAQAGELFGLLAGLQKSQPWVALNIFLDSKFLIGHLRRMAWGAFPGPSTQCELHTQLLPLLQGKTVYVHHVRSHTLLQDPISRLNEATDALMLAPLLPLAGKRTADGSEFEKRTADGSEFESPKKKAKVE

SEQ ID NO: 1514 - protein, 2007 aa, synthetic construct
MPAAKRVKLDGGDKKYSIGLDIGTNSVGWAVITDEYKVPSKKFKVLGNTDRHSIKKNLIGALLFDSGETAEATRLKRTARRRYTRRKNRICYLQEIFSNEMAKVDDSFFHRLEESFLVEEDKKHERHPIFGNIVDEVAYHEKYPTIYHLRKKLVDSTDKADLRLIYLALAHMIKFRGHFLIEGDLNPDNSDVDKLFIQLVQTYNQLFEENPINASGVDAKAILSARLSKSRRLENLIAQLPGEKKNGLFGNLIALSLGLTPNFKSNFDLAEDAKLQLSKDTYDDDLDNLLAQIGDQYADLFLAAKNLSDAILLSDILRVNTEITKAPLSASMIKRYDEHHQDLTLLKALVRQQLPEKYKEIFFDQSKNGYAGYIDGGASQEEFYKFIKPILEKMDGTEELLVKLNREDLLRKQRTFDNGSIPHQIHLGELHAILRRQEDFYPFLKDNREKIEKILTFRIPYYVGPLARGNSRFAWMTRKSEETITPWNFEEVVDKGASAQSFIERMTNFDKNLPNEKVLPKHSLLYEYFTVYNELTKVKYVTEGMRKPAFLSGEQKKAIVDLLFKTNRKVTVKQLKEDYFKKIECFDSVEISGVEDRFNASLGTYHDLLKIIKDKDFLDNEENEDILEDIVLTLTLFEDREMIEERLKTYAHLFDDKVMKQLKRRRYTGWGRLSRKLINGIRDKQSGKTILDFLKSDGFANRNFMQLIHDDSLTFKEDIQKAQVSGQGDSLHEHIANLAGSPAIKKGILQTVKVVDELVKVMGRHKPENIVIEMARENQTTQKGQKNSRERMKRIEEGIKELGSQILKEHPVENTQLQNEKLYLYYLQNGRDMYVDQELDINRLSDYDVDHIVPQSFLKDDSIDNKVLTRSDKARGKSDNVPSEEVVKKMKNYWRQLLNAKLITQRKFDNLTKAERGGLSELDKAGFIKRQLVETRQITKHVAQILDSRMNTKYDENDKLIREVKVITLKSKLVSDFRKDFQFYKVREINNYHHAHDAYLNAVVGTALIKKYPKLESEFVYGDYKVYDVRKMIAKSEQEIGKATAKYFFYSNIMNFFKTEITLANGEIRKRPLIETNGETGEIVWDKGRDFATVRKVLSMPQVNIVKKTEVQTGGFSKESILPKRNSDKLIARKKDWDPKKYGGFDSPTVAYSVLVVAKVEKGKSKKLKSVKELLGITIMERSSFEKNPIDFLEAKGYKEVKKDLIIKLPKYSLFELENGRKRMLASAGELQKGNELALPSKYVNFLYLASHYEKLKGSPEDNEQKQLFVEQHKHYLDEIIEQISEFSKRVILADANLDKVLSAYNKHRDKPIREQAENIIHLFTLTNLGAPAAFKYFDTTIDRKRYTSTKEVLDATLIHQSITGLYETRIDLSQLGGDGGGGGPAPGSSGGGLEHLPPPPEVSQFPLNPERLQALTDLVSRALEAKHIEPYQGPGNNPIFPVKKPNGKWRFIHDLRATNSVTRDLASPSPGPPDLTSPPQGLPHLRTIDLTDAFFQIPLPTIFQPYFAFTLPQPNNYGPGTRYSWRVLPQGFKNSPTLFQQQLSHILTPVRKTFPNSLIIQYMDDILLASPAPGELAALTDKVTNALTKEGLPLSPEKTQATPGPIHFLGQVISQDCITYETLPSINVKSTWSLAELQSMLGELQWVSKGTPVLRSSLHQLYLALRGHRDPRDTIKLTSIQVQALRTIQKALTLNCRSRLVNQLPILALIMLRPTGTTAVLFQTKQKWPLVWLHTPHPATSLRPWGQLLANAVIILDKYSLQHYGQVCKSFHHNISNQALTYYLHTSDQSSVAILLQHSHRFHNLGAQPSGPWRSLLQMPQIFQNIDVLRPPFTISPVVINHAPCLFSDGSASKAAFIIWDRQVIHQQVLSLPSTCSAQAGELFGLLAGLQKSQPWVALNIFLDSKFLIGHLRRMAWGAFPGPSTQCELHTQLLPLLQGKTVYVHHVRSHTLLQDPISRLNEATDALMLAPLLPLAGKRTADGSEFEKRTADGSEFESPKKKAKVE

SEQ ID NO: 1515 - protein, 2007 aa, synthetic construct
MPAAKRVKLDGGDKKYSIGLDIGTNSVGWAVITDEYKVPSKKFKVLGNTDRHSIKKNLIGALLFDSGETAEATRLKRTARRRYTRRKNRICYLQEIFSNEMAKVDDSFFHRLEESFLVEEDKKHERHPIFGNIVDEVAYHEKYPTIYHLRKKLVDSTDKADLRLIYLALAHMIKFRGHFLIEGDLNPDNSDVDKLFIQLVQTYNQLFEENPINASGVDAKAILSARLSKSRRLENLIAQLPGEKKNGLFGNLIALSLGLTPNFKSNFDLAEDAKLQLSKDTYDDDLDNLLAQIGDQYADLFLAAKNLSDAILLSDILRVNTEITKAPLSASMIKRYDEHHQDLTLLKALVRQQLPEKYKEIFFDQSKNGYAGYIDGGASQEEFYKFIKPILEKMDGTEELLVKLNREDLLRKQRTFDNGSIPHQIHLGELHAILRRQEDFYPFLKDNREKIEKILTFRIPYYVGPLARGNSRFAWMTRKSEETITPWNFEEVVDKGASAQSFIERMTNFDKNLPNEKVLPKHSLLYEYFTVYNELTKVKYVTEGMRKPAFLSGEQKKAIVDLLFKTNRKVTVKQLKEDYFKKIECFDSVEISGVEDRFNASLGTYHDLLKIIKDKDFLDNEENEDILEDIVLTLTLFEDREMIEERLKTYAHLFDDKVMKQLKRRRYTGWGRLSRKLINGIRDKQSGKTILDFLKSDGFANRNFMQLIHDDSLTFKEDIQKAQVSGQGDSLHEHIANLAGSPAIKKGILQTVKVVDELVKVMGRHKPENIVIEMARENQTTQKGQKNSRERMKRIEEGIKELGSQILKEHPVENTQLQNEKLYLYYLQNGRDMYVDQELDINRLSDYDVDHIVPQSFLKDDSIDNKVLTRSDKARGKSDNVPSEEVVKKMKNYWRQLLNAKLITQRKFDNLTKAERGGLSELDKAGFIKRQLVETRQITKHVAQILDSRMNTKYDENDKLIREVKVITLKSKLVSDFRKDFQFYKVREINNYHHAHDAYLNAVVGTALIKKYPKLESEFVYGDYKVYDVRKMIAKSEQEIGKATAKYFFYSNIMNFFKTEITLANGEIRKRPLIETNGETGEIVWDKGRDFATVRKVLSMPQVNIVKKTEVQTGGFSKESILPKRNSDKLIARKKDWDPKKYGGFDSPTVAYSVLVVAKVEKGKSKKLKSVKELLGITIMERSSFEKNPIDFLEAKGYKEVKKDLIIKLPKYSLFELENGRKRMLASAGELQKGNELALPSKYVNFLYLASHYEKLKGSPEDNEQKQLFVEQHKHYLDEIIEQISEFSKRVILADANLDKVLSAYNKHRDKPIREQAENIIHLFTLTNLGAPAAFKYFDTTIDRKRYTSTKEVLDATLIHQSITGLYETRIDLSQLGGDGGGSSGGGPAPGGGLEHLPPPPEVSQFPLNPERLQALTDLVSRALEAKHIEPYQGPGNNPIFPVKKPNGKWRFIHDLRATNSVTRDLASPSPGPPDLTSPPQGLPHLRTIDLTDAFFQIPLPTIFQPYFAFTLPQPNNYGPGTRYSWRVLPQGFKNSPTLFQQQLSHILTPVRKTFPNSLIIQYMDDILLASPAPGELAALTDKVTNALTKEGLPLSPEKTQATPGPIHFLGQVISQDCITYETLPSINVKSTWSLAELQSMLGELQWVSKGTPVLRSSLHQLYLALRGHRDPRDTIKLTSIQVQALRTIQKALTLNCRSRLVNQLPILALIMLRPTGTTAVLFQTKQKWPLVWLHTPHPATSLRPWGQLLANAVIILDKYSLQHYGQVCKSFHHNISNQALTYYLHTSDQSSVAILLQHSHRFHNLGAQPSGPWRSLLQMPQIFQNIDVLRPPFTISPVVINHAPCLFSDGSASKAAFIIWDRQVIHQQVLSLPSTCSAQAGELFGLLAGLQKSQPWVALNIFLDSKFLIGHLRRMAWGAFPGPSTQCELHTQLLPLLQGKTVYVHHVRSHTLLQDPISRLNEATDALMLAPLLPLAGKRTADGSEFEKRTADGSEFESPKKKAKVE

SEQ ID NO: 1516 - protein, 2006 aa, synthetic construct
MPAAKRVKLDGGDKKYSIGLDIGTNSVGWAVITDEYKVPSKKFKVLGNTDRHSIKKNLIGALLFDSGETAEATRLKRTARRRYTRRKNRICYLQEIFSNEMAKVDDSFFHRLEESFLVEEDKKHERHPIFGNIVDEVAYHEKYPTIYHLRKKLVDSTDKADLRLIYLALAHMIKFRGHFLIEGDLNPDNSDVDKLFIQLVQTYNQLFEENPINASGVDAKAILSARLSKSRRLENLIAQLPGEKKNGLFGNLIALSLGLTPNFKSNFDLAEDAKLQLSKDTYDDDLDNLLAQIGDQYADLFLAAKNLSDAILLSDILRVNTEITKAPLSASMIKRYDEHHQDLTLLKALVRQQLPEKYKEIFFDQSKNGYAGYIDGGASQEEFYKFIKPILEKMDGTEELLVKLNREDLLRKQRTFDNGSIPHQIHLGELHAILRRQEDFYPFLKDNREKIEKILTFRIPYYVGPLARGNSRFAWMTRKSEETITPWNFEEVVDKGASAQSFIERMTNFDKNLPNEKVLPKHSLLYEYFTVYNELTKVKYVTEGMRKPAFLSGEQKKAIVDLLFKTNRKVTVKQLKEDYFKKIECFDSVEISGVEDRFNASLGTYHDLLKIIKDKDFLDNEENEDILEDIVLTLTLFEDREMIEERLKTYAHLFDDKVMKQLKRRRYTGWGRLSRKLINGIRDKQSGKTILDFLKSDGFANRNFMQLIHDDSLTFKEDIQKAQVSGQGDSLHEHIANLAGSPAIKKGILQTVKVVDELVKVMGRHKPENIVIEMARENQTTQKGQKNSRERMKRIEEGIKELGSQILKEHPVENTQLQNEKLYLYYLQNGRDMYVDQELDINRLSDYDVDHIVPQSFLKDDSIDNKVLTRSDKARGKSDNVPSEEVVKKMKNYWRQLLNAKLITQRKFDNLTKAERGGLSELDKAGFIKRQLVETRQITKHVAQILDSRMNTKYDENDKLIREVKVITLKSKLVSDFRKDFQFYKVREINNYHHAHDAYLNAVVGTALIKKYPKLESEFVYGDYKVYDVRKMIAKSEQEIGKATAKYFFYSNIMNFFKTEITLANGEIRKRPLIETNGETGEIVWDKGRDFATVRKVLSMPQVNIVKKTEVQTGGFSKESILPKRNSDKLIARKKDWDPKKYGGFDSPTVAYSVLVVAKVEKGKSKKLKSVKELLGITIMERSSFEKNPIDFLEAKGYKEVKKDLIIKLPKYSLFELENGRKRMLASAGELQKGNELALPSKYVNFLYLASHYEKLKGSPEDNEQKQLFVEQHKHYLDEIIEQISEFSKRVILADANLDKVLSAYNKHRDKPIREQAENIIHLFTLTNLGAPAAFKYFDTTIDRKRYTSTKEVLDATLIHQSITGLYETRIDLSQLGGDGGGGSEAAAKGGGLEHLPPPPEVSQFPLNPERLQALTDLVSRALEAKHIEPYQGPGNNPIFPVKKPNGKWRFIHDLRATNSVTRDLASPSPGPPDLTSPPQGLPHLRTIDLTDAFFQIPLPTIFQPYFAFTLPQPNNYGPGTRYSWRVLPQGFKNSPTLFQQQLSHILTPVRKTFPNSLIIQYMDDILLASPAPGELAALTDKVTNALTKEGLPLSPEKTQATPGPIHFLGQVISQDCITYETLPSINVKSTWSLAELQSMLGELQWVSKGTPVLRSSLHQLYLALRGHRDPRDTIKLTSIQVQALRTIQKALTLNCRSRLVNQLPILALIMLRPTGTTAVLFQTKQKWPLVWLHTPHPATSLRPWGQLLANAVIILDKYSLQHYGQVCKSFHHNISNQALTYYLHTSDQSSVAILLQHSHRFHNLGAQPSGPWRSLLQMPQIFQNIDVLRPPFTISPVVINHAPCLFSDGSASKAAFIIWDRQVIHQQVLSLPSTCSAQAGELFGLLAGLQKSQPWVALNIFLDSKFLIGHLRRMAWGAFPGPSTQCELHTQLLPLLQGKTVYVHHVRSHTLLQDPISRLNEATDALMLAPLLPLAGKRTADGSEFEKRTADGSEFESPKKKAKVE

SEQ ID NO: 1517 - protein, 2009 aa, synthetic construct
MPAAKRVKLDGGDKKYSIGLDIGTNSVGWAVITDEYKVPSKKFKVLGNTDRHSIKKNLIGALLFDSGETAEATRLKRTARRRYTRRKNRICYLQEIFSNEMAKVDDSFFHRLEESFLVEEDKKHERHPIFGNIVDEVAYHEKYPTIYHLRKKLVDSTDKADLRLIYLALAHMIKFRGHFLIEGDLNPDNSDVDKLFIQLVQTYNQLFEENPINASGVDAKAILSARLSKSRRLENLIAQLPGEKKNGLFGNLIALSLGLTPNFKSNFDLAEDAKLQLSKDTYDDDLDNLLAQIGDQYADLFLAAKNLSDAILLSDILRVNTEITKAPLSASMIKRYDEHHQDLTLLKALVRQQLPEKYKEIFFDQSKNGYAGYIDGGASQEEFYKFIKPILEKMDGTEELLVKLNREDLLRKQRTFDNGSIPHQIHLGELHAILRRQEDFYPFLKDNREKIEKILTFRIPYYVGPLARGNSRFAWMTRKSEETITPWNFEEVVDKGASAQSFIERMTNFDKNLPNEKVLPKHSLLYEYFTVYNELTKVKYVTEGMRKPAFLSGEQKKAIVDLLFKTNRKVTVKQLKEDYFKKIECFDSVEISGVEDRFNASLGTYHDLLKIIKDKDFLDNEENEDILEDIVLTLTLFEDREMIEERLKTYAHLFDDKVMKQLKRRRYTGWGRLSRKLINGIRDKQSGKTILDFLKSDGFANRNFMQLIHDDSLTFKEDIQKAQVSGQGDSLHEHIANLAGSPAIKKGILQTVKVVDELVKVMGRHKPENIVIEMARENQTTQKGQKNSRERMKRIEEGIKELGSQILKEHPVENTQLQNEKLYLYYLQNGRDMYVDQELDINRLSDYDVDHIVPQSFLKDDSIDNKVLTRSDKARGKSDNVPSEEVVKKMKNYWRQLLNAKLITQRKFDNLTKAERGGLSELDKAGFIKRQLVETRQITKHVAQILDSRMNTKYDENDKLIREVKVITLKSKLVSDFRKDFQFYKVREINNYHHAHDAYLNAVVGTALIKKYPKLESEFVYGDYKVYDVRKMIAKSEQEIGKATAKYFFYSNIMNFFKTEITLANGEIRKRPLIETNGETGEIVWDKGRDFATVRKVLSMPQVNIVKKTEVQTGGFSKESILPKRNSDKLIARKKDWDPKKYGGFDSPTVAYSVLVVAKVEKGKSKKLKSVKELLGITIMERSSFEKNPIDFLEAKGYKEVKKDLIIKLPKYSLFELENGRKRMLASAGELQKGNELALPSKYVNFLYLASHYEKLKGSPEDNEQKQLFVEQHKHYLDEIIEQISEFSKRVILADANLDKVLSAYNKHRDKPIREQAENIIHLFTLTNLGAPAAFKYFDTTIDRKRYTSTKEVLDATLIHQSITGLYETRIDLSQLGGDGGPAPEAAAKGSSGGGLEHLPPPPEVSQFPLNPERLQALTDLVSRALEAKHIEPYQGPGNNPIFPVKKPNGKWRFIHDLRATNSVTRDLASPSPGPPDLTSPPQGLPHLRTIDLTDAFFQIPLPTIFQPYFAFTLPQPNNYGPGTRYSWRVLPQGFKNSPTLFQQQLSHILTPVRKTFPNSLIIQYMDDILLASPAPGELAALTDKVTNALTKEGLPLSPEKTQATPGPIHFLGQVISQDCITYETLPSINVKSTWSLAELQSMLGELQWVSKGTPVLRSSLHQLYLALRGHRDPRDTIKLTSIQVQALRTIQKALTLNCRSRLVNQLPILALIMLRPTGTTAVLFQTKQKWPLVWLHTPHPATSLRPWGQLLANAVIILDKYSLQHYGQVCKSFHHNISNQALTYYLHTSDQSSVAILLQHSHRFHNLGAQPSGPWRSLLQMPQIFQNIDVLRPPFTISPVVINHAPCLFSDGSASKAAFIIWDRQVIHQQVLSLPSTCSAQAGELFGLLAGLQKSQPWVALNIFLDSKFLIGHLRRMAWGAFPGPSTQCELHTQLLPLLQGKTVYVHHVRSHTLLQDPISRLNEATDALMLAPLLPLAGKRTADGSEFEKRTADGSEFESPKKKAKVE

SEQ ID NO: 1518 - protein, 2007 aa, synthetic construct
MPAAKRVKLDGGDKKYSIGLDIGTNSVGWAVITDEYKVPSKKFKVLGNTDRHSIKKNLIGALLFDSGETAEATRLKRTARRRYTRRKNRICYLQEIFSNEMAKVDDSFFHRLEESFLVEEDKKHERHPIFGNIVDEVAYHEKYPTIYHLRKKLVDSTDKADLRLIYLALAHMIKFRGHFLIEGDLNPDNSDVDKLFIQLVQTYNQLFEENPINASGVDAKAILSARLSKSRRLENLIAQLPGEKKNGLFGNLIALSLGLTPNFKSNFDLAEDAKLQLSKDTYDDDLDNLLAQIGDQYADLFLAAKNLSDAILLSDILRVNTEITKAPLSASMIKRYDEHHQDLTLLKALVRQQLPEKYKEIFFDQSKNGYAGYIDGGASQEEFYKFIKPILEKMDGTEELLVKLNREDLLRKQRTFDNGSIPHQIHLGELHAILRRQEDFYPFLKDNREKIEKILTFRIPYYVGPLARGNSRFAWMTRKSEETITPWNFEEVVDKGASAQSFIERMTNFDKNLPNEKVLPKHSLLYEYFTVYNELTKVKYVTEGMRKPAFLSGEQKKAIVDLLFKTNRKVTVKQLKEDYFKKIECFDSVEISGVEDRFNASLGTYHDLLKIIKDKDFLDNEENEDILEDIVLTLTLFEDREMIEERLKTYAHLFDDKVMKQLKRRRYTGWGRLSRKLINGIRDKQSGKTILDFLKSDGFANRNFMQLIHDDSLTFKEDIQKAQVSGQGDSLHEHIANLAGSPAIKKGILQTVKVVDELVKVMGRHKPENIVIEMARENQTTQKGQKNSRERMKRIEEGIKELGSQILKEHPVENTQLQNEKLYLYYLQNGRDMYVDQELDINRLSDYDVDHIVPQSFLKDDSIDNKVLTRSDKARGKSDNVPSEEVVKKMKNYWRQLLNAKLITQRKFDNLTKAERGGLSELDKAGFIKRQLVETRQITKHVAQILDSRMNTKYDENDKLIREVKVITLKSKLVSDFRKDFQFYKVREINNYHHAHDAYLNAVVGTALIKKYPKLESEFVYGDYKVYDVRKMIAKSEQEIGKATAKYFFYSNIMNFFKTEITLANGEIRKRPLIETNGETGEIVWDKGRDFATVRKVLSMPQVNIVKKTEVQTGGFSKESILPKRNSDKLIARKKDWDPKKYGGFDSPTVAYSVLVVAKVEKGKSKKLKSVKELLGITIMERSSFEKNPIDFLEAKGYKEVKKDLIIKLPKYSLFELENGRKRMLASAGELQKGNELALPSKYVNFLYLASHYEKLKGSPEDNEQKQLFVEQHKHYLDEIIEQISEFSKRVILADANLDKVLSAYNKHRDKPIREQAENIIHLFTLTNLGAPAAFKYFDTTIDRKRYTSTKEVLDATLIHQSITGLYETRIDLSQLGGDGGGGGGSSGGSGGGLEHLPPPPEVSQFPLNPERLQALTDLVSRALEAKHIEPYQGPGNNPIFPVKKPNGKWRFIHDLRATNSLTRDLASPSPGPPDLTSLPQDLPHLRTIDLTDAFFQIPLPAVFQPYFAFTLPQPNNHGPGTRYSWRVLPQGFKNSPTLFEQQLSHILAPVRKAFPNSLIIQYMDDILLASPALRELTALTDKVTNALTKEGLPMSLEKTQATPGSIHFLGQVISPDCITYETLPSIHVKSIWSLAELQSMLGELQWVSKGTPVLRSSLHQLYLALRGHRDPRDTIELTSTQVQALKTIQKALALNCRSRLVSQLPILALIILRPTGTTAVLFQTKQKWPLVWLHTPHPATSLRPWGQLLANAIITLDKYSLQHYGQICKSFHHNISNQALTYYLHTSDQSSVAILLQHSHRFHNLGAQPSGPWRSLLQVPQIFQNIDVLRPPFIISPVVIDHAPCLFSDGATSKAAFILWDKQVIHQQVLPLPSTCSAQAGELFGLLAGLQKSKPWPALNIFLDSKFLIGHLRRMALGAFLGPSTQCDLHARLFPLLQGKTVYVHHVRSHTLLQDPISRLNEATDALMLAPLLPLAGKRTADGSEFEKRTADGSEFESPKKKAKVE

SEQ ID NO: 1519 - protein, 2007 aa, synthetic construct
MPAAKRVKLDGGDKKYSIGLDIGTNSVGWAVITDEYKVPSKKFKVLGNTDRHSIKKNLIGALLFDSGETAEATRLKRTARRRYTRRKNRICYLQEIFSNEMAKVDDSFFHRLEESFLVEEDKKHERHPIFGNIVDEVAYHEKYPTIYHLRKKLVDSTDKADLRLIYLALAHMIKFRGHFLIEGDLNPDNSDVDKLFIQLVQTYNQLFEENPINASGVDAKAILSARLSKSRRLENLIAQLPGEKKNGLFGNLIALSLGLTPNFKSNFDLAEDAKLQLSKDTYDDDLDNLLAQIGDQYADLFLAAKNLSDAILLSDILRVNTEITKAPLSASMIKRYDEHHQDLTLLKALVRQQLPEKYKEIFFDQSKNGYAGYIDGGASQEEFYKFIKPILEKMDGTEELLVKLNREDLLRKQRTFDNGSIPHQIHLGELHAILRRQEDFYPFLKDNREKIEKILTFRIPYYVGPLARGNSRFAWMTRKSEETITPWNFEEVVDKGASAQSFIERMTNFDKNLPNEKVLPKHSLLYEYFTVYNELTKVKYVTEGMRKPAFLSGEQKKAIVDLLFKTNRKVTVKQLKEDYFKKIECFDSVEISGVEDRFNASLGTYHDLLKIIKDKDFLDNEENEDILEDIVLTLTLFEDREMIEERLKTYAHLFDDKVMKQLKRRRYTGWGRLSRKLINGIRDKQSGKTILDFLKSDGFANRNFMQLIHDDSLTFKEDIQKAQVSGQGDSLHEHIANLAGSPAIKKGILQTVKVVDELVKVMGRHKPENIVIEMARENQTTQKGQKNSRERMKRIEEGIKELGSQILKEHPVENTQLQNEKLYLYYLQNGRDMYVDQELDINRLSDYDVDHIVPQSFLKDDSIDNKVLTRSDKARGKSDNVPSEEVVKKMKNYWRQLLNAKLITQRKFDNLTKAERGGLSELDKAGFIKRQLVETRQITKHVAQILDSRMNTKYDENDKLIREVKVITLKSKLVSDFRKDFQFYKVREINNYHHAHDAYLNAVVGTALIKKYPKLESEFVYGDYKVYDVRKMIAKSEQEIGKATAKYFFYSNIMNFFKTEITLANGEIRKRPLIETNGETGEIVWDKGRDFATVRKVLSMPQVNIVKKTEVQTGGFSKESILPKRNSDKLIARKKDWDPKKYGGFDSPTVAYSVLVVAKVEKGKSKKLKSVKELLGITIMERSSFEKNPIDFLEAKGYKEVKKDLIIKLPKYSLFELENGRKRMLASAGELQKGNELALPSKYVNFLYLASHYEKLKGSPEDNEQKQLFVEQHKHYLDEIIEQISEFSKRVILADANLDKVLSAYNKHRDKPIREQAENIIHLFTLTNLGAPAAFKYFDTTIDRKRYTSTKEVLDATLIHQSITGLYETRIDLSQLGGDGGGGGGSSPAPGGGLEHLPPPPEVSQFPLNPERLQALTDLVSRALEAKHIEPYQGPGNNPIFPVKKPNGKWRFIHDLRATNSLTRDLASPSPGPPDLTSLPQDLPHLRTIDLTDAFFQIPLPAVFQPYFAFTLPQPNNHGPGTRYSWRVLPQGFKNSPTLFQQQLSHILAPVRKAFPNSLIIQYMDDILLASPALRELTALTDKVTNALTKEGLPMSLEKTQATPGSIHFLGQVISPDCITYETLPSIHVKSIWSLAELQSMLGELQWVSKGTPVLRSSLHQLYLALRGHRDPRDTIELTSTQVQALKTIQKALALNCRSRLVSQLPILALIILRPTGTTAVLFQTKQKWPLVWLHTPHPATSLRPWGQLLANAIITLDKYSLQHYGQICKSFHHNISNQALTYYLHTSDQSSVAILLQHSHRFHNLGAQPSGPWRSLLQVPQIFQNIDVLRPPFIISPVVIDHAPCLFSDGATSKAAFILWDKQVIHQQVLPLPSTCSAQAGELFGLLAGLQKSKPWPALNIFLDSKFLIGHLRRMAWGAFLGPSTQCDLHARLFPLLQGKTVYVHHVRSHTLLQDPISRLNEATDALMLAPLLPLAGKRTADGSEFEKRTADGSEFESPKKKAKVE

SEQ ID NO: 1520 - protein, 2009 aa, synthetic construct
MPAAKRVKLDGGDKKYSIGLDIGTNSVGWAVITDEYKVPSKKFKVLGNTDRHSIKKNLIGALLFDSGETAEATRLKRTARRRYTRRKNRICYLQEIFSNEMAKVDDSFFHRLEESFLVEEDKKHERHPIFGNIVDEVAYHEKYPTIYHLRKKLVDSTDKADLRLIYLALAHMIKFRGHFLIEGDLNPDNSDVDKLFIQLVQTYNQLFEENPINASGVDAKAILSARLSKSRRLENLIAQLPGEKKNGLFGNLIALSLGLTPNFKSNFDLAEDAKLQLSKDTYDDDLDNLLAQIGDQYADLFLAAKNLSDAILLSDILRVNTEITKAPLSASMIKRYDEHHQDLTLLKALVRQQLPEKYKEIFFDQSKNGYAGYIDGGASQEEFYKFIKPILEKMDGTEELLVKLNREDLLRKQRTFDNGSIPHQIHLGELHAILRRQEDFYPFLKDNREKIEKILTFRIPYYVGPLARGNSRFAWMTRKSEETITPWNFEEVVDKGASAQSFIERMTNFDKNLPNEKVLPKHSLLYEYFTVYNELTKVKYVTEGMRKPAFLSGEQKKAIVDLLFKTNRKVTVKQLKEDYFKKIECFDSVEISGVEDRFNASLGTYHDLLKIIKDKDFLDNEENEDILEDIVLTLTLFEDREMIEERLKTYAHLFDDKVMKQLKRRRYTGWGRLSRKLINGIRDKQSGKTILDFLKSDGFANRNFMQLIHDDSLTFKEDIQKAQVSGQGDSLHEHIANLAGSPAIKKGILQTVKVVDELVKVMGRHKPENIVIEMARENQTTQKGQKNSRERMKRIEEGIKELGSQILKEHPVENTQLQNEKLYLYYLQNGRDMYVDQELDINRLSDYDVDHIVPQSFLKDDSIDNKVLTRSDKARGKSDNVPSEEVVKKMKNYWRQLLNAKLITQRKFDNLTKAERGGLSELDKAGFIKRQLVETRQITKHVAQILDSRMNTKYDENDKLIREVKVITLKSKLVSDFRKDFQFYKVREINNYHHAHDAYLNAVVGTALIKKYPKLESEFVYGDYKVYDVRKMIAKSEQEIGKATAKYFFYSNIMNFFKTEITLANGEIRKRPLIETNGETGEIVWDKGRDFATVRKVLSMPQVNIVKKTEVQTGGFSKESILPKRNSDKLIARKKDWDPKKYGGFDSPTVAYSVLVVAKVEKGKSKKLKSVKELLGITIMERSSFEKNPIDFLEAKGYKEVKKDLIIKLPKYSLFELENGRKRMLASAGELQKGNELALPSKYVNFLYLASHYEKLKGSPEDNEQKQLFVEQHKHYLDEIIEQISEFSKRVILADANLDKVLSAYNKHRDKPIREQAENIIHLFTLTNLGAPAAFKYFDTTIDRKRYTSTKEVLDATLIHQSITGLYETRIDLSQLGGDGGPAPEAAAKGGGGGGLEHLPPPPEVSQFPLNPERLQALTDLVSRALEAKHIEPYQGPGNNPIFPVKKPNGKWRFIHDLRATNSLTRDLASPSPGPPDLTSLPQDLPHLRTIDLTDAFFQIPLPAVFQPYFAFTLPQPNNHGPGTRYSWRVLPQGFKNSPTLFQQQLSHILAPVRKAFPNSLIIQYMDDILLASPALRELTALTDKVTNALTKEGLPMSLEKTQATPGSIHFLGQVISPDCITYETLPSIHVKSIWSLAELQSMLGELQWVSKGTPVLRSSLHQLYLALRGHRDPRDTIELTSTQVQALKTIQKALALNCRSRLVSQLPILALIILRPTGTTAVLFQTKQKWPLVWLHTPHPATSLRPWGQLLANAIITLDKYSLQHYGQICKSFHHNISNQALTYYLHTSDQSSVAILLQHSHRFHNLGAQPSGPWRSLLQVPQIFQNIDVLRPPFIISPVVIDHAPCLFSDGATSKAAFILWDKQVIHQQVLPLPSTCSAQAGELFGLLAGLQKSKPWPALNIFLDSKFLIGHLRRMAWGAFLGPSTQCDLHARLFPLLQGKTVYVHHVRSHTLLQDPISRLNEATDALMLAPLLPLAGKRTADGSEFEKRTADGSEFESPKKKAKVE

SEQ ID NO: 1521 - protein, 2023 aa, synthetic construct
MPAAKRVKLDGGDKKYSIGLDIGTNSVGWAVITDEYKVPSKKFKVLGNTDRHSIKKNLIGALLFDSGETAEATRLKRTARRRYTRRKNRICYLQEIFSNEMAKVDDSFFHRLEESFLVEEDKKHERHPIFGNIVDEVAYHEKYPTIYHLRKKLVDSTDKADLRLIYLALAHMIKFRGHFLIEGDLNPDNSDVDKLFIQLVQTYNQLFEENPINASGVDAKAILSARLSKSRRLENLIAQLPGEKKNGLFGNLIALSLGLTPNFKSNFDLAEDAKLQLSKDTYDDDLDNLLAQIGDQYADLFLAAKNLSDAILLSDILRVNTEITKAPLSASMIKRYDEHHQDLTLLKALVRQQLPEKYKEIFFDQSKNGYAGYIDGGASQEEFYKFIKPILEKMDGTEELLVKLNREDLLRKQRTFDNGSIPHQIHLGELHAILRRQEDFYPFLKDNREKIEKILTFRIPYYVGPLARGNSRFAWMTRKSEETITPWNFEEVVDKGASAQSFIERMTNFDKNLPNEKVLPKHSLLYEYFTVYNELTKVKYVTEGMRKPAFLSGEQKKAIVDLLFKTNRKVTVKQLKEDYFKKIECFDSVEISGVEDRFNASLGTYHDLLKIIKDKDFLDNEENEDILEDIVLTLTLFEDREMIEERLKTYAHLFDDKVMKQLKRRRYTGWGRLSRKLINGIRDKQSGKTILDFLKSDGFANRNFMQLIHDDSLTFKEDIQKAQVSGQGDSLHEHIANLAGSPAIKKGILQTVKVVDELVKVMGRHKPENIVIEMARENQTTQKGQKNSRERMKRIEEGIKELGSQILKEHPVENTQLQNEKLYLYYLQNGRDMYVDQELDINRLSDYDVDHIVPQSFLKDDSIDNKVLTRSDKARGKSDNVPSEEVVKKMKNYWRQLLNAKLITQRKFDNLTKAERGGLSELDKAGFIKRQLVETRQITKHVAQILDSRMNTKYDENDKLIREVKVITLKSKLVSDFRKDFQFYKVREINNYHHAHDAYLNAVVGTALIKKYPKLESEFVYGDYKVYDVRKMIAKSEQEIGKATAKYFFYSNIMNFFKTEITLANGEIRKRPLIETNGETGEIVWDKGRDFATVRKVLSMPQVNIVKKTEVQTGGFSKESILPKRNSDKLIARKKDWDPKKYGGFDSPTVAYSVLVVAKVEKGKSKKLKSVKELLGITIMERSSFEKNPIDFLEAKGYKEVKKDLIIKLPKYSLFELENGRKRMLASAGELQKGNELALPSKYVNFLYLASHYEKLKGSPEDNEQKQLFVEQHKHYLDEIIEQISEFSKRVILADANLDKVLSAYNKHRDKPIREQAENIIHLFTLTNLGAPAAFKYFDTTIDRKRYTSTKEVLDATLIHQSITGLYETRIDLSQLGGDGGGGGGSGGGGSGGGGSGGGGSGGGGSGGGLEHLPPPPEVSQFPLNPERLQALTDLVSRALEAKHIEPYQGPGNNPIFPVKKPNGKWRFIHDLRATNSLTRDLASPSPGPPDLTSLPQDLPHLRTIDLTDAFFQIPLPAVFQPYFAFTLPQPNNHGPGTRYSWRVLPQGFKNSPTLFQQQLSHILAPVRKAFPNSLIIQYMDDILLASPALRELTALTDKVTNALTKEGLPMSLEKTQATPGSIHFLGQVISPDCITYETLPSIHVKSIWSLAELQSMLGELQWVSKGTPVLRSSLHQLYLALRGHRDPRDTIELTSTQVQALKTIQKALALNCRSRLVSQLPILALIILRPTGTTAVLFQTKQKWPLVWLHTPHPATSLRPWGQLLANAIITLDKYSLQHYGQICKSFHHNISNQALTYYLHTSDQSSVAILLQHSHRFHNLGAQPSGPWRSLLQVPQIFQNIDVLRPPFIISPVVIDHAPCLFSDGATSKAAFILWDKQVIHQQVLPLPSTCSAQAGELFGLLAGLQKSKPWPALNIFLDSKFLIGHLRRMAWGAFLGPSTQCDLHARLFPLLQGKTVYVHHVRSHTLLQDPISRLNEATDALMLAPLLPLAGKRTADGSEFEKRTADGSEFESPKKKAKVE

SEQ ID NO: 1522 - protein, 2006 aa, synthetic construct
MPAAKRVKLDGGDKKYSIGLDIGTNSVGWAVITDEYKVPSKKFKVLGNTDRHSIKKNLIGALLFDSGETAEATRLKRTARRRYTRRKNRICYLQEIFSNEMAKVDDSFFHRLEESFLVEEDKKHERHPIFGNIVDEVAYHEKYPTIYHLRKKLVDSTDKADLRLIYLALAHMIKFRGHFLIEGDLNPDNSDVDKLFIQLVQTYNQLFEENPINASGVDAKAILSARLSKSRRLENLIAQLPGEKKNGLFGNLIALSLGLTPNFKSNFDLAEDAKLQLSKDTYDDDLDNLLAQIGDQYADLFLAAKNLSDAILLSDILRVNTEITKAPLSASMIKRYDEHHQDLTLLKALVRQQLPEKYKEIFFDQSKNGYAGYIDGGASQEEFYKFIKPILEKMDGTEELLVKLNREDLLRKQRTFDNGSIPHQIHLGELHAILRRQEDFYPFLKDNREKIEKILTFRIPYYVGPLARGNSRFAWMTRKSEETITPWNFEEVVDKGASAQSFIERMTNFDKNLPNEKVLPKHSLLYEYFTVYNELTKVKYVTEGMRKPAFLSGEQKKAIVDLLFKTNRKVTVKQLKEDYFKKIECFDSVEISGVEDRFNASLGTYHDLLKIIKDKDFLDNEENEDILEDIVLTLTLFEDREMIEERLKTYAHLFDDKVMKQLKRRRYTGWGRLSRKLINGIRDKQSGKTILDFLKSDGFANRNFMQLIHDDSLTFKEDIQKAQVSGQGDSLHEHIANLAGSPAIKKGILQTVKVVDELVKVMGRHKPENIVIEMARENQTTQKGQKNSRERMKRIEEGIKELGSQILKEHPVENTQLQNEKLYLYYLQNGRDMYVDQELDINRLSDYDVDHIVPQSFLKDDSIDNKVLTRSDKARGKSDNVPSEEVVKKMKNYWRQLLNAKLITQRKFDNLTKAERGGLSELDKAGFIKRQLVETRQITKHVAQILDSRMNTKYDENDKLIREVKVITLKSKLVSDFRKDFQFYKVREINNYHHAHDAYLNAVVGTALIKKYPKLESEFVYGDYKVYDVRKMIAKSEQEIGKATAKYFFYSNIMNFFKTEITLANGEIRKRPLIETNGETGEIVWDKGRDFATVRKVLSMPQVNIVKKTEVQTGGFSKESILPKRNSDKLIARKKDWDPKKYGGFDSPTVAYSVLVVAKVEKGKSKKLKSVKELLGITIMERSSFEKNPIDFLEAKGYKEVKKDLIIKLPKYSLFELENGRKRMLASAGELQKGNELALPSKYVNFLYLASHYEKLKGSPEDNEQKQLFVEQHKHYLDEIIEQISEFSKRVILADANLDKVLSAYNKHRDKPIREQAENIIHLFTLTNLGAPAAFKYFDTTIDRKRYTSTKEVLDATLIHQSITGLYETRIDLSQLGGDGGEAAAKGGSGGGLEHLPPPPEVSQFPLNPERLQALTDLVSRALEAKHIEPYQGPGNNPIFPVKKPNGKWRFIHDLRATNSLTRDLASPSPGPPDLTSLPQDLPHLRTIDLTDAFFQIPLPAVFQPYFAFTLPQPNNHGPGTRYSWRVLPQGFKNSPTLFQQQLSHILAPVRKAFPNSLIIQYMDDILLASPALRELTALTDKVTNALTKEGLPMSLEKTQATPGSIHFLGQVISPDCITYETLPSIHVKSIWSLAELQSMLGELQWVSKGTPVLRSSLHQLYLALRGHRDPRDTIELTSTQVQALKTIQKALALNCRSRLVSQLPILALIILRPTGTTAVLFQTKQKWPLVWLHTPHPATSLRPWGQLLANAIITLDKYSLQHYGQICKSFHHNISNQALTYYLHTSDQSSVAILLQHSHRFHNLGAQPSGPWRSLLQVPQIFQNIDVLRPPFIISPVVIDHAPCLFSDGATSKAAFILWDKQVIHQQVLPLPSTCSAQAGELFGLLAGLQKSKPWPALNIFLDSKFLIGHLRRMAWGAFLGPSTQCDLHARLFPLLQGKTVYVHHVRSHTLLQDPISRLNEATDALMLAPLLPLAGKRTADGSEFEKRTADGSEFESPKKKAKVE

SEQ ID NO: 1523 - protein, 2007 aa, synthetic construct
MPAAKRVKLDGGDKKYSIGLDIGTNSVGWAVITDEYKVPSKKFKVLGNTDRHSIKKNLIGALLFDSGETAEATRLKRTARRRYTRRKNRICYLQEIFSNEMAKVDDSFFHRLEESFLVEEDKKHERHPIFGNIVDEVAYHEKYPTIYHLRKKLVDSTDKADLRLIYLALAHMIKFRGHFLIEGDLNPDNSDVDKLFIQLVQTYNQLFEENPINASGVDAKAILSARLSKSRRLENLIAQLPGEKKNGLFGNLIALSLGLTPNFKSNFDLAEDAKLQLSKDTYDDDLDNLLAQIGDQYADLFLAAKNLSDAILLSDILRVNTEITKAPLSASMIKRYDEHHQDLTLLKALVRQQLPEKYKEIFFDQSKNGYAGYIDGGASQEEFYKFIKPILEKMDGTEELLVKLNREDLLRKQRTFDNGSIPHQIHLGELHAILRRQEDFYPFLKDNREKIEKILTFRIPYYVGPLARGNSRFAWMTRKSEETITPWNFEEVVDKGASAQSFIERMTNFDKNLPNEKVLPKHSLLYEYFTVYNELTKVKYVTEGMRKPAFLSGEQKKAIVDLLFKTNRKVTVKQLKEDYFKKIECFDSVEISGVEDRFNASLGTYHDLLKIIKDKDFLDNEENEDILEDIVLTLTLFEDREMIEERLKTYAHLFDDKVMKQLKRRRYTGWGRLSRKLINGIRDKQSGKTILDFLKSDGFANRNFMQLIHDDSLTFKEDIQKAQVSGQGDSLHEHIANLAGSPAIKKGILQTVKVVDELVKVMGRHKPENIVIEMARENQTTQKGQKNSRERMKRIEEGIKELGSQILKEHPVENTQLQNEKLYLYYLQNGRDMYVDQELDINRLSDYDVDHIVPQSFLKDDSIDNKVLTRSDKARGKSDNVPSEEVVKKMKNYWRQLLNAKLITQRKFDNLTKAERGGLSELDKAGFIKRQLVETRQITKHVAQILDSRMNTKYDENDKLIREVKVITLKSKLVSDFRKDFQFYKVREINNYHHAHDAYLNAVVGTALIKKYPKLESEFVYGDYKVYDVRKMIAKSEQEIGKATAKYFFYSNIMNFFKTEITLANGEIRKRPLIETNGETGEIVWDKGRDFATVRKVLSMPQVNIVKKTEVQTGGFSKESILPKRNSDKLIARKKDWDPKKYGGFDSPTVAYSVLVVAKVEKGKSKKLKSVKELLGITIMERSSFEKNPIDFLEAKGYKEVKKDLIIKLPKYSLFELENGRKRMLASAGELQKGNELALPSKYVNFLYLASHYEKLKGSPEDNEQKQLFVEQHKHYLDEIIEQISEFSKRVILADANLDKVLSAYNKHRDKPIREQAENIIHLFTLTNLGAPAAFKYFDTTIDRKRYTSTKEVLDATLIHQSITGLYETRIDLSQLGGDGGGGGGSSGGSGGGLEHLPPPPEVSQFPLNPERLQALTDLVSRALEAKHIEPYQGPGNNPIFPVKKPNGKWRFIHDLRATNSLTRDLASPSPGPPDLTSLPQDLPHLRTIDLTDAFFQIPLPAVFQPYFAFTLPQPNNHGPGTRYSWRVLPQGFKNSPTLFQQQLSHILAPVRKAFPNSLIIQYMDDILLASPALRELTALTDKVTNALTKEGLPMSLEKTQATPGSIHFLGQVISPDCITYETLPSIHVKSIWSLAELQSMLGELQWVSKGTPVLRSSLHQLYLALRGHRDPRDTIELTSTQVQALKTIQKALALNCRSRLVSQLPILALIILRPTGTTAVLFQTKQKWPLVWLHTPHPATSLRPWGQLLANAIITLDKYSLQHYGQICKSFHHNISNQALTYYLHTSDQSSVAILLQHSHRFHNLGAQPSGPWRSLLQVPQIFQNIDVLRPPFIISPVVIDHAPCLFSDGATSKAAFILWDKQVIHQQVLPLPSTCSAQAGELFGLLAGLQKSKPWPALNIFLDSKFLIGHLRRMAWGAFLGPSTQCDLHARLFPLLQGKTVYVHHVRSHTLLQDPISRLNEATDALMLAPLLPLAGKRTADGSEFEKRTADGSEFESPKKKAKVE

SEQ ID NO: 1524 - protein, 2009 aa, synthetic construct
MPAAKRVKLDGGDKKYSIGLDIGTNSVGWAVITDEYKVPSKKFKVLGNTDRHSIKKNLIGALLFDSGETAEATRLKRTARRRYTRRKNRICYLQEIFSNEMAKVDDSFFHRLEESFLVEEDKKHERHPIFGNIVDEVAYHEKYPTIYHLRKKLVDSTDKADLRLIYLALAHMIKFRGHFLIEGDLNPDNSDVDKLFIQLVQTYNQLFEENPINASGVDAKAILSARLSKSRRLENLIAQLPGEKKNGLFGNLIALSLGLTPNFKSNFDLAEDAKLQLSKDTYDDDLDNLLAQIGDQYADLFLAAKNLSDAILLSDILRVNTEITKAPLSASMIKRYDEHHQDLTLLKALVRQQLPEKYKEIFFDQSKNGYAGYIDGGASQEEFYKFIKPILEKMDGTEELLVKLNREDLLRKQRTFDNGSIPHQIHLGELHAILRRQEDFYPFLKDNREKIEKILTFRIPYYVGPLARGNSRFAWMTRKSEETITPWNFEEVVDKGASAQSFIERMTNFDKNLPNEKVLPKHSLLYEYFTVYNELTKVKYVTEGMRKPAFLSGEQKKAIVDLLFKTNRKVTVKQLKEDYFKKIECFDSVEISGVEDRFNASLGTYHDLLKIIKDKDFLDNEENEDILEDIVLTLTLFEDREMIEERLKTYAHLFDDKVMKQLKRRRYTGWGRLSRKLINGIRDKQSGKTILDFLKSDGFANRNFMQLIHDDSLTFKEDIQKAQVSGQGDSLHEHIANLAGSPAIKKGILQTVKVVDELVKVMGRHKPENIVIEMARENQTTQKGQKNSRERMKRIEEGIKELGSQILKEHPVENTQLQNEKLYLYYLQNGRDMYVDQELDINRLSDYDVDHIVPQSFLKDDSIDNKVLTRSDKARGKSDNVPSEEVVKKMKNYWRQLLNAKLITQRKFDNLTKAERGGLSELDKAGFIKRQLVETRQITKHVAQILDSRMNTKYDENDKLIREVKVITLKSKLVSDFRKDFQFYKVREINNYHHAHDAYLNAVVGTALIKKYPKLESEFVYGDYKVYDVRKMIAKSEQEIGKATAKYFFYSNIMNFFKTEITLANGEIRKRPLIETNGETGEIVWDKGRDFATVRKVLSMPQVNIVKKTEVQTGGFSKESILPKRNSDKLIARKKDWDPKKYGGFDSPTVAYSVLVVAKVEKGKSKKLKSVKELLGITIMERSSFEKNPIDFLEAKGYKEVKKDLIIKLPKYSLFELENGRKRMLASAGELQKGNELALPSKYVNFLYLASHYEKLKGSPEDNEQKQLFVEQHKHYLDEIIEQISEFSKRVILADANLDKVLSAYNKHRDKPIREQAENIIHLFTLTNLGAPAAFKYFDTTIDRKRYTSTKEVLDATLIHQSITGLYETRIDLSQLGGDGGEAAAKGGSGGGGGGLEHLPPPPEVSQFPLNPERLQALTDLVSRALEAKHIEPYQGPGNNPIFPVKKPNGKWRFIHDLRATNSLTRDLASPSPGPPDLTSLPQDLPHLRTIDLTDAFFQIPLPAVFQPYFAFTLPQPNNHGPGTRYSWRVLPQGFKNSPTLFQQQLSHILAPVRKAFPNSLIIQYMDDILLASPALRELTALTDKVTNALTKEGLPMSLEKTQATPGSIHFLGQVISPDCITYETLPSIHVKSIWSLAELQSMLGELQWVSKGTPVLRSSLHQLYLALRGHRDPRDTIELTSTQVQALKTIQKALALNCRSRLVSQLPILALIILRPTGTTAVLFQTKQKWPLVWLHTPHPATSLRPWGQLLANAIITLDKYSLQHYGQICKSFHHNISNQALTYYLHTSDQSSVAILLQHSHRFHNLGAQPSGPWRSLLQVPQIFQNIDVLRPPFIISPVVIDHAPCLFSDGATSKAAFILWDKQVIHQQVLPLPSTCSAQAGELFGLLAGLQKSKPWPALNIFLDSKFLIGHLRRMAWGAFLGPSTQCDLHARLFPLLQGKTVYVHHVRSHTLLQDPISRLNEATDALMLAPLLPLAGKRTADGSEFEKRTADGSEFESPKKKAKVE

SEQ ID NO: 1525 - protein, 2007 aa, synthetic construct
MPAAKRVKLDGGDKKYSIGLDIGTNSVGWAVITDEYKVPSKKFKVLGNTDRHSIKKNLIGALLFDSGETAEATRLKRTARRRYTRRKNRICYLQEIFSNEMAKVDDSFFHRLEESFLVEEDKKHERHPIFGNIVDEVAYHEKYPTIYHLRKKLVDSTDKADLRLIYLALAHMIKFRGHFLIEGDLNPDNSDVDKLFIQLVQTYNQLFEENPINASGVDAKAILSARLSKSRRLENLIAQLPGEKKNGLFGNLIALSLGLTPNFKSNFDLAEDAKLQLSKDTYDDDLDNLLAQIGDQYADLFLAAKNLSDAILLSDILRVNTEITKAPLSASMIKRYDEHHQDLTLLKALVRQQLPEKYKEIFFDQSKNGYAGYIDGGASQEEFYKFIKPILEKMDGTEELLVKLNREDLLRKQRTFDNGSIPHQIHLGELHAILRRQEDFYPFLKDNREKIEKILTFRIPYYVGPLARGNSRFAWMTRKSEETITPWNFEEVVDKGASAQSFIERMTNFDKNLPNEKVLPKHSLLYEYFTVYNELTKVKYVTEGMRKPAFLSGEQKKAIVDLLFKTNRKVTVKQLKEDYFKKIECFDSVEISGVEDRFNASLGTYHDLLKIIKDKDFLDNEENEDILEDIVLTLTLFEDREMIEERLKTYAHLFDDKVMKQLKRRRYTGWGRLSRKLINGIRDKQSGKTILDFLKSDGFANRNFMQLIHDDSLTFKEDIQKAQVSGQGDSLHEHIANLAGSPAIKKGILQTVKVVDELVKVMGRHKPENIVIEMARENQTTQKGQKNSRERMKRIEEGIKELGSQILKEHPVENTQLQNEKLYLYYLQNGRDMYVDQELDINRLSDYDVDHIVPQSFLKDDSIDNKVLTRSDKARGKSDNVPSEEVVKKMKNYWRQLLNAKLITQRKFDNLTKAERGGLSELDKAGFIKRQLVETRQITKHVAQILDSRMNTKYDENDKLIREVKVITLKSKLVSDFRKDFQFYKVREINNYHHAHDAYLNAVVGTALIKKYPKLESEFVYGDYKVYDVRKMIAKSEQEIGKATAKYFFYSNIMNFFKTEITLANGEIRKRPLIETNGETGEIVWDKGRDFATVRKVLSMPQVNIVKKTEVQTGGFSKESILPKRNSDKLIARKKDWDPKKYGGFDSPTVAYSVLVVAKVEKGKSKKLKSVKELLGITIMERSSFEKNPIDFLEAKGYKEVKKDLIIKLPKYSLFELENGRKRMLASAGELQKGNELALPSKYVNFLYLASHYEKLKGSPEDNEQKQLFVEQHKHYLDEIIEQISEFSKRVILADANLDKVLSAYNKHRDKPIREQAENIIHLFTLTNLGAPAAFKYFDTTIDRKRYTSTKEVLDATLIHQSITGLYETRIDLSQLGGDGGGSSPAPGGGGGGLEHLPPPPEVSQFPLNPERLQALTDLVSRALEAKHIEPYQGPGNNPIFPVKKPNGKWRFIHDLRATNSLTRDLASPSPGPPDLTSLPQDLPHLRTIDLTDAFFQIPLPAVFQPYFAFTLPQPNNHGPGTRYSWRVLPQGFKNSPTLFQQQLSHILAPVRKAFPNSLIIQYMDDILLASPALRELTALTDKVTNALTKEGLPMSLEKTQATPGSIHFLGQVISPDCITYETLPSIHVKSIWSLAELQSMLGELQWVSKGTPVLRSSLHQLYLALRGHRDPRDTIELTSTQVQALKTIQKALALNCRSRLVSQLPILALIILRPTGTTAVLFQTKQKWPLVWLHTPHPATSLRPWGQLLANAIITLDKYSLQHYGQICKSFHHNISNQALTYYLHTSDQSSVAILLQHSHRFHNLGAQPSGPWRSLLQVPQIFQNIDVLRPPFIISPVVIDHAPCLFSDGATSKAAFILWDKQVIHQQVLPLPSTCSAQAGELFGLLAGLQKSKPWPALNIFLDSKFLIGHLRRMAWGAFLGPSTQCDLHARLFPLLQGKTVYVHHVRSHTLLQDPISRLNEATDALMLAPLLPLAGKRTADGSEFEKRTADGSEFESPKKKAKVE

SEQ ID NO: 1526 - protein, 2009 aa, synthetic construct
MPAAKRVKLDGGDKKYSIGLDIGTNSVGWAVITDEYKVPSKKFKVLGNTDRHSIKKNLIGALLFDSGETAEATRLKRTARRRYTRRKNRICYLQEIFSNEMAKVDDSFFHRLEESFLVEEDKKHERHPIFGNIVDEVAYHEKYPTIYHLRKKLVDSTDKADLRLIYLALAHMIKFRGHFLIEGDLNPDNSDVDKLFIQLVQTYNQLFEENPINASGVDAKAILSARLSKSRRLENLIAQLPGEKKNGLFGNLIALSLGLTPNFKSNFDLAEDAKLQLSKDTYDDDLDNLLAQIGDQYADLFLAAKNLSDAILLSDILRVNTEITKAPLSASMIKRYDEHHQDLTLLKALVRQQLPEKYKEIFFDQSKNGYAGYIDGGASQEEFYKFIKPILEKMDGTEELLVKLNREDLLRKQRTFDNGSIPHQIHLGELHAILRRQEDFYPFLKDNREKIEKILTFRIPYYVGPLARGNSRFAWMTRKSEETITPWNFEEVVDKGASAQSFIERMTNFDKNLPNEKVLPKHSLLYEYFTVYNELTKVKYVTEGMRKPAFLSGEQKKAIVDLLFKTNRKVTVKQLKEDYFKKIECFDSVEISGVEDRFNASLGTYHDLLKIIKDKDFLDNEENEDILEDIVLTLTLFEDREMIEERLKTYAHLFDDKVMKQLKRRRYTGWGRLSRKLINGIRDKQSGKTILDFLKSDGFANRNFMQLIHDDSLTFKEDIQKAQVSGQGDSLHEHIANLAGSPAIKKGILQTVKVVDELVKVMGRHKPENIVIEMARENQTTQKGQKNSRERMKRIEEGIKELGSQILKEHPVENTQLQNEKLYLYYLQNGRDMYVDQELDINRLSDYDVDHIVPQSFLKDDSIDNKVLTRSDKARGKSDNVPSEEVVKKMKNYWRQLLNAKLITQRKFDNLTKAERGGLSELDKAGFIKRQLVETRQITKHVAQILDSRMNTKYDENDKLIREVKVITLKSKLVSDFRKDFQFYKVREINNYHHAHDAYLNAVVGTALIKKYPKLESEFVYGDYKVYDVRKMIAKSEQEIGKATAKYFFYSNIMNFFKTEITLANGEIRKRPLIETNGETGEIVWDKGRDFATVRKVLSMPQVNIVKKTEVQTGGFSKESILPKRNSDKLIARKKDWDPKKYGGFDSPTVAYSVLVVAKVEKGKSKKLKSVKELLGITIMERSSFEKNPIDFLEAKGYKEVKKDLIIKLPKYSLFELENGRKRMLASAGELQKGNELALPSKYVNFLYLASHYEKLKGSPEDNEQKQLFVEQHKHYLDEIIEQISEFSKRVILADANLDKVLSAYNKHRDKPIREQAENIIHLFTLTNLGAPAAFKYFDTTIDRKRYTSTKEVLDATLIHQSITGLYETRIDLSQLGGDGGEAAAKGGGGSSGGGLEHLPPPPEVSQFPLNPERLQALTDLVSRALEAKHIEPYQGPGNNPIFPVKKPNGKWRFIHDLRATNSLTRDLASPSPGPPDLTSLPQDLPHLRTIDLTDAFFQIPLPAVFQPYFAFTLPQPNNHGPGTRYSWRVLPQGFKNSPTLFQQQLSHILAPVRKAFPNSLIIQYMDDILLASPALRELTALTDKVTNALTKEGLPMSLEKTQATPGSIHFLGQVISPDCITYETLPSIHVKSIWSLAELQSMLGELQWVSKGTPVLRSSLHQLYLALRGHRDPRDTIELTSTQVQALKTIQKALALNCRSRLVSQLPILALIILRPTGTTAVLFQTKQKWPLVWLHTPHPATSLRPWGQLLANAIITLDKYSLQHYGQICKSFHHNISNQALTYYLHTSDQSSVAILLQHSHRFHNLGAQPSGPWRSLLQVPQIFQNIDVLRPPFIISPVVIDHAPCLFSDGATSKAAFILWDKQVIHQQVLPLPSTCSAQAGELFGLLAGLQKSKPWPALNIFLDSKFLIGHLRRMAWGAFLGPSTQCDLHARLFPLLQGKTVYVHHVRSHTLLQDPISRLNEATDALMLAPLLPLAGKRTADGSEFEKRTADGSEFESPKKKAKVE

SEQ ID NO: 1527 - protein, 2007 aa, synthetic construct
MPAAKRVKLDGGDKKYSIGLDIGTNSVGWAVITDEYKVPSKKFKVLGNTDRHSIKKNLIGALLFDSGETAEATRLKRTARRRYTRRKNRICYLQEIFSNEMAKVDDSFFHRLEESFLVEEDKKHERHPIFGNIVDEVAYHEKYPTIYHLRKKLVDSTDKADLRLIYLALAHMIKFRGHFLIEGDLNPDNSDVDKLFIQLVQTYNQLFEENPINASGVDAKAILSARLSKSRRLENLIAQLPGEKKNGLFGNLIALSLGLTPNFKSNFDLAEDAKLQLSKDTYDDDLDNLLAQIGDQYADLFLAAKNLSDAILLSDILRVNTEITKAPLSASMIKRYDEHHQDLTLLKALVRQQLPEKYKEIFFDQSKNGYAGYIDGGASQEEFYKFIKPILEKMDGTEELLVKLNREDLLRKQRTFDNGSIPHQIHLGELHAILRRQEDFYPFLKDNREKIEKILTFRIPYYVGPLARGNSRFAWMTRKSEETITPWNFEEVVDKGASAQSFIERMTNFDKNLPNEKVLPKHSLLYEYFTVYNELTKVKYVTEGMRKPAFLSGEQKKAIVDLLFKTNRKVTVKQLKEDYFKKIECFDSVEISGVEDRFNASLGTYHDLLKIIKDKDFLDNEENEDILEDIVLTLTLFEDREMIEERLKTYAHLFDDKVMKQLKRRRYTGWGRLSRKLINGIRDKQSGKTILDFLKSDGFANRNFMQLIHDDSLTFKEDIQKAQVSGQGDSLHEHIANLAGSPAIKKGILQTVKVVDELVKVMGRHKPENIVIEMARENQTTQKGQKNSRERMKRIEEGIKELGSQILKEHPVENTQLQNEKLYLYYLQNGRDMYVDQELDINRLSDYDVDHIVPQSFLKDDSIDNKVLTRSDKARGKSDNVPSEEVVKKMKNYWRQLLNAKLITQRKFDNLTKAERGGLSELDKAGFIKRQLVETRQITKHVAQILDSRMNTKYDENDKLIREVKVITLKSKLVSDFRKDFQFYKVREINNYHHAHDAYLNAVVGTALIKKYPKLESEFVYGDYKVYDVRKMIAKSEQEIGKATAKYFFYSNIMNFFKTEITLANGEIRKRPLIETNGETGEIVWDKGRDFATVRKVLSMPQVNIVKKTEVQTGGFSKESILPKRNSDKLIARKKDWDPKKYGGFDSPTVAYSVLVVAKVEKGKSKKLKSVKELLGITIMERSSFEKNPIDFLEAKGYKEVKKDLIIKLPKYSLFELENGRKRMLASAGELQKGNELALPSKYVNFLYLASHYEKLKGSPEDNEQKQLFVEQHKHYLDEIIEQISEFSKRVILADANLDKVLSAYNKHRDKPIREQAENIIHLFTLTNLGAPAAFKYFDTTIDRKRYTSTKEVLDATLIHQSITGLYETRIDLSQLGGDGGPAPGGGGSSGGGLEHLPPPPEVSQFPLNPERLQALTDLVSRALEAKHIEPYQGPGNNPIFPVKKPNGKWRFIHDLRATNSLTRDLASPSPGPPDLTSPPQDLPHLRTIDLTDAFFQIPLPAVFQPYFAFTLPQPNNHGPGTRYSWRVLPQGFKNSPTLFQQQLSHILAPVRKAFPNSLIIQYMDDILLASPALRELTALTDKVTNALTKEGLPMSLEKTQATPGSIHFLGQVISPDCITYETLPSIHVKSIWSLAELQSMLGELQWVSKGTPVLRSSLHQLYLALRGHRDPRDTIELTSTQVQALKTIQKALALNCRSRLVSQLPILALIILRPTGTTAVLFQTKQKWPLVWLHTPHPATSLRPWGQLLANAIITLDKYSLQHYGQICKSFHHNISNQALTYYLHTSDQSSVAILLQHSHRFHNLGAQPSGPWRSLLQVPQIFQNIDVLRPPFIISPVVIDHAPCLFSDGATSKAAFILWDKQVIHQQVLPLPSTCSAQAGELFGLLAGLQKSKPWPALNIFLDSKFLIGHLRRMAWGAFLGPSTQCDLHARLFPLLQGKTVYVHHVRSHTLLQDPISRLNEATDALMLAPLLPLAGKRTADGSEFEKRTADGSEFESPKKKAKVE

SEQ ID NO: 1528 - protein, 2028 aa, synthetic construct
MPAAKRVKLDGGDKKYSIGLDIGTNSVGWAVITDEYKVPSKKFKVLGNTDRHSIKKNLIGALLFDSGETAEATRLKRTARRRYTRRKNRICYLQEIFSNEMAKVDDSFFHRLEESFLVEEDKKHERHPIFGNIVDEVAYHEKYPTIYHLRKKLVDSTDKADLRLIYLALAHMIKFRGHFLIEGDLNPDNSDVDKLFIQLVQTYNQLFEENPINASGVDAKAILSARLSKSRRLENLIAQLPGEKKNGLFGNLIALSLGLTPNFKSNFDLAEDAKLQLSKDTYDDDLDNLLAQIGDQYADLFLAAKNLSDAILLSDILRVNTEITKAPLSASMIKRYDEHHQDLTLLKALVRQQLPEKYKEIFFDQSKNGYAGYIDGGASQEEFYKFIKPILEKMDGTEELLVKLNREDLLRKQRTFDNGSIPHQIHLGELHAILRRQEDFYPFLKDNREKIEKILTFRIPYYVGPLARGNSRFAWMTRKSEETITPWNFEEVVDKGASAQSFIERMTNFDKNLPNEKVLPKHSLLYEYFTVYNELTKVKYVTEGMRKPAFLSGEQKKAIVDLLFKTNRKVTVKQLKEDYFKKIECFDSVEISGVEDRFNASLGTYHDLLKIIKDKDFLDNEENEDILEDIVLTLTLFEDREMIEERLKTYAHLFDDKVMKQLKRRRYTGWGRLSRKLINGIRDKQSGKTILDFLKSDGFANRNFMQLIHDDSLTFKEDIQKAQVSGQGDSLHEHIANLAGSPAIKKGILQTVKVVDELVKVMGRHKPENIVIEMARENQTTQKGQKNSRERMKRIEEGIKELGSQILKEHPVENTQLQNEKLYLYYLQNGRDMYVDQELDINRLSDYDVDHIVPQSFLKDDSIDNKVLTRSDKARGKSDNVPSEEVVKKMKNYWRQLLNAKLITQRKFDNLTKAERGGLSELDKAGFIKRQLVETRQITKHVAQILDSRMNTKYDENDKLIREVKVITLKSKLVSDFRKDFQFYKVREINNYHHAHDAYLNAVVGTALIKKYPKLESEFVYGDYKVYDVRKMIAKSEQEIGKATAKYFFYSNIMNFFKTEITLANGEIRKRPLIETNGETGEIVWDKGRDFATVRKVLSMPQVNIVKKTEVQTGGFSKESILPKRNSDKLIARKKDWDPKKYGGFDSPTVAYSVLVVAKVEKGKSKKLKSVKELLGITIMERSSFEKNPIDFLEAKGYKEVKKDLIIKLPKYSLFELENGRKRMLASAGELQKGNELALPSKYVNFLYLASHYEKLKGSPEDNEQKQLFVEQHKHYLDEIIEQISEFSKRVILADANLDKVLSAYNKHRDKPIREQAENIIHLFTLTNLGAPAAFKYFDTTIDRKRYTSTKEVLDATLIHQSITGLYETRIDLSQLGGDGGGGGGSGGGGSGGGGSGGGGSGGGGSGGGGSGGGLEHLPPPPEVSQFPLNPERLQALTDLVSRALEAKHIEPYQGPGNNPIFPVKKPNGKWRFIHDLRATNSLTRDLASPSPGPPDLTSPPQDLPHLRTIDLTDAFFQIPLPAVFQPYFAFTLPQPNNHGPGTRYSWRVLPQGFKNSPTLFQQQLSHILAPVRKAFPNSLIIQYMDDILLASPALRELTALTDKVTNALTKEGLPMSLEKTQATPGSIHFLGQVISPDCITYETLPSIHVKSIWSLAELQSMLGELQWVSKGTPVLRSSLHQLYLALRGHRDPRDTIELTSTQVQALKTIQKALALNCRSRLVSQLPILALIILRPTGTTAVLFQTKQKWPLVWLHTPHPATSLRPWGQLLANAIITLDKYSLQHYGQICKSFHHNISNQALTYYLHTSDQSSVAILLQHSHRFHNLGAQPSGPWRSLLQVPQIFQNIDVLRPPFIISPVVIDHAPCLFSDGATSKAAFILWDKQVIHQQVLPLPSTCSAQAGELFGLLAGLQKSKPWPALNIFLDSKFLIGHLRRMAWGAFLGPSTQCDLHARLFPLLQGKTVYVHHVRSHTLLQDPISRLNEATDALMLAPLLPLAGKRTADGSEFEKRTADGSEFESPKKKAKVE

SEQ ID NO: 1529 - protein, 2007 aa, synthetic construct
MPAAKRVKLDGGDKKYSIGLDIGTNSVGWAVITDEYKVPSKKFKVLGNTDRHSIKKNLIGALLFDSGETAEATRLKRTARRRYTRRKNRICYLQEIFSNEMAKVDDSFFHRLEESFLVEEDKKHERHPIFGNIVDEVAYHEKYPTIYHLRKKLVDSTDKADLRLIYLALAHMIKFRGHFLIEGDLNPDNSDVDKLFIQLVQTYNQLFEENPINASGVDAKAILSARLSKSRRLENLIAQLPGEKKNGLFGNLIALSLGLTPNFKSNFDLAEDAKLQLSKDTYDDDLDNLLAQIGDQYADLFLAAKNLSDAILLSDILRVNTEITKAPLSASMIKRYDEHHQDLTLLKALVRQQLPEKYKEIFFDQSKNGYAGYIDGGASQEEFYKFIKPILEKMDGTEELLVKLNREDLLRKQRTFDNGSIPHQIHLGELHAILRRQEDFYPFLKDNREKIEKILTFRIPYYVGPLARGNSRFAWMTRKSEETITPWNFEEVVDKGASAQSFIERMTNFDKNLPNEKVLPKHSLLYEYFTVYNELTKVKYVTEGMRKPAFLSGEQKKAIVDLLFKTNRKVTVKQLKEDYFKKIECFDSVEISGVEDRFNASLGTYHDLLKIIKDKDFLDNEENEDILEDIVLTLTLFEDREMIEERLKTYAHLFDDKVMKQLKRRRYTGWGRLSRKLINGIRDKQSGKTILDFLKSDGFANRNFMQLIHDDSLTFKEDIQKAQVSGQGDSLHEHIANLAGSPAIKKGILQTVKVVDELVKVMGRHKPENIVIEMARENQTTQKGQKNSRERMKRIEEGIKELGSQILKEHPVENTQLQNEKLYLYYLQNGRDMYVDQELDINRLSDYDVDHIVPQSFLKDDSIDNKVLTRSDKARGKSDNVPSEEVVKKMKNYWRQLLNAKLITQRKFDNLTKAERGGLSELDKAGFIKRQLVETRQITKHVAQILDSRMNTKYDENDKLIREVKVITLKSKLVSDFRKDFQFYKVREINNYHHAHDAYLNAVVGTALIKKYPKLESEFVYGDYKVYDVRKMIAKSEQEIGKATAKYFFYSNIMNFFKTEITLANGEIRKRPLIETNGETGEIVWDKGRDFATVRKVLSMPQVNIVKKTEVQTGGFSKESILPKRNSDKLIARKKDWDPKKYGGFDSPTVAYSVLVVAKVEKGKSKKLKSVKELLGITIMERSSFEKNPIDFLEAKGYKEVKKDLIIKLPKYSLFELENGRKRMLASAGELQKGNELALPSKYVNFLYLASHYEKLKGSPEDNEQKQLFVEQHKHYLDEIIEQISEFSKRVILADANLDKVLSAYNKHRDKPIREQAENIIHLFTLTNLGAPAAFKYFDTTIDRKRYTSTKEVLDATLIHQSITGLYETRIDLSQLGGDGGGGGGGSPAPGGGLEHLPPPPEVSQFPLNPERLQALTDLVSRALEAKHIEPYQGPGNNPIFPVKKPNGKWRFIHDLRATNSLTRDLASPSPGPPDLTSPPQDLPHLRTIDLTDAFFQIPLPAVFQPYFAFTLPQPNNHGPGTRYSWRVLPQGFKNSPTLFQQQLSHILAPVRKAFPNSLIIQYMDDILLASPALRELTALTDKVTNALTKEGLPMSLEKTQATPGSIHFLGQVISPDCITYETLPSIHVKSIWSLAELQSMLGELQWVSKGTPVLRSSLHQLYLALRGHRDPRDTIELTSTQVQALKTIQKALALNCRSRLVSQLPILALIILRPTGTTAVLFQTKQKWPLVWLHTPHPATSLRPWGQLLANAIITLDKYSLQHYGQICKSFHHNISNQALTYYLHTSDQSSVAILLQHSHRFHNLGAQPSGPWRSLLQVPQIFQNIDVLRPPFIISPVVIDHAPCLFSDGATSKAAFILWDKQVIHQQVLPLPSTCSAQAGELFGLLAGLQKSKPWPALNIFLDSKFLIGHLRRMAWGAFLGPSTQCDLHARLFPLLQGKTVYVHHVRSHTLLQDPISRLNEATDALMLAPLLPLAGKRTADGSEFEKRTADGSEFESPKKKAKVE

SEQ ID NO: 1530 - protein, 2004 aa, synthetic construct
MPAAKRVKLDGGDKKYSIGLDIGTNSVGWAVITDEYKVPSKKFKVLGNTDRHSIKKNLIGALLFDSGETAEATRLKRTARRRYTRRKNRICYLQEIFSNEMAKVDDSFFHRLEESFLVEEDKKHERHPIFGNIVDEVAYHEKYPTIYHLRKKLVDSTDKADLRLIYLALAHMIKFRGHFLIEGDLNPDNSDVDKLFIQLVQTYNQLFEENPINASGVDAKAILSARLSKSRRLENLIAQLPGEKKNGLFGNLIALSLGLTPNFKSNFDLAEDAKLQLSKDTYDDDLDNLLAQIGDQYADLFLAAKNLSDAILLSDILRVNTEITKAPLSASMIKRYDEHHQDLTLLKALVRQQLPEKYKEIFFDQSKNGYAGYIDGGASQEEFYKFIKPILEKMDGTEELLVKLNREDLLRKQRTFDNGSIPHQIHLGELHAILRRQEDFYPFLKDNREKIEKILTFRIPYYVGPLARGNSRFAWMTRKSEETITPWNFEEVVDKGASAQSFIERMTNFDKNLPNEKVLPKHSLLYEYFTVYNELTKVKYVTEGMRKPAFLSGEQKKAIVDLLFKTNRKVTVKQLKEDYFKKIECFDSVEISGVEDRFNASLGTYHDLLKIIKDKDFLDNEENEDILEDIVLTLTLFEDREMIEERLKTYAHLFDDKVMKQLKRRRYTGWGRLSRKLINGIRDKQSGKTILDFLKSDGFANRNFMQLIHDDSLTFKEDIQKAQVSGQGDSLHEHIANLAGSPAIKKGILQTVKVVDELVKVMGRHKPENIVIEMARENQTTQKGQKNSRERMKRIEEGIKELGSQILKEHPVENTQLQNEKLYLYYLQNGRDMYVDQELDINRLSDYDVDHIVPQSFLKDDSIDNKVLTRSDKARGKSDNVPSEEVVKKMKNYWRQLLNAKLITQRKFDNLTKAERGGLSELDKAGFIKRQLVETRQITKHVAQILDSRMNTKYDENDKLIREVKVITLKSKLVSDFRKDFQFYKVREINNYHHAHDAYLNAVVGTALIKKYPKLESEFVYGDYKVYDVRKMIAKSEQEIGKATAKYFFYSNIMNFFKTEITLANGEIRKRPLIETNGETGEIVWDKGRDFATVRKVLSMPQVNIVKKTEVQTGGFSKESILPKRNSDKLIARKKDWDPKKYGGFDSPTVAYSVLVVAKVEKGKSKKLKSVKELLGITIMERSSFEKNPIDFLEAKGYKEVKKDLIIKLPKYSLFELENGRKRMLASAGELQKGNELALPSKYVNFLYLASHYEKLKGSPEDNEQKQLFVEQHKHYLDEIIEQISEFSKRVILADANLDKVLSAYNKHRDKPIREQAENIIHLFTLTNLGAPAAFKYFDTTIDRKRYTSTKEVLDATLIHQSITGLYETRIDLSQLGGDGGGGGPAPGGHLPPPPQVDQFPLNLPERLQALNDLVSKALEAGHIEPYSGPGNNPVFPVKKPNGKWRFIHDLRATNAITTTLTSPSPGPPDLTSLPTALPHLQTIDLTDAFFQIPLPKQYQPYFAFTIPQPCNYGPGTRYAWTVLPQGFKNSPTLFQQQLAAVLNPMRKMFPTSTIVQYMDDILLASPTNEELQQLSQLTLQALTTHGLPISQEKTQQTPGQIRFLGQVISPNHITYESTPTIPIKSQWTLTELQVILGEIQWVSKGTPILRKHLQSLYSALHPYRDPRACITLTPQQLHALHAIQQALQHNCRGRLNPALPLLGLISLSTSGTTSVIFQPKQNWPLAWLHTPHPPTSLCPWGHLLACTILTLDKYTLQHYGQLCQSFHHNMSKQALCDFLRNSPHPSVGILIHHMGRFHNLGSQPSGPWKTLLHLPTLLQEPRLLRPIFTLSPVVLDTAPCLFSDGSPQKAAYVLWDQTILQQDITPLPSHETHSAQKGELLALICGLRAAKPWPSLNIFLDSKYLIKYLHSLAIGAFLGTSAHQTLQAALPPLLQGKTIYLHHVRSHTNLPDPISTFNEYTDSLILAPLVPLAGKRTADGSEFEKRTADGSEFESPKKKAKVE

SEQ ID NO: 1531 - protein, 2009 aa, synthetic construct
MPAAKRVKLDGGDKKYSIGLDIGTNSVGWAVITDEYKVPSKKFKVLGNTDRHSIKKNLIGALLFDSGETAEATRLKRTARRRYTRRKNRICYLQEIFSNEMAKVDDSFFHRLEESFLVEEDKKHERHPIFGNIVDEVAYHEKYPTIYHLRKKLVDSTDKADLRLIYLALAHMIKFRGHFLIEGDLNPDNSDVDKLFIQLVQTYNQLFEENPINASGVDAKAILSARLSKSRRLENLIAQLPGEKKNGLFGNLIALSLGLTPNFKSNFDLAEDAKLQLSKDTYDDDLDNLLAQIGDQYADLFLAAKNLSDAILLSDILRVNTEITKAPLSASMIKRYDEHHQDLTLLKALVRQQLPEKYKEIFFDQSKNGYAGYIDGGASQEEFYKFIKPILEKMDGTEELLVKLNREDLLRKQRTFDNGSIPHQIHLGELHAILRRQEDFYPFLKDNREKIEKILTFRIPYYVGPLARGNSRFAWMTRKSEETITPWNFEEVVDKGASAQSFIERMTNFDKNLPNEKVLPKHSLLYEYFTVYNELTKVKYVTEGMRKPAFLSGEQKKAIVDLLFKTNRKVTVKQLKEDYFKKIECFDSVEISGVEDRFNASLGTYHDLLKIIKDKDFLDNEENEDILEDIVLTLTLFEDREMIEERLKTYAHLFDDKVMKQLKRRRYTGWGRLSRKLINGIRDKQSGKTILDFLKSDGFANRNFMQLIHDDSLTFKEDIQKAQVSGQGDSLHEHIANLAGSPAIKKGILQTVKVVDELVKVMGRHKPENIVIEMARENQTTQKGQKNSRERMKRIEEGIKELGSQILKEHPVENTQLQNEKLYLYYLQNGRDMYVDQELDINRLSDYDVDHIVPQSFLKDDSIDNKVLTRSDKARGKSDNVPSEEVVKKMKNYWRQLLNAKLITQRKFDNLTKAERGGLSELDKAGFIKRQLVETRQITKHVAQILDSRMNTKYDENDKLIREVKVITLKSKLVSDFRKDFQFYKVREINNYHHAHDAYLNAVVGTALIKKYPKLESEFVYGDYKVYDVRKMIAKSEQEIGKATAKYFFYSNIMNFFKTEITLANGEIRKRPLIETNGETGEIVWDKGRDFATVRKVLSMPQVNIVKKTEVQTGGFSKESILPKRNSDKLIARKKDWDPKKYGGFDSPTVAYSVLVVAKVEKGKSKKLKSVKELLGITIMERSSFEKNPIDFLEAKGYKEVKKDLIIKLPKYSLFELENGRKRMLASAGELQKGNELALPSKYVNFLYLASHYEKLKGSPEDNEQKQLFVEQHKHYLDEIIEQISEFSKRVILADANLDKVLSAYNKHRDKPIREQAENIIHLFTLTNLGAPAAFKYFDTTIDRKRYTSTKEVLDATLIHQSITGLYETRIDLSQLGGDGGEAAAKGSSGGGGGHLPPPPQVDQFPLNLPERLQALNDLVSKALEAGHIEPYSGPGNNPVFPVKKPNGKWRFIHDLRATNAITTTLTSPSPGPPDLTSLPTALPHLQTIDLTDAFFQIPLPKQYQPYFAFTIPQPCNYGPGTRYAWTVLPQGFKNSPTLFQQQLAAVLNPMRKMFPTSTIVQYMDDILLASPTNEELQQLSQLTLQALTTHGLPISQEKTQQTPGQIRFLGQVISPNHITYESTPTIPIKSQWTLTELQVILGEIQWVSKGTPILRKHLQSLYSALHPYRDPRACITLTPQQLHALHAIQQALQHNCRGRLNPALPLLGLISLSTSGTTSVIFQPKQNWPLAWLHTPHPPTSLCPWGHLLACTILTLDKYTLQHYGQLCQSFHHNMSKQALCDFLRNSPHPSVGILIHHMGRFHNLGSQPSGPWKTLLHLPTLLQEPRLLRPIFTLSPVVLDTAPCLFSDGSPQKAAYVLWDQTILQQDITPLPSHETHSAQKGELLALICGLRAAKPWPSLNIFLDSKYLIKYLHSLAIGAFLGTSAHQTLQAALPPLLQGKTIYLHHVRSHTNLPDPISTFNEYTDSLILAPLVPLAGKRTADGSEFEKRTADGSEFESPKKKAKVE

SEQ ID NO: 1532 - protein, 2009 aa, synthetic construct
MPAAKRVKLDGGDKKYSIGLDIGTNSVGWAVITDEYKVPSKKFKVLGNTDRHSIKKNLIGALLFDSGETAEATRLKRTARRRYTRRKNRICYLQEIFSNEMAKVDDSFFHRLEESFLVEEDKKHERHPIFGNIVDEVAYHEKYPTIYHLRKKLVDSTDKADLRLIYLALAHMIKFRGHFLIEGDLNPDNSDVDKLFIQLVQTYNQLFEENPINASGVDAKAILSARLSKSRRLENLIAQLPGEKKNGLFGNLIALSLGLTPNFKSNFDLAEDAKLQLSKDTYDDDLDNLLAQIGDQYADLFLAAKNLSDAILLSDILRVNTEITKAPLSASMIKRYDEHHQDLTLLKALVRQQLPEKYKEIFFDQSKNGYAGYIDGGASQEEFYKFIKPILEKMDGTEELLVKLNREDLLRKQRTFDNGSIPHQIHLGELHAILRRQEDFYPFLKDNREKIEKILTFRIPYYVGPLARGNSRFAWMTRKSEETITPWNFEEVVDKGASAQSFIERMTNFDKNLPNEKVLPKHSLLYEYFTVYNELTKVKYVTEGMRKPAFLSGEQKKAIVDLLFKTNRKVTVKQLKEDYFKKIECFDSVEISGVEDRFNASLGTYHDLLKIIKDKDFLDNEENEDILEDIVLTLTLFEDREMIEERLKTYAHLFDDKVMKQLKRRRYTGWGRLSRKLINGIRDKQSGKTILDFLKSDGFANRNFMQLIHDDSLTFKEDIQKAQVSGQGDSLHEHIANLAGSPAIKKGILQTVKVVDELVKVMGRHKPENIVIEMARENQTTQKGQKNSRERMKRIEEGIKELGSQILKEHPVENTQLQNEKLYLYYLQNGRDMYVDQELDINRLSDYDVDHIVPQSFLKDDSIDNKVLTRSDKARGKSDNVPSEEVVKKMKNYWRQLLNAKLITQRKFDNLTKAERGGLSELDKAGFIKRQLVETRQITKHVAQILDSRMNTKYDENDKLIREVKVITLKSKLVSDFRKDFQFYKVREINNYHHAHDAYLNAVVGTALIKKYPKLESEFVYGDYKVYDVRKMIAKSEQEIGKATAKYFFYSNIMNFFKTEITLANGEIRKRPLIETNGETGEIVWDKGRDFATVRKVLSMPQVNIVKKTEVQTGGFSKESILPKRNSDKLIARKKDWDPKKYGGFDSPTVAYSVLVVAKVEKGKSKKLKSVKELLGITIMERSSFEKNPIDFLEAKGYKEVKKDLIIKLPKYSLFELENGRKRMLASAGELQKGNELALPSKYVNFLYLASHYEKLKGSPEDNEQKQLFVEQHKHYLDEIIEQISEFSKRVILADANLDKVLSAYNKHRDKPIREQAENIIHLFTLTNLGAPAAFKYFDTTIDRKRYTSTKEVLDATLIHQSITGLYETRIDLSQLGGDGGEAAAKGGSPAPGGHLPPPPQVDQFPLNLPERLQALNDLVSKALEAGHIEPYSGPGNNPVFPVKKPNGKWRFIHDLRATNAITTTLTSPSPGPPDLTSLPTALPHLQTIDLTDAFFQIPLPKQYQPYFAFTIPQPCNYGPGTRYAWTVLPQGFKNSPTLFQQQLAAVLNPMRKMFPTSTIVQYMDDILLASPTNEELQQLSQLTLQALTTHGLPISQEKTQQTPGQIRFLGQVISPNHITYESTPTIPIKSQWTLTELQVILGEIQWVSKGTPILRKHLQSLYSALHPYRDPRACITLTPQQLHALHAIQQALQHNCRGRLNPALPLLGLISLSTSGTTSVIFQPKQNWPLAWLHTPHPPTSLCPWGHLLACTILTLDKYTLQHYGQLCQSFHHNMSKQALCDFLRNSPHPSVGILIHHMGRFHNLGSQPSGPWKTLLHLPTLLQEPRLLRPIFTLSPVVLDTAPCLFSDGSPQKAAYVLWDQTILQQDITPLPSHETHSAQKGELLALICGLRAAKPWPSLNIFLDSKYLIKYLHSLAIGAFLGTSAHQTLQAALPPLLQGKTIYLHHVRSHTNLPDPISTFNEYTDSLILAPLVPLAGKRTADGSEFEKRTADGSEFESPKKKAKVE

SEQ ID NO: 1533 - protein, 2031 aa, synthetic construct
MPAAKRVKLDGGDKKYSIGLDIGTNSVGWAVITDEYKVPSKKFKVLGNTDRHSIKKNLIGALLFDSGETAEATRLKRTARRRYTRRKNRICYLQEIFSNEMAKVDDSFFHRLEESFLVEEDKKHERHPIFGNIVDEVAYHEKYPTIYHLRKKLVDSTDKADLRLIYLALAHMIKFRGHFLIEGDLNPDNSDVDKLFIQLVQTYNQLFEENPINASGVDAKAILSARLSKSRRLENLIAQLPGEKKNGLFGNLIALSLGLTPNFKSNFDLAEDAKLQLSKDTYDDDLDNLLAQIGDQYADLFLAAKNLSDAILLSDILRVNTEITKAPLSASMIKRYDEHHQDLTLLKALVRQQLPEKYKEIFFDQSKNGYAGYIDGGASQEEFYKFIKPILEKMDGTEELLVKLNREDLLRKQRTFDNGSIPHQIHLGELHAILRRQEDFYPFLKDNREKIEKILTFRIPYYVGPLARGNSRFAWMTRKSEETITPWNFEEVVDKGASAQSFIERMTNFDKNLPNEKVLPKHSLLYEYFTVYNELTKVKYVTEGMRKPAFLSGEQKKAIVDLLFKTNRKVTVKQLKEDYFKKIECFDSVEISGVEDRFNASLGTYHDLLKIIKDKDFLDNEENEDILEDIVLTLTLFEDREMIEERLKTYAHLFDDKVMKQLKRRRYTGWGRLSRKLINGIRDKQSGKTILDFLKSDGFANRNFMQLIHDDSLTFKEDIQKAQVSGQGDSLHEHIANLAGSPAIKKGILQTVKVVDELVKVMGRHKPENIVIEMARENQTTQKGQKNSRERMKRIEEGIKELGSQILKEHPVENTQLQNEKLYLYYLQNGRDMYVDQELDINRLSDYDVDHIVPQSFLKDDSIDNKVLTRSDKARGKSDNVPSEEVVKKMKNYWRQLLNAKLITQRKFDNLTKAERGGLSELDKAGFIKRQLVETRQITKHVAQILDSRMNTKYDENDKLIREVKVITLKSKLVSDFRKDFQFYKVREINNYHHAHDAYLNAVVGTALIKKYPKLESEFVYGDYKVYDVRKMIAKSEQEIGKATAKYFFYSNIMNFFKTEITLANGEIRKRPLIETNGETGEIVWDKGRDFATVRKVLSMPQVNIVKKTEVQTGGFSKESILPKRNSDKLIARKKDWDPKKYGGFDSPTVAYSVLVVAKVEKGKSKKLKSVKELLGITIMERSSFEKNPIDFLEAKGYKEVKKDLIIKLPKYSLFELENGRKRMLASAGELQKGNELALPSKYVNFLYLASHYEKLKGSPEDNEQKQLFVEQHKHYLDEIIEQISEFSKRVILADANLDKVLSAYNKHRDKPIREQAENIIHLFTLTNLGAPAAFKYFDTTIDRKRYTSTKEVLDATLIHQSITGLYETRIDLSQLGGDGGSGGSSGGSSGSETPGTSESATPESSGGSSGGSSGGHLPPPPQVDQFPLNLPERLQALNDLVSKALEAGHIEPYSGPGNNPVFPVKKPNGKWRFIHDLRATNAITTTLTSPSPGPPDLTSLPTALPHLQTIDLTDAFFQIPLPKQYQPYFAFTIPQPCNYGPGTRYAWTVLPQGFKNSPTLFQQQLAAVLNPMRKMFPTSTIVQYMDDILLASPTNEELQQLSQLTLQALTTHGLPISQEKTQQTPGQIRFLGQVISPNHITYESTPTIPIKSQWTLTELQVILGEIQWVSKGTPILRKHLQSLYSALHPYRDPRACITLTPQQLHALHAIQQALQHNCRGRLNPALPLLGLISLSTSGTTSVIFQPKQNWPLAWLHTPHPPTSLCPWGHLLACTILTLDKYTLQHYGQLCQSFHHNMSKQALCDFLRNSPHPSVGILIHHMGRFHNLGSQPSGPWKTLLHLPTLLQEPRLLRPIFTLSPVVLDTAPCLFSDGSPQKAAYVLWDQTILQQDITPLPSHETHSAQKGELLALICGLRAAKPWPSLNIFLDSKYLIKYLHSLAIGAFLGTSAHQTLQAALPPLLQGKTIYLHHVRSHTNLPDPISTFNEYTDSLILAPLVPLAGKRTADGSEFEKRTADGSEFESPKKKAKVE

SEQ ID NO: 1534 - protein, 2006 aa, synthetic construct
MPAAKRVKLDGGDKKYSIGLDIGTNSVGWAVITDEYKVPSKKFKVLGNTDRHSIKKNLIGALLFDSGETAEATRLKRTARRRYTRRKNRICYLQEIFSNEMAKVDDSFFHRLEESFLVEEDKKHERHPIFGNIVDEVAYHEKYPTIYHLRKKLVDSTDKADLRLIYLALAHMIKFRGHFLIEGDLNPDNSDVDKLFIQLVQTYNQLFEENPINASGVDAKAILSARLSKSRRLENLIAQLPGEKKNGLFGNLIALSLGLTPNFKSNFDLAEDAKLQLSKDTYDDDLDNLLAQIGDQYADLFLAAKNLSDAILLSDILRVNTEITKAPLSASMIKRYDEHHQDLTLLKALVRQQLPEKYKEIFFDQSKNGYAGYIDGGASQEEFYKFIKPILEKMDGTEELLVKLNREDLLRKQRTFDNGSIPHQIHLGELHAILRRQEDFYPFLKDNREKIEKILTFRIPYYVGPLARGNSRFAWMTRKSEETITPWNFEEVVDKGASAQSFIERMTNFDKNLPNEKVLPKHSLLYEYFTVYNELTKVKYVTEGMRKPAFLSGEQKKAIVDLLFKTNRKVTVKQLKEDYFKKIECFDSVEISGVEDRFNASLGTYHDLLKIIKDKDFLDNEENEDILEDIVLTLTLFEDREMIEERLKTYAHLFDDKVMKQLKRRRYTGWGRLSRKLINGIRDKQSGKTILDFLKSDGFANRNFMQLIHDDSLTFKEDIQKAQVSGQGDSLHEHIANLAGSPAIKKGILQTVKVVDELVKVMGRHKPENIVIEMARENQTTQKGQKNSRERMKRIEEGIKELGSQILKEHPVENTQLQNEKLYLYYLQNGRDMYVDQELDINRLSDYDVDHIVPQSFLKDDSIDNKVLTRSDKARGKSDNVPSEEVVKKMKNYWRQLLNAKLITQRKFDNLTKAERGGLSELDKAGFIKRQLVETRQITKHVAQILDSRMNTKYDENDKLIREVKVITLKSKLVSDFRKDFQFYKVREINNYHHAHDAYLNAVVGTALIKKYPKLESEFVYGDYKVYDVRKMIAKSEQEIGKATAKYFFYSNIMNFFKTEITLANGEIRKRPLIETNGETGEIVWDKGRDFATVRKVLSMPQVNIVKKTEVQTGGFSKESILPKRNSDKLIARKKDWDPKKYGGFDSPTVAYSVLVVAKVEKGKSKKLKSVKELLGITIMERSSFEKNPIDFLEAKGYKEVKKDLIIKLPKYSLFELENGRKRMLASAGELQKGNELALPSKYVNFLYLASHYEKLKGSPEDNEQKQLFVEQHKHYLDEIIEQISEFSKRVILADANLDKVLSAYNKHRDKPIREQAENIIHLFTLTNLGAPAAFKYFDTTIDRKRYTSTKEVLDATLIHQSITGLYETRIDLSQLGGDGGPAPEAAAKGGHLPPPPQVDQFPLNLPERLQALNDLVSKALEAGHIEPYSGPGNNPVFPVKKPNGKWRFIHDLRATNAITTTLTSPSPGPPDLTSLPTALPHLQTIDLTDAFFQIPLPKQYQPYFAFTIPQPCNYGPGTRYAWTVLPQGFKNSPTLFQQQLAAVLNPMRKMFPTSTIVQYMDDILLASPTNEELQQLSQLTLQALTTHGLPISQEKTQQTPGQIRFLGQVISPNHITYESTPTIPIKSQWTLTELQVILGEIQWVSKGTPILRKHLQSLYSALHPYRDPRACITLTPQQLHALHAIQQALQHNCRGRLNPALPLLGLISLSTSGTTSVIFQPKQNWPLAWLHTPHPPTSLCPWGHLLACTILTLDKYTLQHYGQLCQSFHHNMSKQALCDFLRNSPHPSVGILIHHMGRFHNLGSQPSGPWKTLLHLPTLLQEPRLLRPIFTLSPVVLDTAPCLFSDGSPQKAAYVLWDQTILQQDITPLPSHETHSAQKGELLALICGLRAAKPWPSLNIFLDSKYLIKYLHSLAIGAFLGTSAHQTLQAALPPLLQGKTIYLHHVRSHTNLPDPISTFNEYTDSLILAPLVPLAGKRTADGSEFEKRTADGSEFESPKKKAKVE

SEQ ID NO: 1535 - protein, 2007 aa, synthetic construct
MPAAKRVKLDGGDKKYSIGLDIGTNSVGWAVITDEYKVPSKKFKVLGNTDRHSIKKNLIGALLFDSGETAEATRLKRTARRRYTRRKNRICYLQEIFSNEMAKVDDSFFHRLEESFLVEEDKKHERHPIFGNIVDEVAYHEKYPTIYHLRKKLVDSTDKADLRLIYLALAHMIKFRGHFLIEGDLNPDNSDVDKLFIQLVQTYNQLFEENPINASGVDAKAILSARLSKSRRLENLIAQLPGEKKNGLFGNLIALSLGLTPNFKSNFDLAEDAKLQLSKDTYDDDLDNLLAQIGDQYADLFLAAKNLSDAILLSDILRVNTEITKAPLSASMIKRYDEHHQDLTLLKALVRQQLPEKYKEIFFDQSKNGYAGYIDGGASQEEFYKFIKPILEKMDGTEELLVKLNREDLLRKQRTFDNGSIPHQIHLGELHAILRRQEDFYPFLKDNREKIEKILTFRIPYYVGPLARGNSRFAWMTRKSEETITPWNFEEVVDKGASAQSFIERMTNFDKNLPNEKVLPKHSLLYEYFTVYNELTKVKYVTEGMRKPAFLSGEQKKAIVDLLFKTNRKVTVKQLKEDYFKKIECFDSVEISGVEDRFNASLGTYHDLLKIIKDKDFLDNEENEDILEDIVLTLTLFEDREMIEERLKTYAHLFDDKVMKQLKRRRYTGWGRLSRKLINGIRDKQSGKTILDFLKSDGFANRNFMQLIHDDSLTFKEDIQKAQVSGQGDSLHEHIANLAGSPAIKKGILQTVKVVDELVKVMGRHKPENIVIEMARENQTTQKGQKNSRERMKRIEEGIKELGSQILKEHPVENTQLQNEKLYLYYLQNGRDMYVDQELDINRLSDYDVDHIVPQSFLKDDSIDNKVLTRSDKARGKSDNVPSEEVVKKMKNYWRQLLNAKLITQRKFDNLTKAERGGLSELDKAGFIKRQLVETRQITKHVAQILDSRMNTKYDENDKLIREVKVITLKSKLVSDFRKDFQFYKVREINNYHHAHDAYLNAVVGTALIKKYPKLESEFVYGDYKVYDVRKMIAKSEQEIGKATAKYFFYSNIMNFFKTEITLANGEIRKRPLIETNGETGEIVWDKGRDFATVRKVLSMPQVNIVKKTEVQTGGFSKESILPKRNSDKLIARKKDWDPKKYGGFDSPTVAYSVLVVAKVEKGKSKKLKSVKELLGITIMERSSFEKNPIDFLEAKGYKEVKKDLIIKLPKYSLFELENGRKRMLASAGELQKGNELALPSKYVNFLYLASHYEKLKGSPEDNEQKQLFVEQHKHYLDEIIEQISEFSKRVILADANLDKVLSAYNKHRDKPIREQAENIIHLFTLTNLGAPAAFKYFDTTIDRKRYTSTKEVLDATLIHQSITGLYETRIDLSQLGGDGGGSSGGSGGGGGHLPPPPQVDQFPLNLPERLQALNDLVSKALEAGHIEPYSGPGNNPVFPVKKPNGKWRFIHDLRATNAITTTLTSPSPGPPDLTSLPTALPHLQTIDLTDAFFQIPLPKQYQPYFAFTIPQPCNYGPGTRYAWTVLPQGFKNSPTLFQQQLAAVLNPMRKMFPTSTIVQYMDDILLASPTNEELQQLSQLTLQALTTHGLPISQEKTQQTPGQIRFLGQVISPNHITYESTPTIPIKSQWTLTELQVILGEIQWVSKGTPILRKHLQSLYSALHPYRDPRACITLTPQQLHALHAIQQALQHNCRGRLNPALPLLGLISLSTSGTTSVIFQPKQNWPLAWLHTPHPPTSLCPWGHLLACTILTLDKYTLQHYGQLCQSFHHNMSKQALCDFLRNSPHPSVGILIHHMGRFHNLGSQPSGPWKTLLHLPTLLQEPRLLRPIFTLSPVVLDTAPCLFSDGSPQKAAYVLWDQTILQQDITPLPSHETHSAQKGELLALICGLRAAKPWPSLNIFLDSKYLIKYLHSLAIGAFLGTSAHQTLQAALPPLLQGKTIYLHHVRSHTNLPDPISTFNEYTDSLILAPLVPLAGKRTADGSEFEKRTADGSEFESPKKKAKVE

SEQ ID NO: 1536 - protein, 2007 aa, synthetic construct
MPAAKRVKLDGGDKKYSIGLDIGTNSVGWAVITDEYKVPSKKFKVLGNTDRHSIKKNLIGALLFDSGETAEATRLKRTARRRYTRRKNRICYLQEIFSNEMAKVDDSFFHRLEESFLVEEDKKHERHPIFGNIVDEVAYHEKYPTIYHLRKKLVDSTDKADLRLIYLALAHMIKFRGHFLIEGDLNPDNSDVDKLFIQLVQTYNQLFEENPINASGVDAKAILSARLSKSRRLENLIAQLPGEKKNGLFGNLIALSLGLTPNFKSNFDLAEDAKLQLSKDTYDDDLDNLLAQIGDQYADLFLAAKNLSDAILLSDILRVNTEITKAPLSASMIKRYDEHHQDLTLLKALVRQQLPEKYKEIFFDQSKNGYAGYIDGGASQEEFYKFIKPILEKMDGTEELLVKLNREDLLRKQRTFDNGSIPHQIHLGELHAILRRQEDFYPFLKDNREKIEKILTFRIPYYVGPLARGNSRFAWMTRKSEETITPWNFEEVVDKGASAQSFIERMTNFDKNLPNEKVLPKHSLLYEYFTVYNELTKVKYVTEGMRKPAFLSGEQKKAIVDLLFKTNRKVTVKQLKEDYFKKIECFDSVEISGVEDRFNASLGTYHDLLKIIKDKDFLDNEENEDILEDIVLTLTLFEDREMIEERLKTYAHLFDDKVMKQLKRRRYTGWGRLSRKLINGIRDKQSGKTILDFLKSDGFANRNFMQLIHDDSLTFKEDIQKAQVSGQGDSLHEHIANLAGSPAIKKGILQTVKVVDELVKVMGRHKPENIVIEMARENQTTQKGQKNSRERMKRIEEGIKELGSQILKEHPVENTQLQNEKLYLYYLQNGRDMYVDQELDINRLSDYDVDHIVPQSFLKDDSIDNKVLTRSDKARGKSDNVPSEEVVKKMKNYWRQLLNAKLITQRKFDNLTKAERGGLSELDKAGFIKRQLVETRQITKHVAQILDSRMNTKYDENDKLIREVKVITLKSKLVSDFRKDFQFYKVREINNYHHAHDAYLNAVVGTALIKKYPKLESEFVYGDYKVYDVRKMIAKSEQEIGKATAKYFFYSNIMNFFKTEITLANGEIRKRPLIETNGETGEIVWDKGRDFATVRKVLSMPQVNIVKKTEVQTGGFSKESILPKRNSDKLIARKKDWDPKKYGGFDSPTVAYSVLVVAKVEKGKSKKLKSVKELLGITIMERSSFEKNPIDFLEAKGYKEVKKDLIIKLPKYSLFELENGRKRMLASAGELQKGNELALPSKYVNFLYLASHYEKLKGSPEDNEQKQLFVEQHKHYLDEIIEQISEFSKRVILADANLDKVLSAYNKHRDKPIREQAENIIHLFTLTNLGAPAAFKYFDTTIDRKRYTSTKEVLDATLIHQSITGLYETRIDLSQLGGDGGPAPAPAPAPGGHLPPPPQVDQFPLNLPERLQALNDLVSKALEAGHIEPYSGPGNNPVFPVKKPNGKWRFIHDLRATNAITTTLTSPSPGPPDLTSLPTALPHLQTIDLTDAFFQIPLPKQYQPYFAFTIPQPCNYGPGTRYAWTVLPQGFKNSPTLFQQQLAAVLNPMRKMFPTSTIVQYMDDILLASPTNEELQQLSQLTLQALTTHGLPISQEKTQQTPGQIRFLGQVISPNHITYESTPTIPIKSQWTLTELQVILGEIQWVSKGTPILRKHLQSLYSALHPYRDPRACITLTPQQLHALHAIQQALQHNCRGRLNPALPLLGLISLSTSGTTSVIFQPKQNWPLAWLHTPHPPTSLCPWGHLLACTILTLDKYTLQHYGQLCQSFHHNMSKQALCDFLRNSPHPSVGILIHHMGRFHNLGSQPSGPWKTLLHLPTLLQEPRLLRPIFTLSPVVLDTAPCLFSDGSPQKAAYVLWDQTILQQDITPLPSHETHSAQKGELLALICGLRAAKPWPSLNIFLDSKYLIKYLHSLAIGAFLGTSAHQTLQAALPPLLQGKTIYLHHVRSHTNLPDPISTFNEYTDSLILAPLVPLAGKRTADGSEFEKRTADGSEFESPKKKAKVE

SEQ ID NO: 1537 - protein, 2010 aa, synthetic construct
MPAAKRVKLDGGDKKYSIGLDIGTNSVGWAVITDEYKVPSKKFKVLGNTDRHSIKKNLIGALLFDSGETAEATRLKRTARRRYTRRKNRICYLQEIFSNEMAKVDDSFFHRLEESFLVEEDKKHERHPIFGNIVDEVAYHEKYPTIYHLRKKLVDSTDKADLRLIYLALAHMIKFRGHFLIEGDLNPDNSDVDKLFIQLVQTYNQLFEENPINASGVDAKAILSARLSKSRRLENLIAQLPGEKKNGLFGNLIALSLGLTPNFKSNFDLAEDAKLQLSKDTYDDDLDNLLAQIGDQYADLFLAAKNLSDAILLSDILRVNTEITKAPLSASMIKRYDEHHQDLTLLKALVRQQLPEKYKEIFFDQSKNGYAGYIDGGASQEEFYKFIKPILEKMDGTEELLVKLNREDLLRKQRTFDNGSIPHQIHLGELHAILRRQEDFYPFLKDNREKIEKILTFRIPYYVGPLARGNSRFAWMTRKSEETITPWNFEEVVDKGASAQSFIERMTNFDKNLPNEKVLPKHSLLYEYFTVYNELTKVKYVTEGMRKPAFLSGEQKKAIVDLLFKTNRKVTVKQLKEDYFKKIECFDSVEISGVEDRFNASLGTYHDLLKIIKDKDFLDNEENEDILEDIVLTLTLFEDREMIEERLKTYAHLFDDKVMKQLKRRRYTGWGRLSRKLINGIRDKQSGKTILDFLKSDGFANRNFMQLIHDDSLTFKEDIQKAQVSGQGDSLHEHIANLAGSPAIKKGILQTVKVVDELVKVMGRHKPENIVIEMARENQTTQKGQKNSRERMKRIEEGIKELGSQILKEHPVENTQLQNEKLYLYYLQNGRDMYVDQELDINRLSDYDVDHIVPQSFLKDDSIDNKVLTRSDKARGKSDNVPSEEVVKKMKNYWRQLLNAKLITQRKFDNLTKAERGGLSELDKAGFIKRQLVETRQITKHVAQILDSRMNTKYDENDKLIREVKVITLKSKLVSDFRKDFQFYKVREINNYHHAHDAYLNAVVGTALIKKYPKLESEFVYGDYKVYDVRKMIAKSEQEIGKATAKYFFYSNIMNFFKTEITLANGEIRKRPLIETNGETGEIVWDKGRDFATVRKVLSMPQVNIVKKTEVQTGGFSKESILPKRNSDKLIARKKDWDPKKYGGFDSPTVAYSVLVVAKVEKGKSKKLKSVKELLGITIMERSSFEKNPIDFLEAKGYKEVKKDLIIKLPKYSLFELENGRKRMLASAGELQKGNELALPSKYVNFLYLASHYEKLKGSPEDNEQKQLFVEQHKHYLDEIIEQISEFSKRVILADANLDKVLSAYNKHRDKPIREQAENIIHLFTLTNLGAPAAFKYFDTTIDRKRYTSTKEVLDATLIHQSITGLYETRIDLSQLGGDGGEAAAKEAAAKEAAAKGGPLGTSDSPVTHADPIDWKSEEPVWVDQWPLTQEKLSAAQQLVQEQLRLGHIEPSTSAWNSPIFVIKKKSGKWRLLQDLRKVNETMMHMGALQPGLPTPSAIPDKSYIIVIDLKDCFYTIPLAPQDCKRFAFSLPSVNFKEPMQRYQWRVLPQGMTNSPTLCQKFVATAIAPVRQRFPQLYLVHYMDDILLAHTDEHLLYQAFSILKQHLSLNGLVIADEKIQTHFPYNYLGFSLYPRVYNTQLVKLQTDHLKTLNDFQKLLGDINWIRPYLKLPTYTLQPLFDILKGDSDPASPRTLSLEGRTALQSIEEAIRQQQITYCDYQRSWGLYILPTPRAPTGVLYQDKPLRWIYLSATPTKHLLPYYELVAKIIAKGRHEAIQYFGMEPPFICVPYALEQQDWLFQFSDNWSIAFANYPGQITHHYPSDKLLQFASSHAFIFPKIVRRQPIPEATLIFTDGSSNGTAALIINHQTYYAQTSFSSAQVVELFAVHQALLTVPTSFNLFTDSSYVVGALQMIETVPIIGTTSPEVLNLFTLIQQVLHCRQHPCFFGHIRAHSTLPGALVQGNHTADVLTKQVFFQSAGKRTADGSEFEKRTADGSEFESPKKKAKVE

SEQ ID NO: 1538 - protein, 2001 aa, synthetic construct
MPAAKRVKLDGGDKKYSIGLDIGTNSVGWAVITDEYKVPSKKFKVLGNTDRHSIKKNLIGALLFDSGETAEATRLKRTARRRYTRRKNRICYLQEIFSNEMAKVDDSFFHRLEESFLVEEDKKHERHPIFGNIVDEVAYHEKYPTIYHLRKKLVDSTDKADLRLIYLALAHMIKFRGHFLIEGDLNPDNSDVDKLFIQLVQTYNQLFEENPINASGVDAKAILSARLSKSRRLENLIAQLPGEKKNGLFGNLIALSLGLTPNFKSNFDLAEDAKLQLSKDTYDDDLDNLLAQIGDQYADLFLAAKNLSDAILLSDILRVNTEITKAPLSASMIKRYDEHHQDLTLLKALVRQQLPEKYKEIFFDQSKNGYAGYIDGGASQEEFYKFIKPILEKMDGTEELLVKLNREDLLRKQRTFDNGSIPHQIHLGELHAILRRQEDFYPFLKDNREKIEKILTFRIPYYVGPLARGNSRFAWMTRKSEETITPWNFEEVVDKGASAQSFIERMTNFDKNLPNEKVLPKHSLLYEYFTVYNELTKVKYVTEGMRKPAFLSGEQKKAIVDLLFKTNRKVTVKQLKEDYFKKIECFDSVEISGVEDRFNASLGTYHDLLKIIKDKDFLDNEENEDILEDIVLTLTLFEDREMIEERLKTYAHLFDDKVMKQLKRRRYTGWGRLSRKLINGIRDKQSGKTILDFLKSDGFANRNFMQLIHDDSLTFKEDIQKAQVSGQGDSLHEHIANLAGSPAIKKGILQTVKVVDELVKVMGRHKPENIVIEMARENQTTQKGQKNSRERMKRIEEGIKELGSQILKEHPVENTQLQNEKLYLYYLQNGRDMYVDQELDINRLSDYDVDHIVPQSFLKDDSIDNKVLTRSDKARGKSDNVPSEEVVKKMKNYWRQLLNAKLITQRKFDNLTKAERGGLSELDKAGFIKRQLVETRQITKHVAQILDSRMNTKYDENDKLIREVKVITLKSKLVSDFRKDFQFYKVREINNYHHAHDAYLNAVVGTALIKKYPKLESEFVYGDYKVYDVRKMIAKSEQEIGKATAKYFFYSNIMNFFKTEITLANGEIRKRPLIETNGETGEIVWDKGRDFATVRKVLSMPQVNIVKKTEVQTGGFSKESILPKRNSDKLIARKKDWDPKKYGGFDSPTVAYSVLVVAKVEKGKSKKLKSVKELLGITIMERSSFEKNPIDFLEAKGYKEVKKDLIIKLPKYSLFELENGRKRMLASAGELQKGNELALPSKYVNFLYLASHYEKLKGSPEDNEQKQLFVEQHKHYLDEIIEQISEFSKRVILADANLDKVLSAYNKHRDKPIREQAENIIHLFTLTNLGAPAAFKYFDTTIDRKRYTSTKEVLDATLIHQSITGLYETRIDLSQLGGDGGGSSGGGGGPLGTSDSPVTHADPIDWKSEEPVWVDQWPLTQEKLSAAQQLVQEQLRLGHIEPSTSAWNSPIFVIKKKSGKWRLLQDLRKVNETMMHMGALQPGLPTPSAIPDKSYIIVIDLKDCFYTIPLAPQDCKRFAFSLPSVNFKEPMQRYQWRVLPQGMTNSPTLCQKFVATAIAPVRQRFPQLYLVHYMDDILLAHTDEHLLYQAFSILKQHLSLNGLVIADEKIQTHFPYNYLGFSLYPRVYNTQLVKLQTDHLKTLNDFQKLLGDINWIRPYLKLPTYTLQPLFDILKGDSDPASPRTLSLEGRTALQSIEEAIRQQQITYCDYQRSWGLYILPTPRAPTGVLYQDKPLRWIYLSATPTKHLLPYYELVAKIIAKGRHEAIQYFGMEPPFICVPYALEQQDWLFQFSDNWSIAFANYPGQITHHYPSDKLLQFASSHAFIFPKIVRRQPIPEATLIFTDGSSNGTAALIINHQTYYAQTSFSSAQVVELFAVHQALLTVPTSFNLFTDSSYVVGALQMIETVPIIGTTSPEVLNLFTLIQQVLHCRQHPCFFGHIRAHSTLPGALVQGNHTADVLTKQVFFQSAGKRTADGSEFEKRTADGSEFESPKKKAKVE

SEQ ID NO: 1539 - protein, 2106 aa, synthetic construct
MPAAKRVKLDGGDKKYSIGLDIGTNSVGWAVITDEYKVPSKKFKVLGNTDRHSIKKNLIGALLFDSGETAEATRLKRTARRRYTRRKNRICYLQEIFSNEMAKVDDSFFHRLEESFLVEEDKKHERHPIFGNIVDEVAYHEKYPTIYHLRKKLVDSTDKADLRLIYLALAHMIKFRGHFLIEGDLNPDNSDVDKLFIQLVQTYNQLFEENPINASGVDAKAILSARLSKSRRLENLIAQLPGEKKNGLFGNLIALSLGLTPNFKSNFDLAEDAKLQLSKDTYDDDLDNLLAQIGDQYADLFLAAKNLSDAILLSDILRVNTEITKAPLSASMIKRYDEHHQDLTLLKALVRQQLPEKYKEIFFDQSKNGYAGYIDGGASQEEFYKFIKPILEKMDGTEELLVKLNREDLLRKQRTFDNGSIPHQIHLGELHAILRRQEDFYPFLKDNREKIEKILTFRIPYYVGPLARGNSRFAWMTRKSEETITPWNFEEVVDKGASAQSFIERMTNFDKNLPNEKVLPKHSLLYEYFTVYNELTKVKYVTEGMRKPAFLSGEQKKAIVDLLFKTNRKVTVKQLKEDYFKKIECFDSVEISGVEDRFNASLGTYHDLLKIIKDKDFLDNEENEDILEDIVLTLTLFEDREMIEERLKTYAHLFDDKVMKQLKRRRYTGWGRLSRKLINGIRDKQSGKTILDFLKSDGFANRNFMQLIHDDSLTFKEDIQKAQVSGQGDSLHEHIANLAGSPAIKKGILQTVKVVDELVKVMGRHKPENIVIEMARENQTTQKGQKNSRERMKRIEEGIKELGSQILKEHPVENTQLQNEKLYLYYLQNGRDMYVDQELDINRLSDYDVDHIVPQSFLKDDSIDNKVLTRSDKARGKSDNVPSEEVVKKMKNYWRQLLNAKLITQRKFDNLTKAERGGLSELDKAGFIKRQLVETRQITKHVAQILDSRMNTKYDENDKLIREVKVITLKSKLVSDFRKDFQFYKVREINNYHHAHDAYLNAVVGTALIKKYPKLESEFVYGDYKVYDVRKMIAKSEQEIGKATAKYFFYSNIMNFFKTEITLANGEIRKRPLIETNGETGEIVWDKGRDFATVRKVLSMPQVNIVKKTEVQTGGFSKESILPKRNSDKLIARKKDWDPKKYGGFDSPTVAYSVLVVAKVEKGKSKKLKSVKELLGITIMERSSFEKNPIDFLEAKGYKEVKKDLIIKLPKYSLFELENGRKRMLASAGELQKGNELALPSKYVNFLYLASHYEKLKGSPEDNEQKQLFVEQHKHYLDEIIEQISEFSKRVILADANLDKVLSAYNKHRDKPIREQAENIIHLFTLTNLGAPAAFKYFDTTIDRKRYTSTKEVLDATLIHQSITGLYETRIDLSQLGGDGGEAAAKGGGGSEAAAKGGTVSLQDEHRLFDIPVTTSLPDVWLQDFPQAWAETGGLGRAKCQAPIIIDLKPTAVPVSIKQYPMSLEAHMGIRQHIIKFLELGVLRPCRSPWNTPLLPVKKPGTQDYRPVQDLREINKRTVDIHPTVPNPYNLLSTLKPDYSWYTVLDLKDAFFCLPLAPQSQELFAFEWKDPERGISGQLTWTRLPQGFKNSPTLFNEALHRDLTDFRTQHPEVTLLQYVDDLLLAAPTKKACTQGTRHLLQELGEKGYRASAKKAQICQTKVTYLGYILSEGKRWLTPGRIETVARIPPPRNPREVREFLGTAGFCRLWIPGFAELAAPLYALTKPSTPFTWQTEHQLAFEALKKALLSAPALGLPDTSKPFTLFLDERQGIAKGVLTQKLGPWKRPVAYLSKKLDPVAAGWPPCLRIMAATAMLVKDSAKLTLGQPLTVITPHTLEAIVRQPPDRWITNARLTHYQALLLDTDRVQFGPPVTLNPATLLPVPENQPSPHDCRQVLAETHGTREDLKDQELPDADHTWYTDGSSYLDSGTRRAGAAVVDGHNTIWAQSLPPGTSAQKAELIALTKALELSKGKKANIYTDSRYAFATAHTHGSIYERRGWLTSEGKEIKNKAEIIALLKALFLPQEVAIIHCPGHQKGQDPVAVGNRQADRVARQAAMAEVLTLATEPDNTSHITAGKRTADGSEFEKRTADGSEFESPKKKAKVE

SEQ ID NO: 1540 - protein, 2102 aa, synthetic construct
MPAAKRVKLDGGDKKYSIGLDIGTNSVGWAVITDEYKVPSKKFKVLGNTDRHSIKKNLIGALLFDSGETAEATRLKRTARRRYTRRKNRICYLQEIFSNEMAKVDDSFFHRLEESFLVEEDKKHERHPIFGNIVDEVAYHEKYPTIYHLRKKLVDSTDKADLRLIYLALAHMIKFRGHFLIEGDLNPDNSDVDKLFIQLVQTYNQLFEENPINASGVDAKAILSARLSKSRRLENLIAQLPGEKKNGLFGNLIALSLGLTPNFKSNFDLAEDAKLQLSKDTYDDDLDNLLAQIGDQYADLFLAAKNLSDAILLSDILRVNTEITKAPLSASMIKRYDEHHQDLTLLKALVRQQLPEKYKEIFFDQSKNGYAGYIDGGASQEEFYKFIKPILEKMDGTEELLVKLNREDLLRKQRTFDNGSIPHQIHLGELHAILRRQEDFYPFLKDNREKIEKILTFRIPYYVGPLARGNSRFAWMTRKSEETITPWNFEEVVDKGASAQSFIERMTNFDKNLPNEKVLPKHSLLYEYFTVYNELTKVKYVTEGMRKPAFLSGEQKKAIVDLLFKTNRKVTVKQLKEDYFKKIECFDSVEISGVEDRFNASLGTYHDLLKIIKDKDFLDNEENEDILEDIVLTLTLFEDREMIEERLKTYAHLFDDKVMKQLKRRRYTGWGRLSRKLINGIRDKQSGKTILDFLKSDGFANRNFMQLIHDDSLTFKEDIQKAQVSGQGDSLHEHIANLAGSPAIKKGILQTVKVVDELVKVMGRHKPENIVIEMARENQTTQKGQKNSRERMKRIEEGIKELGSQILKEHPVENTQLQNEKLYLYYLQNGRDMYVDQELDINRLSDYDVDHIVPQSFLKDDSIDNKVLTRSDKARGKSDNVPSEEVVKKMKNYWRQLLNAKLITQRKFDNLTKAERGGLSELDKAGFIKRQLVETRQITKHVAQILDSRMNTKYDENDKLIREVKVITLKSKLVSDFRKDFQFYKVREINNYHHAHDAYLNAVVGTALIKKYPKLESEFVYGDYKVYDVRKMIAKSEQEIGKATAKYFFYSNIMNFFKTEITLANGEIRKRPLIETNGETGEIVWDKGRDFATVRKVLSMPQVNIVKKTEVQTGGFSKESILPKRNSDKLIARKKDWDPKKYGGFDSPTVAYSVLVVAKVEKGKSKKLKSVKELLGITIMERSSFEKNPIDFLEAKGYKEVKKDLIIKLPKYSLFELENGRKRMLASAGELQKGNELALPSKYVNFLYLASHYEKLKGSPEDNEQKQLFVEQHKHYLDEIIEQISEFSKRVILADANLDKVLSAYNKHRDKPIREQAENIIHLFTLTNLGAPAAFKYFDTTIDRKRYTSTKEVLDATLIHQSITGLYETRIDLSQLGGDGGGGGGSSEAAAKGGTVSLQDEHRLFDIPVTTSLPDVWLQDFPQAWAETGGLGRAKCQAPIIIDLKPTAVPVSIKQYPMSLEAHMGIRQHIIKFLELGVLRPCRSPWNTPLLPVKKPGTQDYRPVQDLREINKRTVDIHPTVPNPYNLLSTLKPDYSWYTVLDLKDAFFCLPLAPQSQELFAFEWKDPERGISGQLTWTRLPQGFKNSPTLFNEALHRDLTDFRTQHPEVTLLQYVDDLLLAAPTKKACTQGTRHLLQELGEKGYRASAKKAQICQTKVTYLGYILSEGKRWLTPGRIETVARIPPPRNPREVREFLGTAGFCRLWIPGFAELAAPLYALTKPSTPFTWQTEHQLAFEALKKALLSAPALGLPDTSKPFTLFLDERQGIAKGVLTQKLGPWKRPVAYLSKKLDPVAAGWPPCLRIMAATAMLVKDSAKLTLGQPLTVITPHTLEAIVRQPPDRWITNARLTHYQALLLDTDRVQFGPPVTLNPATLLPVPENQPSPHDCRQVLAETHGTREDLKDQELPDADHTWYTDGSSYLDSGTRRAGAAVVDGHNTIWAQSLPPGTSAQKAELIALTKALELSKGKKANIYTDSRYAFATAHTHGSIYERRGWLTSEGKEIKNKAEIIALLKALFLPQEVAIIHCPGHQKGQDPVAVGNRQADRVARQAAMAEVLTLATEPDNTSHITAGKRTADGSEFEKRTADGSEFESPKKKAKVE

SEQ ID NO: 1541 - protein, 2094 aa, synthetic construct
MPAAKRVKLDGGDKKYSIGLDIGTNSVGWAVITDEYKVPSKKFKVLGNTDRHSIKKNLIGALLFDSGETAEATRLKRTARRRYTRRKNRICYLQEIFSNEMAKVDDSFFHRLEESFLVEEDKKHERHPIFGNIVDEVAYHEKYPTIYHLRKKLVDSTDKADLRLIYLALAHMIKFRGHFLIEGDLNPDNSDVDKLFIQLVQTYNQLFEENPINASGVDAKAILSARLSKSRRLENLIAQLPGEKKNGLFGNLIALSLGLTPNFKSNFDLAEDAKLQLSKDTYDDDLDNLLAQIGDQYADLFLAAKNLSDAILLSDILRVNTEITKAPLSASMIKRYDEHHQDLTLLKALVRQQLPEKYKEIFFDQSKNGYAGYIDGGASQEEFYKFIKPILEKMDGTEELLVKLNREDLLRKQRTFDNGSIPHQIHLGELHAILRRQEDFYPFLKDNREKIEKILTFRIPYYVGPLARGNSRFAWMTRKSEETITPWNFEEVVDKGASAQSFIERMTNFDKNLPNEKVLPKHSLLYEYFTVYNELTKVKYVTEGMRKPAFLSGEQKKAIVDLLFKTNRKVTVKQLKEDYFKKIECFDSVEISGVEDRFNASLGTYHDLLKIIKDKDFLDNEENEDILEDIVLTLTLFEDREMIEERLKTYAHLFDDKVMKQLKRRRYTGWGRLSRKLINGIRDKQSGKTILDFLKSDGFANRNFMQLIHDDSLTFKEDIQKAQVSGQGDSLHEHIANLAGSPAIKKGILQTVKVVDELVKVMGRHKPENIVIEMARENQTTQKGQKNSRERMKRIEEGIKELGSQILKEHPVENTQLQNEKLYLYYLQNGRDMYVDQELDINRLSDYDVDHIVPQSFLKDDSIDNKVLTRSDKARGKSDNVPSEEVVKKMKNYWRQLLNAKLITQRKFDNLTKAERGGLSELDKAGFIKRQLVETRQITKHVAQILDSRMNTKYDENDKLIREVKVITLKSKLVSDFRKDFQFYKVREINNYHHAHDAYLNAVVGTALIKKYPKLESEFVYGDYKVYDVRKMIAKSEQEIGKATAKYFFYSNIMNFFKTEITLANGEIRKRPLIETNGETGEIVWDKGRDFATVRKVLSMPQVNIVKKTEVQTGGFSKESILPKRNSDKLIARKKDWDPKKYGGFDSPTVAYSVLVVAKVEKGKSKKLKSVKELLGITIMERSSFEKNPIDFLEAKGYKEVKKDLIIKLPKYSLFELENGRKRMLASAGELQKGNELALPSKYVNFLYLASHYEKLKGSPEDNEQKQLFVEQHKHYLDEIIEQISEFSKRVILADANLDKVLSAYNKHRDKPIREQAENIIHLFTLTNLGAPAAFKYFDTTIDRKRYTSTKEVLDATLIHQSITGLYETRIDLSQLGGDGGGGSGGTVSLQDEHRLFDIPVTTSLPDVWLQDFPQAWAETGGLGRAKCQAPIIIDLKPTAVPVSIKQYPMSLEAHMGIRQHIIKFLELGVLRPCRSPWNTPLLPVKKPGTQDYRPVQDLREINKRTVDIHPTVPNPYNLLSTLKPDYSWYTVLDLKDAFFCLPLAPQSQELFAFEWKDPERGISGQLTWTRLPQGFKNSPTLFNEALHRDLTDFRTQHPEVTLLQYVDDLLLAAPTKKACTQGTRHLLQELGEKGYRASAKKAQICQTKVTYLGYILSEGKRWLTPGRIETVARIPPPRNPREVREFLGTAGFCRLWIPGFAELAAPLYALTKPSTPFTWQTEHQLAFEALKKALLSAPALGLPDTSKPFTLFLDERQGIAKGVLTQKLGPWKRPVAYLSKKLDPVAAGWPPCLRIMAATAMLVKDSAKLTLGQPLTVITPHTLEAIVRQPPDRWITNARLTHYQALLLDTDRVQFGPPVTLNPATLLPVPENQPSPHDCRQVLAETHGTREDLKDQELPDADHTWYTDGSSYLDSGTRRAGAAVVDGHNTIWAQSLPPGTSAQKAELIALTKALELSKGKKANIYTDSRYAFATAHTHGSIYERRGWLTSEGKEIKNKAEIIALLKALFLPQEVAIIHCPGHQKGQDPVAVGNRQADRVARQAAMAEVLTLATEPDNTSHITAGKRTADGSEFEKRTADGSEFESPKKKAKVE

SEQ ID NO: 1542 - protein, 2137 aa, synthetic construct
MPAAKRVKLDGGDKKYSIGLDIGTNSVGWAVITDEYKVPSKKFKVLGNTDRHSIKKNLIGALLFDSGETAEATRLKRTARRRYTRRKNRICYLQEIFSNEMAKVDDSFFHRLEESFLVEEDKKHERHPIFGNIVDEVAYHEKYPTIYHLRKKLVDSTDKADLRLIYLALAHMIKFRGHFLIEGDLNPDNSDVDKLFIQLVQTYNQLFEENPINASGVDAKAILSARLSKSRRLENLIAQLPGEKKNGLFGNLIALSLGLTPNFKSNFDLAEDAKLQLSKDTYDDDLDNLLAQIGDQYADLFLAAKNLSDAILLSDILRVNTEITKAPLSASMIKRYDEHHQDLTLLKALVRQQLPEKYKEIFFDQSKNGYAGYIDGGASQEEFYKFIKPILEKMDGTEELLVKLNREDLLRKQRTFDNGSIPHQIHLGELHAILRRQEDFYPFLKDNREKIEKILTFRIPYYVGPLARGNSRFAWMTRKSEETITPWNFEEVVDKGASAQSFIERMTNFDKNLPNEKVLPKHSLLYEYFTVYNELTKVKYVTEGMRKPAFLSGEQKKAIVDLLFKTNRKVTVKQLKEDYFKKIECFDSVEISGVEDRFNASLGTYHDLLKIIKDKDFLDNEENEDILEDIVLTLTLFEDREMIEERLKTYAHLFDDKVMKQLKRRRYTGWGRLSRKLINGIRDKQSGKTILDFLKSDGFANRNFMQLIHDDSLTFKEDIQKAQVSGQGDSLHEHIANLAGSPAIKKGILQTVKVVDELVKVMGRHKPENIVIEMARENQTTQKGQKNSRERMKRIEEGIKELGSQILKEHPVENTQLQNEKLYLYYLQNGRDMYVDQELDINRLSDYDVDHIVPQSFLKDDSIDNKVLTRSDKARGKSDNVPSEEVVKKMKNYWRQLLNAKLITQRKFDNLTKAERGGLSELDKAGFIKRQLVETRQITKHVAQILDSRMNTKYDENDKLIREVKVITLKSKLVSDFRKDFQFYKVREINNYHHAHDAYLNAVVGTALIKKYPKLESEFVYGDYKVYDVRKMIAKSEQEIGKATAKYFFYSNIMNFFKTEITLANGEIRKRPLIETNGETGEIVWDKGRDFATVRKVLSMPQVNIVKKTEVQTGGFSKESILPKRNSDKLIARKKDWDPKKYGGFDSPTVAYSVLVVAKVEKGKSKKLKSVKELLGITIMERSSFEKNPIDFLEAKGYKEVKKDLIIKLPKYSLFELENGRKRMLASAGELQKGNELALPSKYVNFLYLASHYEKLKGSPEDNEQKQLFVEQHKHYLDEIIEQISEFSKRVILADANLDKVLSAYNKHRDKPIREQAENIIHLFTLTNLGAPAAFKYFDTTIDRKRYTSTKEVLDATLIHQSITGLYETRIDLSQLGGDGGAEAAAKEAAAKEAAAKEAAAKALEAEAAAKEAAAKEAAAKEAAAKAGGTVSLQDEHRLFDIPVTTSLPDVWLQDFPQAWAETGGLGRAKCQAPIIIDLKPTAVPVSIKQYPMSLEAHMGIRQHIIKFLELGVLRPCRSPWNTPLLPVKKPGTQDYRPVQDLREINKRTVDIHPTVPNPYNLLSTLKPDYSWYTVLDLKDAFFCLPLAPQSQELFAFEWKDPERGISGQLTWTRLPQGFKNSPTLFNEALHRDLTDFRTQHPEVTLLQYVDDLLLAAPTKKACTQGTRHLLQELGEKGYRASAKKAQICQTKVTYLGYILSEGKRWLTPGRIETVARIPPPRNPREVREFLGTAGFCRLWIPGFAELAAPLYALTKPSTPFTWQTEHQLAFEALKKALLSAPALGLPDTSKPFTLFLDERQGIAKGVLTQKLGPWKRPVAYLSKKLDPVAAGWPPCLRIMAATAMLVKDSAKLTLGQPLTVITPHTLEAIVRQPPDRWITNARLTHYQALLLDTDRVQFGPPVTLNPATLLPVPENQPSPHDCRQVLAETHGTREDLKDQELPDADHTWYTDGSSYLDSGTRRAGAAVVDGHNTIWAQSLPPGTSAQKAELIALTKALELSKGKKANIYTDSRYAFATAHTHGSIYERRGWLTSEGKEIKNKAEIIALLKALFLPQEVAIIHCPGHQKGQDPVAVGNRQADRVARQAAMAEVLTLATEPDNTSHITAGKRTADGSEFEKRTADGSEFESPKKKAKVE

SEQ ID NO: 1543 - protein, 2116 aa, synthetic construct
MPAAKRVKLDGGDKKYSIGLDIGTNSVGWAVITDEYKVPSKKFKVLGNTDRHSIKKNLIGALLFDSGETAEATRLKRTARRRYTRRKNRICYLQEIFSNEMAKVDDSFFHRLEESFLVEEDKKHERHPIFGNIVDEVAYHEKYPTIYHLRKKLVDSTDKADLRLIYLALAHMIKFRGHFLIEGDLNPDNSDVDKLFIQLVQTYNQLFEENPINASGVDAKAILSARLSKSRRLENLIAQLPGEKKNGLFGNLIALSLGLTPNFKSNFDLAEDAKLQLSKDTYDDDLDNLLAQIGDQYADLFLAAKNLSDAILLSDILRVNTEITKAPLSASMIKRYDEHHQDLTLLKALVRQQLPEKYKEIFFDQSKNGYAGYIDGGASQEEFYKFIKPILEKMDGTEELLVKLNREDLLRKQRTFDNGSIPHQIHLGELHAILRRQEDFYPFLKDNREKIEKILTFRIPYYVGPLARGNSRFAWMTRKSEETITPWNFEEVVDKGASAQSFIERMTNFDKNLPNEKVLPKHSLLYEYFTVYNELTKVKYVTEGMRKPAFLSGEQKKAIVDLLFKTNRKVTVKQLKEDYFKKIECFDSVEISGVEDRFNASLGTYHDLLKIIKDKDFLDNEENEDILEDIVLTLTLFEDREMIEERLKTYAHLFDDKVMKQLKRRRYTGWGRLSRKLINGIRDKQSGKTILDFLKSDGFANRNFMQLIHDDSLTFKEDIQKAQVSGQGDSLHEHIANLAGSPAIKKGILQTVKVVDELVKVMGRHKPENIVIEMARENQTTQKGQKNSRERMKRIEEGIKELGSQILKEHPVENTQLQNEKLYLYYLQNGRDMYVDQELDINRLSDYDVDHIVPQSFLKDDSIDNKVLTRSDKARGKSDNVPSEEVVKKMKNYWRQLLNAKLITQRKFDNLTKAERGGLSELDKAGFIKRQLVETRQITKHVAQILDSRMNTKYDENDKLIREVKVITLKSKLVSDFRKDFQFYKVREINNYHHAHDAYLNAVVGTALIKKYPKLESEFVYGDYKVYDVRKMIAKSEQEIGKATAKYFFYSNIMNFFKTEITLANGEIRKRPLIETNGETGEIVWDKGRDFATVRKVLSMPQVNIVKKTEVQTGGFSKESILPKRNSDKLIARKKDWDPKKYGGFDSPTVAYSVLVVAKVEKGKSKKLKSVKELLGITIMERSSFEKNPIDFLEAKGYKEVKKDLIIKLPKYSLFELENGRKRMLASAGELQKGNELALPSKYVNFLYLASHYEKLKGSPEDNEQKQLFVEQHKHYLDEIIEQISEFSKRVILADANLDKVLSAYNKHRDKPIREQAENIIHLFTLTNLGAPAAFKYFDTTIDRKRYTSTKEVLDATLIHQSITGLYETRIDLSQLGGDGGGGGGSGGGGSGGGGSGGGGSGGGGSGGTVSLQDEHRLFDIPVTTSLPDVWLQDFPQAWAETGGLGRAKCQAPIIIDLKPTAVPVSIKQYPMSLEAHMGIRQHIIKFLELGVLRPCRSPWNTPLLPVKKPGTQDYRPVQDLREINKRTVDIHPTVPNPYNLLSTLKPDYSWYTVLDLKDAFFCLPLAPQSQELFAFEWKDPERGISGQLTWTRLPQGFKNSPTLFNEALHRDLTDFRTQHPEVTLLQYVDDLLLAAPTKKACTQGTRHLLQELGEKGYRASAKKAQICQTKVTYLGYILSEGKRWLTPGRIETVARIPPPRNPREVREFLGTAGFCRLWIPGFAELAAPLYALTKPSTPFTWQTEHQLAFEALKKALLSAPALGLPDTSKPFTLFLDERQGIAKGVLTQKLGPWKRPVAYLSKKLDPVAAGWPPCLRIMAATAMLVKDSAKLTLGQPLTVITPHTLEAIVRQPPDRWITNARLTHYQALLLDTDRVQFGPPVTLNPATLLPVPENQPSPHDCRQVLAETHGTREDLKDQELPDADHTWYTDGSSYLDSGTRRAGAAVVDGHNTIWAQSLPPGTSAQKAELIALTKALELSKGKKANIYTDSRYAFATAHTHGSIYERRGWLTSEGKEIKNKAEIIALLKALFLPQEVAIIHCPGHQKGQDPVAVGNRQADRVARQAAMAEVLTLATEPDNTSHITAGKRTADGSEFEKRTADGSEFESPKKKAKVE

SEQ ID NO: 1544 - protein, 2099 aa, synthetic construct
MPAAKRVKLDGGDKKYSIGLDIGTNSVGWAVITDEYKVPSKKFKVLGNTDRHSIKKNLIGALLFDSGETAEATRLKRTARRRYTRRKNRICYLQEIFSNEMAKVDDSFFHRLEESFLVEEDKKHERHPIFGNIVDEVAYHEKYPTIYHLRKKLVDSTDKADLRLIYLALAHMIKFRGHFLIEGDLNPDNSDVDKLFIQLVQTYNQLFEENPINASGVDAKAILSARLSKSRRLENLIAQLPGEKKNGLFGNLIALSLGLTPNFKSNFDLAEDAKLQLSKDTYDDDLDNLLAQIGDQYADLFLAAKNLSDAILLSDILRVNTEITKAPLSASMIKRYDEHHQDLTLLKALVRQQLPEKYKEIFFDQSKNGYAGYIDGGASQEEFYKFIKPILEKMDGTEELLVKLNREDLLRKQRTFDNGSIPHQIHLGELHAILRRQEDFYPFLKDNREKIEKILTFRIPYYVGPLARGNSRFAWMTRKSEETITPWNFEEVVDKGASAQSFIERMTNFDKNLPNEKVLPKHSLLYEYFTVYNELTKVKYVTEGMRKPAFLSGEQKKAIVDLLFKTNRKVTVKQLKEDYFKKIECFDSVEISGVEDRFNASLGTYHDLLKIIKDKDFLDNEENEDILEDIVLTLTLFEDREMIEERLKTYAHLFDDKVMKQLKRRRYTGWGRLSRKLINGIRDKQSGKTILDFLKSDGFANRNFMQLIHDDSLTFKEDIQKAQVSGQGDSLHEHIANLAGSPAIKKGILQTVKVVDELVKVMGRHKPENIVIEMARENQTTQKGQKNSRERMKRIEEGIKELGSQILKEHPVENTQLQNEKLYLYYLQNGRDMYVDQELDINRLSDYDVDHIVPQSFLKDDSIDNKVLTRSDKARGKSDNVPSEEVVKKMKNYWRQLLNAKLITQRKFDNLTKAERGGLSELDKAGFIKRQLVETRQITKHVAQILDSRMNTKYDENDKLIREVKVITLKSKLVSDFRKDFQFYKVREINNYHHAHDAYLNAVVGTALIKKYPKLESEFVYGDYKVYDVRKMIAKSEQEIGKATAKYFFYSNIMNFFKTEITLANGEIRKRPLIETNGETGEIVWDKGRDFATVRKVLSMPQVNIVKKTEVQTGGFSKESILPKRNSDKLIARKKDWDPKKYGGFDSPTVAYSVLVVAKVEKGKSKKLKSVKELLGITIMERSSFEKNPIDFLEAKGYKEVKKDLIIKLPKYSLFELENGRKRMLASAGELQKGNELALPSKYVNFLYLASHYEKLKGSPEDNEQKQLFVEQHKHYLDEIIEQISEFSKRVILADANLDKVLSAYNKHRDKPIREQAENIIHLFTLTNLGAPAAFKYFDTTIDRKRYTSTKEVLDATLIHQSITGLYETRIDLSQLGGDGGEAAAKPAPGGTVSLQDEHRLFDIPVTTSLPDVWLQDFPQAWAETGGLGRAKCQAPIIIDLKPTAVPVSIKQYPMSLEAHMGIRQHIIKFLELGVLRPCRSPWNTPLLPVKKPGTQDYRPVQDLREINKRTVDIHPTVPNPYNLLSTLKPDYSWYTVLDLKDAFFCLPLAPQSQELFAFEWKDPERGISGQLTWTRLPQGFKNSPTLFNEALHRDLTDFRTQHPEVTLLQYVDDLLLAAPTKKACTQGTRHLLQELGEKGYRASAKKAQICQTKVTYLGYILSEGKRWLTPGRIETVARIPPPRNPREVREFLGTAGFCRLWIPGFAELAAPLYALTKPSTPFTWQTEHQLAFEALKKALLSAPALGLPDTSKPFTLFLDERQGIAKGVLTQKLGPWKRPVAYLSKKLDPVAAGWPPCLRIMAATAMLVKDSAKLTLGQPLTVITPHTLEAIVRQPPDRWITNARLTHYQALLLDTDRVQFGPPVTLNPATLLPVPENQPSPHDCRQVLAETHGTREDLKDQELPDADHTWYTDGSSYLDSGTRRAGAAVVDGHNTIWAQSLPPGTSAQKAELIALTKALELSKGKKANIYTDSRYAFATAHTHGSIYERRGWLTSEGKEIKNKAEIIALLKALFLPQEVAIIHCPGHQKGQDPVAVGNRQADRVARQAAMAEVLTLATEPDNTSHITAGKRTADGSEFEKRTADGSEFESPKKKAKVE

SEQ ID NO: 1545 - protein, 2094 aa, synthetic construct
MPAAKRVKLDGGDKKYSIGLDIGTNSVGWAVITDEYKVPSKKFKVLGNTDRHSIKKNLIGALLFDSGETAEATRLKRTARRRYTRRKNRICYLQEIFSNEMAKVDDSFFHRLEESFLVEEDKKHERHPIFGNIVDEVAYHEKYPTIYHLRKKLVDSTDKADLRLIYLALAHMIKFRGHFLIEGDLNPDNSDVDKLFIQLVQTYNQLFEENPINASGVDAKAILSARLSKSRRLENLIAQLPGEKKNGLFGNLIALSLGLTPNFKSNFDLAEDAKLQLSKDTYDDDLDNLLAQIGDQYADLFLAAKNLSDAILLSDILRVNTEITKAPLSASMIKRYDEHHQDLTLLKALVRQQLPEKYKEIFFDQSKNGYAGYIDGGASQEEFYKFIKPILEKMDGTEELLVKLNREDLLRKQRTFDNGSIPHQIHLGELHAILRRQEDFYPFLKDNREKIEKILTFRIPYYVGPLARGNSRFAWMTRKSEETITPWNFEEVVDKGASAQSFIERMTNFDKNLPNEKVLPKHSLLYEYFTVYNELTKVKYVTEGMRKPAFLSGEQKKAIVDLLFKTNRKVTVKQLKEDYFKKIECFDSVEISGVEDRFNASLGTYHDLLKIIKDKDFLDNEENEDILEDIVLTLTLFEDREMIEERLKTYAHLFDDKVMKQLKRRRYTGWGRLSRKLINGIRDKQSGKTILDFLKSDGFANRNFMQLIHDDSLTFKEDIQKAQVSGQGDSLHEHIANLAGSPAIKKGILQTVKVVDELVKVMGRHKPENIVIEMARENQTTQKGQKNSRERMKRIEEGIKELGSQILKEHPVENTQLQNEKLYLYYLQNGRDMYVDQELDINRLSDYDVDHIVPQSFLKDDSIDNKVLTRSDKARGKSDNVPSEEVVKKMKNYWRQLLNAKLITQRKFDNLTKAERGGLSELDKAGFIKRQLVETRQITKHVAQILDSRMNTKYDENDKLIREVKVITLKSKLVSDFRKDFQFYKVREINNYHHAHDAYLNAVVGTALIKKYPKLESEFVYGDYKVYDVRKMIAKSEQEIGKATAKYFFYSNIMNFFKTEITLANGEIRKRPLIETNGETGEIVWDKGRDFATVRKVLSMPQVNIVKKTEVQTGGFSKESILPKRNSDKLIARKKDWDPKKYGGFDSPTVAYSVLVVAKVEKGKSKKLKSVKELLGITIMERSSFEKNPIDFLEAKGYKEVKKDLIIKLPKYSLFELENGRKRMLASAGELQKGNELALPSKYVNFLYLASHYEKLKGSPEDNEQKQLFVEQHKHYLDEIIEQISEFSKRVILADANLDKVLSAYNKHRDKPIREQAENIIHLFTLTNLGAPAAFKYFDTTIDRKRYTSTKEVLDATLIHQSITGLYETRIDLSQLGGDGGGSSGGTVSLQDEHRLFDIPVTTSLPDVWLQDFPQAWAETGGLGRAKCQAPIIIDLKPTAVPVSIKQYPMSLEAHMGIRQHIIKFLELGVLRPCRSPWNTPLLPVKKPGTQDYRPVQDLREINKRTVDIHPTVPNPYNLLSTLKPDYSWYTVLDLKDAFFCLPLAPQSQELFAFEWKDPERGISGQLTWTRLPQGFKNSPTLFNEALHRDLTDFRTQHPEVTLLQYVDDLLLAAPTKKACTQGTRHLLQELGEKGYRASAKKAQICQTKVTYLGYILSEGKRWLTPGRIETVARIPPPRNPREVREFLGTAGFCRLWIPGFAELAAPLYALTKPSTPFTWQTEHQLAFEALKKALLSAPALGLPDTSKPFTLFLDERQGIAKGVLTQKLGPWKRPVAYLSKKLDPVAAGWPPCLRIMAATAMLVKDSAKLTLGQPLTVITPHTLEAIVRQPPDRWITNARLTHYQALLLDTDRVQFGPPVTLNPATLLPVPENQPSPHDCRQVLAETHGTREDLKDQELPDADHTWYTDGSSYLDSGTRRAGAAVVDGHNTIWAQSLPPGTSAQKAELIALTKALELSKGKKANIYTDSRYAFATAHTHGSIYERRGWLTSEGKEIKNKAEIIALLKALFLPQEVAIIHCPGHQKGQDPVAVGNRQADRVARQAAMAEVLTLATEPDNTSHITAGKRTADGSEFEKRTADGSEFESPKKKAKVE

SEQ ID NO: 1546 - protein, 2116 aa, synthetic construct
MPAAKRVKLDGGDKKYSIGLDIGTNSVGWAVITDEYKVPSKKFKVLGNTDRHSIKKNLIGALLFDSGETAEATRLKRTARRRYTRRKNRICYLQEIFSNEMAKVDDSFFHRLEESFLVEEDKKHERHPIFGNIVDEVAYHEKYPTIYHLRKKLVDSTDKADLRLIYLALAHMIKFRGHFLIEGDLNPDNSDVDKLFIQLVQTYNQLFEENPINASGVDAKAILSARLSKSRRLENLIAQLPGEKKNGLFGNLIALSLGLTPNFKSNFDLAEDAKLQLSKDTYDDDLDNLLAQIGDQYADLFLAAKNLSDAILLSDILRVNTEITKAPLSASMIKRYDEHHQDLTLLKALVRQQLPEKYKEIFFDQSKNGYAGYIDGGASQEEFYKFIKPILEKMDGTEELLVKLNREDLLRKQRTFDNGSIPHQIHLGELHAILRRQEDFYPFLKDNREKIEKILTFRIPYYVGPLARGNSRFAWMTRKSEETITPWNFEEVVDKGASAQSFIERMTNFDKNLPNEKVLPKHSLLYEYFTVYNELTKVKYVTEGMRKPAFLSGEQKKAIVDLLFKTNRKVTVKQLKEDYFKKIECFDSVEISGVEDRFNASLGTYHDLLKIIKDKDFLDNEENEDILEDIVLTLTLFEDREMIEERLKTYAHLFDDKVMKQLKRRRYTGWGRLSRKLINGIRDKQSGKTILDFLKSDGFANRNFMQLIHDDSLTFKEDIQKAQVSGQGDSLHEHIANLAGSPAIKKGILQTVKVVDELVKVMGRHKPENIVIEMARENQTTQKGQKNSRERMKRIEEGIKELGSQILKEHPVENTQLQNEKLYLYYLQNGRDMYVDQELDINRLSDYDVDHIVPQSFLKDDSIDNKVLTRSDKARGKSDNVPSEEVVKKMKNYWRQLLNAKLITQRKFDNLTKAERGGLSELDKAGFIKRQLVETRQITKHVAQILDSRMNTKYDENDKLIREVKVITLKSKLVSDFRKDFQFYKVREINNYHHAHDAYLNAVVGTALIKKYPKLESEFVYGDYKVYDVRKMIAKSEQEIGKATAKYFFYSNIMNFFKTEITLANGEIRKRPLIETNGETGEIVWDKGRDFATVRKVLSMPQVNIVKKTEVQTGGFSKESILPKRNSDKLIARKKDWDPKKYGGFDSPTVAYSVLVVAKVEKGKSKKLKSVKELLGITIMERSSFEKNPIDFLEAKGYKEVKKDLIIKLPKYSLFELENGRKRMLASAGELQKGNELALPSKYVNFLYLASHYEKLKGSPEDNEQKQLFVEQHKHYLDEIIEQISEFSKRVILADANLDKVLSAYNKHRDKPIREQAENIIHLFTLTNLGAPAAFKYFDTTIDRKRYTSTKEVLDATLIHQSITGLYETRIDLSQLGGDGGEAAAKEAAAKEAAAKEAAAKEAAAKGGTVSLQDEHRLFDIPVTTSLPDVWLQDFPQAWAETGGLGRAKCQAPIIIDLKPTAVPVSIKQYPMSLEAHMGIRQHIIKFLELGVLRPCRSPWNTPLLPVKKPGTQDYRPVQDLREINKRTVDIHPTVPNPYNLLSTLKPDYSWYTVLDLKDAFFCLPLAPQSQELFAFEWKDPERGISGQLTWTRLPQGFKNSPTLFNEALHRDLTDFRTQHPEVTLLQYVDDLLLAAPTKKACTQGTRHLLQELGEKGYRASAKKAQICQTKVTYLGYILSEGKRWLTPGRIETVARIPPPRNPREVREFLGTAGFCRLWIPGFAELAAPLYALTKPSTPFTWQTEHQLAFEALKKALLSAPALGLPDTSKPFTLFLDERQGIAKGVLTQKLGPWKRPVAYLSKKLDPVAAGWPPCLRIMAATAMLVKDSAKLTLGQPLTVITPHTLEAIVRQPPDRWITNARLTHYQALLLDTDRVQFGPPVTLNPATLLPVPENQPSPHDCRQVLAETHGTREDLKDQELPDADHTWYTDGSSYLDSGTRRAGAAVVDGHNTIWAQSLPPGTSAQKAELIALTKALELSKGKKANIYTDSRYAFATAHTHGSIYERRGWLTSEGKEIKNKAEIIALLKALFLPQEVAIIHCPGHQKGQDPVAVGNRQADRVARQAAMAEVLTLATEPDNTSHITAGKRTADGSEFEKRTADGSEFESPKKKAKVE

SEQ ID NO: 1547 - protein, 2099 aa, synthetic construct
MPAAKRVKLDGGDKKYSIGLDIGTNSVGWAVITDEYKVPSKKFKVLGNTDRHSIKKNLIGALLFDSGETAEATRLKRTARRRYTRRKNRICYLQEIFSNEMAKVDDSFFHRLEESFLVEEDKKHERHPIFGNIVDEVAYHEKYPTIYHLRKKLVDSTDKADLRLIYLALAHMIKFRGHFLIEGDLNPDNSDVDKLFIQLVQTYNQLFEENPINASGVDAKAILSARLSKSRRLENLIAQLPGEKKNGLFGNLIALSLGLTPNFKSNFDLAEDAKLQLSKDTYDDDLDNLLAQIGDQYADLFLAAKNLSDAILLSDILRVNTEITKAPLSASMIKRYDEHHQDLTLLKALVRQQLPEKYKEIFFDQSKNGYAGYIDGGASQEEFYKFIKPILEKMDGTEELLVKLNREDLLRKQRTFDNGSIPHQIHLGELHAILRRQEDFYPFLKDNREKIEKILTFRIPYYVGPLARGNSRFAWMTRKSEETITPWNFEEVVDKGASAQSFIERMTNFDKNLPNEKVLPKHSLLYEYFTVYNELTKVKYVTEGMRKPAFLSGEQKKAIVDLLFKTNRKVTVKQLKEDYFKKIECFDSVEISGVEDRFNASLGTYHDLLKIIKDKDFLDNEENEDILEDIVLTLTLFEDREMIEERLKTYAHLFDDKVMKQLKRRRYTGWGRLSRKLINGIRDKQSGKTILDFLKSDGFANRNFMQLIHDDSLTFKEDIQKAQVSGQGDSLHEHIANLAGSPAIKKGILQTVKVVDELVKVMGRHKPENIVIEMARENQTTQKGQKNSRERMKRIEEGIKELGSQILKEHPVENTQLQNEKLYLYYLQNGRDMYVDQELDINRLSDYDVDHIVPQSFLKDDSIDNKVLTRSDKARGKSDNVPSEEVVKKMKNYWRQLLNAKLITQRKFDNLTKAERGGLSELDKAGFIKRQLVETRQITKHVAQILDSRMNTKYDENDKLIREVKVITLKSKLVSDFRKDFQFYKVREINNYHHAHDAYLNAVVGTALIKKYPKLESEFVYGDYKVYDVRKMIAKSEQEIGKATAKYFFYSNIMNFFKTEITLANGEIRKRPLIETNGETGEIVWDKGRDFATVRKVLSMPQVNIVKKTEVQTGGFSKESILPKRNSDKLIARKKDWDPKKYGGFDSPTVAYSVLVVAKVEKGKSKKLKSVKELLGITIMERSSFEKNPIDFLEAKGYKEVKKDLIIKLPKYSLFELENGRKRMLASAGELQKGNELALPSKYVNFLYLASHYEKLKGSPEDNEQKQLFVEQHKHYLDEIIEQISEFSKRVILADANLDKVLSAYNKHRDKPIREQAENIIHLFTLTNLGAPAAFKYFDTTIDRKRYTSTKEVLDATLIHQSITGLYETRIDLSQLGGDGGEAAAKGGGGGTVSLQDEHRLFDIPVTTSLPDVWLQDFPQAWAETGGLGRAKCQAPIIIDLKPTAVPVSIKQYPMSLEAHMGIRQHIIKFLELGVLRPCRSPWNTPLLPVKKPGTQDYRPVQDLREINKRTVDIHPTVPNPYNLLSTLKPDYSWYTVLDLKDAFFCLPLAPQSQELFAFEWKDPERGISGQLTWTRLPQGFKNSPTLFNEALHRDLTDFRTQHPEVTLLQYVDDLLLAAPTKKACTQGTRHLLQELGEKGYRASAKKAQICQTKVTYLGYILSEGKRWLTPGRIETVARIPPPRNPREVREFLGTAGFCRLWIPGFAELAAPLYALTKPSTPFTWQTEHQLAFEALKKALLSAPALGLPDTSKPFTLFLDERQGIAKGVLTQKLGPWKRPVAYLSKKLDPVAAGWPPCLRIMAATAMLVKDSAKLTLGQPLTVITPHTLEAIVRQPPDRWITNARLTHYQALLLDTDRVQFGPPVTLNPATLLPVPENQPSPHDCRQVLAETHGTREDLKDQELPDADHTWYTDGSSYLDSGTRRAGAAVVDGHNTIWAQSLPPGTSAQKAELIALTKALELSKGKKANIYTDSRYAFATAHTHGSIYERRGWLTSEGKEIKNKAEIIALLKALFLPQEVAIIHCPGHQKGQDPVAVGNRQADRVARQAAMAEVLTLATEPDNTSHITAGKRTADGSEFEKRTADGSEFESPKKKAKVE

SEQ ID NO: 1548 - protein, 2097 aa, synthetic construct
MPAAKRVKLDGGDKKYSIGLDIGTNSVGWAVITDEYKVPSKKFKVLGNTDRHSIKKNLIGALLFDSGETAEATRLKRTARRRYTRRKNRICYLQEIFSNEMAKVDDSFFHRLEESFLVEEDKKHERHPIFGNIVDEVAYHEKYPTIYHLRKKLVDSTDKADLRLIYLALAHMIKFRGHFLIEGDLNPDNSDVDKLFIQLVQTYNQLFEENPINASGVDAKAILSARLSKSRRLENLIAQLPGEKKNGLFGNLIALSLGLTPNFKSNFDLAEDAKLQLSKDTYDDDLDNLLAQIGDQYADLFLAAKNLSDAILLSDILRVNTEITKAPLSASMIKRYDEHHQDLTLLKALVRQQLPEKYKEIFFDQSKNGYAGYIDGGASQEEFYKFIKPILEKMDGTEELLVKLNREDLLRKQRTFDNGSIPHQIHLGELHAILRRQEDFYPFLKDNREKIEKILTFRIPYYVGPLARGNSRFAWMTRKSEETITPWNFEEVVDKGASAQSFIERMTNFDKNLPNEKVLPKHSLLYEYFTVYNELTKVKYVTEGMRKPAFLSGEQKKAIVDLLFKTNRKVTVKQLKEDYFKKIECFDSVEISGVEDRFNASLGTYHDLLKIIKDKDFLDNEENEDILEDIVLTLTLFEDREMIEERLKTYAHLFDDKVMKQLKRRRYTGWGRLSRKLINGIRDKQSGKTILDFLKSDGFANRNFMQLIHDDSLTFKEDIQKAQVSGQGDSLHEHIANLAGSPAIKKGILQTVKVVDELVKVMGRHKPENIVIEMARENQTTQKGQKNSRERMKRIEEGIKELGSQILKEHPVENTQLQNEKLYLYYLQNGRDMYVDQELDINRLSDYDVDHIVPQSFLKDDSIDNKVLTRSDKARGKSDNVPSEEVVKKMKNYWRQLLNAKLITQRKFDNLTKAERGGLSELDKAGFIKRQLVETRQITKHVAQILDSRMNTKYDENDKLIREVKVITLKSKLVSDFRKDFQFYKVREINNYHHAHDAYLNAVVGTALIKKYPKLESEFVYGDYKVYDVRKMIAKSEQEIGKATAKYFFYSNIMNFFKTEITLANGEIRKRPLIETNGETGEIVWDKGRDFATVRKVLSMPQVNIVKKTEVQTGGFSKESILPKRNSDKLIARKKDWDPKKYGGFDSPTVAYSVLVVAKVEKGKSKKLKSVKELLGITIMERSSFEKNPIDFLEAKGYKEVKKDLIIKLPKYSLFELENGRKRMLASAGELQKGNELALPSKYVNFLYLASHYEKLKGSPEDNEQKQLFVEQHKHYLDEIIEQISEFSKRVILADANLDKVLSAYNKHRDKPIREQAENIIHLFTLTNLGAPAAFKYFDTTIDRKRYTSTKEVLDATLIHQSITGLYETRIDLSQLGGDGGGSSGGGGGTVSLQDEHRLFDIPVTTSLPDVWLQDFPQAWAETGGLGRAKCQAPIIIDLKPTAVPVSIKQYPMSLEAHMGIRQHIIKFLELGVLRPCRSPWNTPLLPVKKPGTQDYRPVQDLREINKRTVDIHPTVPNPYNLLSTLKPDYSWYTVLDLKDAFFCLPLAPQSQELFAFEWKDPERGISGQLTWTRLPQGFKNSPTLFNEALHRDLTDFRTQHPEVTLLQYVDDLLLAAPTKKACTQGTRHLLQELGEKGYRASAKKAQICQTKVTYLGYILSEGKRWLTPGRIETVARIPPPRNPREVREFLGTAGFCRLWIPGFAELAAPLYALTKPSTPFTWQTEHQLAFEALKKALLSAPALGLPDTSKPFTLFLDERQGIAKGVLTQKLGPWKRPVAYLSKKLDPVAAGWPPCLRIMAATAMLVKDSAKLTLGQPLTVITPHTLEAIVRQPPDRWITNARLTHYQALLLDTDRVQFGPPVTLNPATLLPVPENQPSPHDCRQVLAETHGTREDLKDQELPDADHTWYTDGSSYLDSGTRRAGAAVVDGHNTIWAQSLPPGTSAQKAELIALTKALELSKGKKANIYTDSRYAFATAHTHGSIYERRGWLTSEGKEIKNKAEIIALLKALFLPQEVAIIHCPGHQKGQDPVAVGNRQADRVARQAAMAEVLTLATEPDNTSHITAGKRTADGSEFEKRTADGSEFESPKKKAKVE

SEQ ID NO: 1549 - protein, 2102 aa, synthetic construct
MPAAKRVKLDGGDKKYSIGLDIGTNSVGWAVITDEYKVPSKKFKVLGNTDRHSIKKNLIGALLFDSGETAEATRLKRTARRRYTRRKNRICYLQEIFSNEMAKVDDSFFHRLEESFLVEEDKKHERHPIFGNIVDEVAYHEKYPTIYHLRKKLVDSTDKADLRLIYLALAHMIKFRGHFLIEGDLNPDNSDVDKLFIQLVQTYNQLFEENPINASGVDAKAILSARLSKSRRLENLIAQLPGEKKNGLFGNLIALSLGLTPNFKSNFDLAEDAKLQLSKDTYDDDLDNLLAQIGDQYADLFLAAKNLSDAILLSDILRVNTEITKAPLSASMIKRYDEHHQDLTLLKALVRQQLPEKYKEIFFDQSKNGYAGYIDGGASQEEFYKFIKPILEKMDGTEELLVKLNREDLLRKQRTFDNGSIPHQIHLGELHAILRRQEDFYPFLKDNREKIEKILTFRIPYYVGPLARGNSRFAWMTRKSEETITPWNFEEVVDKGASAQSFIERMTNFDKNLPNEKVLPKHSLLYEYFTVYNELTKVKYVTEGMRKPAFLSGEQKKAIVDLLFKTNRKVTVKQLKEDYFKKIECFDSVEISGVEDRFNASLGTYHDLLKIIKDKDFLDNEENEDILEDIVLTLTLFEDREMIEERLKTYAHLFDDKVMKQLKRRRYTGWGRLSRKLINGIRDKQSGKTILDFLKSDGFANRNFMQLIHDDSLTFKEDIQKAQVSGQGDSLHEHIANLAGSPAIKKGILQTVKVVDELVKVMGRHKPENIVIEMARENQTTQKGQKNSRERMKRIEEGIKELGSQILKEHPVENTQLQNEKLYLYYLQNGRDMYVDQELDINRLSDYDVDHIVPQSFLKDDSIDNKVLTRSDKARGKSDNVPSEEVVKKMKNYWRQLLNAKLITQRKFDNLTKAERGGLSELDKAGFIKRQLVETRQITKHVAQILDSRMNTKYDENDKLIREVKVITLKSKLVSDFRKDFQFYKVREINNYHHAHDAYLNAVVGTALIKKYPKLESEFVYGDYKVYDVRKMIAKSEQEIGKATAKYFFYSNIMNFFKTEITLANGEIRKRPLIETNGETGEIVWDKGRDFATVRKVLSMPQVNIVKKTEVQTGGFSKESILPKRNSDKLIARKKDWDPKKYGGFDSPTVAYSVLVVAKVEKGKSKKLKSVKELLGITIMERSSFEKNPIDFLEAKGYKEVKKDLIIKLPKYSLFELENGRKRMLASAGELQKGNELALPSKYVNFLYLASHYEKLKGSPEDNEQKQLFVEQHKHYLDEIIEQISEFSKRVILADANLDKVLSAYNKHRDKPIREQAENIIHLFTLTNLGAPAAFKYFDTTIDRKRYTSTKEVLDATLIHQSITGLYETRIDLSQLGGDGGGGSGSSEAAAKGGTVSLQDEHRLFDIPVTTSLPDVWLQDFPQAWAETGGLGRAKCQAPIIIDLKPTAVPVSIKQYPMSLEAHMGIRQHIIKFLELGVLRPCRSPWNTPLLPVKKPGTQDYRPVQDLREINKRTVDIHPTVPNPYNLLSTLKPDYSWYTVLDLKDAFFCLPLAPQSQELFAFEWKDPERGISGQLTWTRLPQGFKNSPTLFNEALHRDLTDFRTQHPEVTLLQYVDDLLLAAPTKKACTQGTRHLLQELGEKGYRASAKKAQICQTKVTYLGYILSEGKRWLTPGRIETVARIPPPRNPREVREFLGTAGFCRLWIPGFAELAAPLYALTKPSTPFTWQTEHQLAFEALKKALLSAPALGLPDTSKPFTLFLDERQGIAKGVLTQKLGPWKRPVAYLSKKLDPVAAGWPPCLRIMAATAMLVKDSAKLTLGQPLTVITPHTLEAIVRQPPDRWITNARLTHYQALLLDTDRVQFGPPVTLNPATLLPVPENQPSPHDCRQVLAETHGTREDLKDQELPDADHTWYTDGSSYLDSGTRRAGAAVVDGHNTIWAQSLPPGTSAQKAELIALTKALELSKGKKANIYTDSRYAFATAHTHGSIYERRGWLTSEGKEIKNKAEIIALLKALFLPQEVAIIHCPGHQKGQDPVAVGNRQADRVARQAAMAEVLTLATEPDNTSHITAGKRTADGSEFEKRTADGSEFESPKKKAKVE

SEQ ID NO: 1550 - protein, 2100 aa, synthetic construct
MPAAKRVKLDGGDKKYSIGLDIGTNSVGWAVITDEYKVPSKKFKVLGNTDRHSIKKNLIGALLFDSGETAEATRLKRTARRRYTRRKNRICYLQEIFSNEMAKVDDSFFHRLEESFLVEEDKKHERHPIFGNIVDEVAYHEKYPTIYHLRKKLVDSTDKADLRLIYLALAHMIKFRGHFLIEGDLNPDNSDVDKLFIQLVQTYNQLFEENPINASGVDAKAILSARLSKSRRLENLIAQLPGEKKNGLFGNLIALSLGLTPNFKSNFDLAEDAKLQLSKDTYDDDLDNLLAQIGDQYADLFLAAKNLSDAILLSDILRVNTEITKAPLSASMIKRYDEHHQDLTLLKALVRQQLPEKYKEIFFDQSKNGYAGYIDGGASQEEFYKFIKPILEKMDGTEELLVKLNREDLLRKQRTFDNGSIPHQIHLGELHAILRRQEDFYPFLKDNREKIEKILTFRIPYYVGPLARGNSRFAWMTRKSEETITPWNFEEVVDKGASAQSFIERMTNFDKNLPNEKVLPKHSLLYEYFTVYNELTKVKYVTEGMRKPAFLSGEQKKAIVDLLFKTNRKVTVKQLKEDYFKKIECFDSVEISGVEDRFNASLGTYHDLLKIIKDKDFLDNEENEDILEDIVLTLTLFEDREMIEERLKTYAHLFDDKVMKQLKRRRYTGWGRLSRKLINGIRDKQSGKTILDFLKSDGFANRNFMQLIHDDSLTFKEDIQKAQVSGQGDSLHEHIANLAGSPAIKKGILQTVKVVDELVKVMGRHKPENIVIEMARENQTTQKGQKNSRERMKRIEEGIKELGSQILKEHPVENTQLQNEKLYLYYLQNGRDMYVDQELDINRLSDYDVDHIVPQSFLKDDSIDNKVLTRSDKARGKSDNVPSEEVVKKMKNYWRQLLNAKLITQRKFDNLTKAERGGLSELDKAGFIKRQLVETRQITKHVAQILDSRMNTKYDENDKLIREVKVITLKSKLVSDFRKDFQFYKVREINNYHHAHDAYLNAVVGTALIKKYPKLESEFVYGDYKVYDVRKMIAKSEQEIGKATAKYFFYSNIMNFFKTEITLANGEIRKRPLIETNGETGEIVWDKGRDFATVRKVLSMPQVNIVKKTEVQTGGFSKESILPKRNSDKLIARKKDWDPKKYGGFDSPTVAYSVLVVAKVEKGKSKKLKSVKELLGITIMERSSFEKNPIDFLEAKGYKEVKKDLIIKLPKYSLFELENGRKRMLASAGELQKGNELALPSKYVNFLYLASHYEKLKGSPEDNEQKQLFVEQHKHYLDEIIEQISEFSKRVILADANLDKVLSAYNKHRDKPIREQAENIIHLFTLTNLGAPAAFKYFDTTIDRKRYTSTKEVLDATLIHQSITGLYETRIDLSQLGGDGGGGSGSSGGGGGTVSLQDEHRLFDIPVTTSLPDVWLQDFPQAWAETGGLGRAKCQAPIIIDLKPTAVPVSIKQYPMSLEAHMGIRQHIIKFLELGVLRPCRSPWNTPLLPVKKPGTQDYRPVQDLREINKRTVDIHPTVPNPYNLLSTLKPDYSWYTVLDLKDAFFCLPLAPQSQELFAFEWKDPERGISGQLTWTRLPQGFKNSPTLFNEALHRDLTDFRTQHPEVTLLQYVDDLLLAAPTKKACTQGTRHLLQELGEKGYRASAKKAQICQTKVTYLGYILSEGKRWLTPGRIETVARIPPPRNPREVREFLGTAGFCRLWIPGFAELAAPLYALTKPSTPFTWQTEHQLAFEALKKALLSAPALGLPDTSKPFTLFLDERQGIAKGVLTQKLGPWKRPVAYLSKKLDPVAAGWPPCLRIMAATAMLVKDSAKLTLGQPLTVITPHTLEAIVRQPPDRWITNARLTHYQALLLDTDRVQFGPPVTLNPATLLPVPENQPSPHDCRQVLAETHGTREDLKDQELPDADHTWYTDGSSYLDSGTRRAGAAVVDGHNTIWAQSLPPGTSAQKAELIALTKALELSKGKKANIYTDSRYAFATAHTHGSIYERRGWLTSEGKEIKNKAEIIALLKALFLPQEVAIIHCPGHQKGQDPVAVGNRQADRVARQAAMAEVLTLATEPDNTSHITAGKRTADGSEFEKRTADGSEFESPKKKAKVE

SEQ ID NO: 1551 - protein, 2100 aa, synthetic construct
MPAAKRVKLDGGDKKYSIGLDIGTNSVGWAVITDEYKVPSKKFKVLGNTDRHSIKKNLIGALLFDSGETAEATRLKRTARRRYTRRKNRICYLQEIFSNEMAKVDDSFFHRLEESFLVEEDKKHERHPIFGNIVDEVAYHEKYPTIYHLRKKLVDSTDKADLRLIYLALAHMIKFRGHFLIEGDLNPDNSDVDKLFIQLVQTYNQLFEENPINASGVDAKAILSARLSKSRRLENLIAQLPGEKKNGLFGNLIALSLGLTPNFKSNFDLAEDAKLQLSKDTYDDDLDNLLAQIGDQYADLFLAAKNLSDAILLSDILRVNTEITKAPLSASMIKRYDEHHQDLTLLKALVRQQLPEKYKEIFFDQSKNGYAGYIDGGASQEEFYKFIKPILEKMDGTEELLVKLNREDLLRKQRTFDNGSIPHQIHLGELHAILRRQEDFYPFLKDNREKIEKILTFRIPYYVGPLARGNSRFAWMTRKSEETITPWNFEEVVDKGASAQSFIERMTNFDKNLPNEKVLPKHSLLYEYFTVYNELTKVKYVTEGMRKPAFLSGEQKKAIVDLLFKTNRKVTVKQLKEDYFKKIECFDSVEISGVEDRFNASLGTYHDLLKIIKDKDFLDNEENEDILEDIVLTLTLFEDREMIEERLKTYAHLFDDKVMKQLKRRRYTGWGRLSRKLINGIRDKQSGKTILDFLKSDGFANRNFMQLIHDDSLTFKEDIQKAQVSGQGDSLHEHIANLAGSPAIKKGILQTVKVVDELVKVMGRHKPENIVIEMARENQTTQKGQKNSRERMKRIEEGIKELGSQILKEHPVENTQLQNEKLYLYYLQNGRDMYVDQELDINRLSDYDVDHIVPQSFLKDDSIDNKVLTRSDKARGKSDNVPSEEVVKKMKNYWRQLLNAKLITQRKFDNLTKAERGGLSELDKAGFIKRQLVETRQITKHVAQILDSRMNTKYDENDKLIREVKVITLKSKLVSDFRKDFQFYKVREINNYHHAHDAYLNAVVGTALIKKYPKLESEFVYGDYKVYDVRKMIAKSEQEIGKATAKYFFYSNIMNFFKTEITLANGEIRKRPLIETNGETGEIVWDKGRDFATVRKVLSMPQVNIVKKTEVQTGGFSKESILPKRNSDKLIARKKDWDPKKYGGFDSPTVAYSVLVVAKVEKGKSKKLKSVKELLGITIMERSSFEKNPIDFLEAKGYKEVKKDLIIKLPKYSLFELENGRKRMLASAGELQKGNELALPSKYVNFLYLASHYEKLKGSPEDNEQKQLFVEQHKHYLDEIIEQISEFSKRVILADANLDKVLSAYNKHRDKPIREQAENIIHLFTLTNLGAPAAFKYFDTTIDRKRYTSTKEVLDATLIHQSITGLYETRIDLSQLGGDGGGGSGSSPAPGGTVSLQDEHRLFDIPVTTSLPDVWLQDFPQAWAETGGLGRAKCQAPIIIDLKPTAVPVSIKQYPMSLEAHMGIRQHIIKFLELGVLRPCRSPWNTPLLPVKKPGTQDYRPVQDLREINKRTVDIHPTVPNPYNLLSTLKPDYSWYTVLDLKDAFFCLPLAPQSQELFAFEWKDPERGISGQLTWTRLPQGFKNSPTLFNEALHRDLTDFRTQHPEVTLLQYVDDLLLAAPTKKACTQGTRHLLQELGEKGYRASAKKAQICQTKVTYLGYILSEGKRWLTPGRIETVARIPPPRNPREVREFLGTAGFCRLWIPGFAELAAPLYALTKPSTPFTWQTEHQLAFEALKKALLSAPALGLPDTSKPFTLFLDERQGIAKGVLTQKLGPWKRPVAYLSKKLDPVAAGWPPCLRIMAATAMLVKDSAKLTLGQPLTVITPHTLEAIVRQPPDRWITNARLTHYQALLLDTDRVQFGPPVTLNPATLLPVPENQPSPHDCRQVLAETHGTREDLKDQELPDADHTWYTDGSSYLDSGTRRAGAAVVDGHNTIWAQSLPPGTSAQKAELIALTKALELSKGKKANIYTDSRYAFATAHTHGSIYERRGWLTSEGKEIKNKAEIIALLKALFLPQEVAIIHCPGHQKGQDPVAVGNRQADRVARQAAMAEVLTLATEPDNTSHITAGKRTADGSEFEKRTADGSEFESPKKKAKVE

SEQ ID NO: 1552 - protein, 2111 aa, synthetic construct
MPAAKRVKLDGGDKKYSIGLDIGTNSVGWAVITDEYKVPSKKFKVLGNTDRHSIKKNLIGALLFDSGETAEATRLKRTARRRYTRRKNRICYLQEIFSNEMAKVDDSFFHRLEESFLVEEDKKHERHPIFGNIVDEVAYHEKYPTIYHLRKKLVDSTDKADLRLIYLALAHMIKFRGHFLIEGDLNPDNSDVDKLFIQLVQTYNQLFEENPINASGVDAKAILSARLSKSRRLENLIAQLPGEKKNGLFGNLIALSLGLTPNFKSNFDLAEDAKLQLSKDTYDDDLDNLLAQIGDQYADLFLAAKNLSDAILLSDILRVNTEITKAPLSASMIKRYDEHHQDLTLLKALVRQQLPEKYKEIFFDQSKNGYAGYIDGGASQEEFYKFIKPILEKMDGTEELLVKLNREDLLRKQRTFDNGSIPHQIHLGELHAILRRQEDFYPFLKDNREKIEKILTFRIPYYVGPLARGNSRFAWMTRKSEETITPWNFEEVVDKGASAQSFIERMTNFDKNLPNEKVLPKHSLLYEYFTVYNELTKVKYVTEGMRKPAFLSGEQKKAIVDLLFKTNRKVTVKQLKEDYFKKIECFDSVEISGVEDRFNASLGTYHDLLKIIKDKDFLDNEENEDILEDIVLTLTLFEDREMIEERLKTYAHLFDDKVMKQLKRRRYTGWGRLSRKLINGIRDKQSGKTILDFLKSDGFANRNFMQLIHDDSLTFKEDIQKAQVSGQGDSLHEHIANLAGSPAIKKGILQTVKVVDELVKVMGRHKPENIVIEMARENQTTQKGQKNSRERMKRIEEGIKELGSQILKEHPVENTQLQNEKLYLYYLQNGRDMYVDQELDINRLSDYDVDHIVPQSFLKDDSIDNKVLTRSDKARGKSDNVPSEEVVKKMKNYWRQLLNAKLITQRKFDNLTKAERGGLSELDKAGFIKRQLVETRQITKHVAQILDSRMNTKYDENDKLIREVKVITLKSKLVSDFRKDFQFYKVREINNYHHAHDAYLNAVVGTALIKKYPKLESEFVYGDYKVYDVRKMIAKSEQEIGKATAKYFFYSNIMNFFKTEITLANGEIRKRPLIETNGETGEIVWDKGRDFATVRKVLSMPQVNIVKKTEVQTGGFSKESILPKRNSDKLIARKKDWDPKKYGGFDSPTVAYSVLVVAKVEKGKSKKLKSVKELLGITIMERSSFEKNPIDFLEAKGYKEVKKDLIIKLPKYSLFELENGRKRMLASAGELQKGNELALPSKYVNFLYLASHYEKLKGSPEDNEQKQLFVEQHKHYLDEIIEQISEFSKRVILADANLDKVLSAYNKHRDKPIREQAENIIHLFTLTNLGAPAAFKYFDTTIDRKRYTSTKEVLDATLIHQSITGLYETRIDLSQLGGDGGGGGGSGGGGSGGGGSGGGGSGGTVSLQDEHRLFDIPVTTSLPDVWLQDFPQAWAETGGLGRAKCQAPIIIDLKPTAVPVSIKQYPMSLEAHMGIRQHIIKFLELGVLRPCRSPWNTPLLPVKKPGTQDYRPVQDLREINKRTVDIHPTVPNPYNLLSTLKPDYSWYTVLDLKDAFFCLPLAPQSQELFAFEWKDPERGISGQLTWTRLPQGFKNSPTLFNEALHRDLTDFRTQHPEVTLLQYVDDLLLAAPTKKACTQGTRHLLQELGEKGYRASAKKAQICQTKVTYLGYILSEGKRWLTPGRIETVARIPPPRNPREVREFLGTAGFCRLWIPGFAELAAPLYALTKPSTPFTWQTEHQLAFEALKKALLSAPALGLPDTSKPFTLFLDERQGIAKGVLTQKLGPWKRPVAYLSKKLDPVAAGWPPCLRIMAATAMLVKDSAKLTLGQPLTVITPHTLEAIVRQPPDRWITNARLTHYQALLLDTDRVQFGPPVTLNPATLLPVPENQPSPHDCRQVLAETHGTREDLKDQELPDADHTWYTDGSSYLDSGTRRAGAAVVDGHNTIWAQSLPPGTSAQKAELIALTKALELSKGKKANIYTDSRYAFATAHTHGSIYERRGWLTSEGKEIKNKAEIIALLKALFLPQEVAIIHCPGHQKGQDPVAVGNRQADRVARQAAMAEVLTLATEPDNTSHITAGKRTADGSEFEKRTADGSEFESPKKKAKVE

SEQ ID NO: 1553 - protein, 2106 aa, synthetic construct
MPAAKRVKLDGGDKKYSIGLDIGTNSVGWAVITDEYKVPSKKFKVLGNTDRHSIKKNLIGALLFDSGETAEATRLKRTARRRYTRRKNRICYLQEIFSNEMAKVDDSFFHRLEESFLVEEDKKHERHPIFGNIVDEVAYHEKYPTIYHLRKKLVDSTDKADLRLIYLALAHMIKFRGHFLIEGDLNPDNSDVDKLFIQLVQTYNQLFEENPINASGVDAKAILSARLSKSRRLENLIAQLPGEKKNGLFGNLIALSLGLTPNFKSNFDLAEDAKLQLSKDTYDDDLDNLLAQIGDQYADLFLAAKNLSDAILLSDILRVNTEITKAPLSASMIKRYDEHHQDLTLLKALVRQQLPEKYKEIFFDQSKNGYAGYIDGGASQEEFYKFIKPILEKMDGTEELLVKLNREDLLRKQRTFDNGSIPHQIHLGELHAILRRQEDFYPFLKDNREKIEKILTFRIPYYVGPLARGNSRFAWMTRKSEETITPWNFEEVVDKGASAQSFIERMTNFDKNLPNEKVLPKHSLLYEYFTVYNELTKVKYVTEGMRKPAFLSGEQKKAIVDLLFKTNRKVTVKQLKEDYFKKIECFDSVEISGVEDRFNASLGTYHDLLKIIKDKDFLDNEENEDILEDIVLTLTLFEDREMIEERLKTYAHLFDDKVMKQLKRRRYTGWGRLSRKLINGIRDKQSGKTILDFLKSDGFANRNFMQLIHDDSLTFKEDIQKAQVSGQGDSLHEHIANLAGSPAIKKGILQTVKVVDELVKVMGRHKPENIVIEMARENQTTQKGQKNSRERMKRIEEGIKELGSQILKEHPVENTQLQNEKLYLYYLQNGRDMYVDQELDINRLSDYDVDHIVPQSFLKDDSIDNKVLTRSDKARGKSDNVPSEEVVKKMKNYWRQLLNAKLITQRKFDNLTKAERGGLSELDKAGFIKRQLVETRQITKHVAQILDSRMNTKYDENDKLIREVKVITLKSKLVSDFRKDFQFYKVREINNYHHAHDAYLNAVVGTALIKKYPKLESEFVYGDYKVYDVRKMIAKSEQEIGKATAKYFFYSNIMNFFKTEITLANGEIRKRPLIETNGETGEIVWDKGRDFATVRKVLSMPQVNIVKKTEVQTGGFSKESILPKRNSDKLIARKKDWDPKKYGGFDSPTVAYSVLVVAKVEKGKSKKLKSVKELLGITIMERSSFEKNPIDFLEAKGYKEVKKDLIIKLPKYSLFELENGRKRMLASAGELQKGNELALPSKYVNFLYLASHYEKLKGSPEDNEQKQLFVEQHKHYLDEIIEQISEFSKRVILADANLDKVLSAYNKHRDKPIREQAENIIHLFTLTNLGAPAAFKYFDTTIDRKRYTSTKEVLDATLIHQSITGLYETRIDLSQLGGDGGGSSGSSGSSGSSGSSGGTVSLQDEHRLFDIPVTTSLPDVWLQDFPQAWAETGGLGRAKCQAPIIIDLKPTAVPVSIKQYPMSLEAHMGIRQHIIKFLELGVLRPCRSPWNTPLLPVKKPGTQDYRPVQDLREINKRTVDIHPTVPNPYNLLSTLKPDYSWYTVLDLKDAFFCLPLAPQSQELFAFEWKDPERGISGQLTWTRLPQGFKNSPTLFNEALHRDLTDFRTQHPEVTLLQYVDDLLLAAPTKKACTQGTRHLLQELGEKGYRASAKKAQICQTKVTYLGYILSEGKRWLTPGRIETVARIPPPRNPREVREFLGTAGFCRLWIPGFAELAAPLYALTKPSTPFTWQTEHQLAFEALKKALLSAPALGLPDTSKPFTLFLDERQGIAKGVLTQKLGPWKRPVAYLSKKLDPVAAGWPPCLRIMAATAMLVKDSAKLTLGQPLTVITPHTLEAIVRQPPDRWITNARLTHYQALLLDTDRVQFGPPVTLNPATLLPVPENQPSPHDCRQVLAETHGTREDLKDQELPDADHTWYTDGSSYLDSGTRRAGAAVVDGHNTIWAQSLPPGTSAQKAELIALTKALELSKGKKANIYTDSRYAFATAHTHGSIYERRGWLTSEGKEIKNKAEIIALLKALFLPQEVAIIHCPGHQKGQDPVAVGNRQADRVARQAAMAEVLTLATEPDNTSHITAGKRTADGSEFEKRTADGSEFESPKKKAKVE

SEQ ID NO: 1554 - protein, 2097 aa, synthetic construct
MPAAKRVKLDGGDKKYSIGLDIGTNSVGWAVITDEYKVPSKKFKVLGNTDRHSIKKNLIGALLFDSGETAEATRLKRTARRRYTRRKNRICYLQEIFSNEMAKVDDSFFHRLEESFLVEEDKKHERHPIFGNIVDEVAYHEKYPTIYHLRKKLVDSTDKADLRLIYLALAHMIKFRGHFLIEGDLNPDNSDVDKLFIQLVQTYNQLFEENPINASGVDAKAILSARLSKSRRLENLIAQLPGEKKNGLFGNLIALSLGLTPNFKSNFDLAEDAKLQLSKDTYDDDLDNLLAQIGDQYADLFLAAKNLSDAILLSDILRVNTEITKAPLSASMIKRYDEHHQDLTLLKALVRQQLPEKYKEIFFDQSKNGYAGYIDGGASQEEFYKFIKPILEKMDGTEELLVKLNREDLLRKQRTFDNGSIPHQIHLGELHAILRRQEDFYPFLKDNREKIEKILTFRIPYYVGPLARGNSRFAWMTRKSEETITPWNFEEVVDKGASAQSFIERMTNFDKNLPNEKVLPKHSLLYEYFTVYNELTKVKYVTEGMRKPAFLSGEQKKAIVDLLFKTNRKVTVKQLKEDYFKKIECFDSVEISGVEDRFNASLGTYHDLLKIIKDKDFLDNEENEDILEDIVLTLTLFEDREMIEERLKTYAHLFDDKVMKQLKRRRYTGWGRLSRKLINGIRDKQSGKTILDFLKSDGFANRNFMQLIHDDSLTFKEDIQKAQVSGQGDSLHEHIANLAGSPAIKKGILQTVKVVDELVKVMGRHKPENIVIEMARENQTTQKGQKNSRERMKRIEEGIKELGSQILKEHPVENTQLQNEKLYLYYLQNGRDMYVDQELDINRLSDYDVDHIVPQSFLKDDSIDNKVLTRSDKARGKSDNVPSEEVVKKMKNYWRQLLNAKLITQRKFDNLTKAERGGLSELDKAGFIKRQLVETRQITKHVAQILDSRMNTKYDENDKLIREVKVITLKSKLVSDFRKDFQFYKVREINNYHHAHDAYLNAVVGTALIKKYPKLESEFVYGDYKVYDVRKMIAKSEQEIGKATAKYFFYSNIMNFFKTEITLANGEIRKRPLIETNGETGEIVWDKGRDFATVRKVLSMPQVNIVKKTEVQTGGFSKESILPKRNSDKLIARKKDWDPKKYGGFDSPTVAYSVLVVAKVEKGKSKKLKSVKELLGITIMERSSFEKNPIDFLEAKGYKEVKKDLIIKLPKYSLFELENGRKRMLASAGELQKGNELALPSKYVNFLYLASHYEKLKGSPEDNEQKQLFVEQHKHYLDEIIEQISEFSKRVILADANLDKVLSAYNKHRDKPIREQAENIIHLFTLTNLGAPAAFKYFDTTIDRKRYTSTKEVLDATLIHQSITGLYETRIDLSQLGGDGGPAPGGSGGTVSLQDEHRLFDIPVTTSLPDVWLQDFPQAWAETGGLGRAKCQAPIIIDLKPTAVPVSIKQYPMSLEAHMGIRQHIIKFLELGVLRPCRSPWNTPLLPVKKPGTQDYRPVQDLREINKRTVDIHPTVPNPYNLLSTLKPDYSWYTVLDLKDAFFCLPLAPQSQELFAFEWKDPERGISGQLTWTRLPQGFKNSPTLFNEALHRDLTDFRTQHPEVTLLQYVDDLLLAAPTKKACTQGTRHLLQELGEKGYRASAKKAQICQTKVTYLGYILSEGKRWLTPGRIETVARIPPPRNPREVREFLGTAGFCRLWIPGFAELAAPLYALTKPSTPFTWQTEHQLAFEALKKALLSAPALGLPDTSKPFTLFLDERQGIAKGVLTQKLGPWKRPVAYLSKKLDPVAAGWPPCLRIMAATAMLVKDSAKLTLGQPLTVITPHTLEAIVRQPPDRWITNARLTHYQALLLDTDRVQFGPPVTLNPATLLPVPENQPSPHDCRQVLAETHGTREDLKDQELPDADHTWYTDGSSYLDSGTRRAGAAVVDGHNTIWAQSLPPGTSAQKAELIALTKALELSKGKKANIYTDSRYAFATAHTHGSIYERRGWLTSEGKEIKNKAEIIALLKALFLPQEVAIIHCPGHQKGQDPVAVGNRQADRVARQAAMAEVLTLATEPDNTSHITAGKRTADGSEFEKRTADGSEFESPKKKAKVE

SEQ ID NO: 1555 - protein, 2102 aa, synthetic construct
MPAAKRVKLDGGDKKYSIGLDIGTNSVGWAVITDEYKVPSKKFKVLGNTDRHSIKKNLIGALLFDSGETAEATRLKRTARRRYTRRKNRICYLQEIFSNEMAKVDDSFFHRLEESFLVEEDKKHERHPIFGNIVDEVAYHEKYPTIYHLRKKLVDSTDKADLRLIYLALAHMIKFRGHFLIEGDLNPDNSDVDKLFIQLVQTYNQLFEENPINASGVDAKAILSARLSKSRRLENLIAQLPGEKKNGLFGNLIALSLGLTPNFKSNFDLAEDAKLQLSKDTYDDDLDNLLAQIGDQYADLFLAAKNLSDAILLSDILRVNTEITKAPLSASMIKRYDEHHQDLTLLKALVRQQLPEKYKEIFFDQSKNGYAGYIDGGASQEEFYKFIKPILEKMDGTEELLVKLNREDLLRKQRTFDNGSIPHQIHLGELHAILRRQEDFYPFLKDNREKIEKILTFRIPYYVGPLARGNSRFAWMTRKSEETITPWNFEEVVDKGASAQSFIERMTNFDKNLPNEKVLPKHSLLYEYFTVYNELTKVKYVTEGMRKPAFLSGEQKKAIVDLLFKTNRKVTVKQLKEDYFKKIECFDSVEISGVEDRFNASLGTYHDLLKIIKDKDFLDNEENEDILEDIVLTLTLFEDREMIEERLKTYAHLFDDKVMKQLKRRRYTGWGRLSRKLINGIRDKQSGKTILDFLKSDGFANRNFMQLIHDDSLTFKEDIQKAQVSGQGDSLHEHIANLAGSPAIKKGILQTVKVVDELVKVMGRHKPENIVIEMARENQTTQKGQKNSRERMKRIEEGIKELGSQILKEHPVENTQLQNEKLYLYYLQNGRDMYVDQELDINRLSDYDVDHIVPQSFLKDDSIDNKVLTRSDKARGKSDNVPSEEVVKKMKNYWRQLLNAKLITQRKFDNLTKAERGGLSELDKAGFIKRQLVETRQITKHVAQILDSRMNTKYDENDKLIREVKVITLKSKLVSDFRKDFQFYKVREINNYHHAHDAYLNAVVGTALIKKYPKLESEFVYGDYKVYDVRKMIAKSEQEIGKATAKYFFYSNIMNFFKTEITLANGEIRKRPLIETNGETGEIVWDKGRDFATVRKVLSMPQVNIVKKTEVQTGGFSKESILPKRNSDKLIARKKDWDPKKYGGFDSPTVAYSVLVVAKVEKGKSKKLKSVKELLGITIMERSSFEKNPIDFLEAKGYKEVKKDLIIKLPKYSLFELENGRKRMLASAGELQKGNELALPSKYVNFLYLASHYEKLKGSPEDNEQKQLFVEQHKHYLDEIIEQISEFSKRVILADANLDKVLSAYNKHRDKPIREQAENIIHLFTLTNLGAPAAFKYFDTTIDRKRYTSTKEVLDATLIHQSITGLYETRIDLSQLGGDGGPAPGGSEAAAKGGTVSLQDEHRLFDIPVTTSLPDVWLQDFPQAWAETGGLGRAKCQAPIIIDLKPTAVPVSIKQYPMSLEAHMGIRQHIIKFLELGVLRPCRSPWNTPLLPVKKPGTQDYRPVQDLREINKRTVDIHPTVPNPYNLLSTLKPDYSWYTVLDLKDAFFCLPLAPQSQELFAFEWKDPERGISGQLTWTRLPQGFKNSPTLFNEALHRDLTDFRTQHPEVTLLQYVDDLLLAAPTKKACTQGTRHLLQELGEKGYRASAKKAQICQTKVTYLGYILSEGKRWLTPGRIETVARIPPPRNPREVREFLGTAGFCRLWIPGFAELAAPLYALTKPSTPFTWQTEHQLAFEALKKALLSAPALGLPDTSKPFTLFLDERQGIAKGVLTQKLGPWKRPVAYLSKKLDPVAAGWPPCLRIMAATAMLVKDSAKLTLGQPLTVITPHTLEAIVRQPPDRWITNARLTHYQALLLDTDRVQFGPPVTLNPATLLPVPENQPSPHDCRQVLAETHGTREDLKDQELPDADHTWYTDGSSYLDSGTRRAGAAVVDGHNTIWAQSLPPGTSAQKAELIALTKALELSKGKKANIYTDSRYAFATAHTHGSIYERRGWLTSEGKEIKNKAEIIALLKALFLPQEVAIIHCPGHQKGQDPVAVGNRQADRVARQAAMAEVLTLATEPDNTSHITAGKRTADGSEFEKRTADGSEFESPKKKAKVE

SEQ ID NO: 1556 - protein, 2097 aa, synthetic construct
MPAAKRVKLDGGDKKYSIGLDIGTNSVGWAVITDEYKVPSKKFKVLGNTDRHSIKKNLIGALLFDSGETAEATRLKRTARRRYTRRKNRICYLQEIFSNEMAKVDDSFFHRLEESFLVEEDKKHERHPIFGNIVDEVAYHEKYPTIYHLRKKLVDSTDKADLRLIYLALAHMIKFRGHFLIEGDLNPDNSDVDKLFIQLVQTYNQLFEENPINASGVDAKAILSARLSKSRRLENLIAQLPGEKKNGLFGNLIALSLGLTPNFKSNFDLAEDAKLQLSKDTYDDDLDNLLAQIGDQYADLFLAAKNLSDAILLSDILRVNTEITKAPLSASMIKRYDEHHQDLTLLKALVRQQLPEKYKEIFFDQSKNGYAGYIDGGASQEEFYKFIKPILEKMDGTEELLVKLNREDLLRKQRTFDNGSIPHQIHLGELHAILRRQEDFYPFLKDNREKIEKILTFRIPYYVGPLARGNSRFAWMTRKSEETITPWNFEEVVDKGASAQSFIERMTNFDKNLPNEKVLPKHSLLYEYFTVYNELTKVKYVTEGMRKPAFLSGEQKKAIVDLLFKTNRKVTVKQLKEDYFKKIECFDSVEISGVEDRFNASLGTYHDLLKIIKDKDFLDNEENEDILEDIVLTLTLFEDREMIEERLKTYAHLFDDKVMKQLKRRRYTGWGRLSRKLINGIRDKQSGKTILDFLKSDGFANRNFMQLIHDDSLTFKEDIQKAQVSGQGDSLHEHIANLAGSPAIKKGILQTVKVVDELVKVMGRHKPENIVIEMARENQTTQKGQKNSRERMKRIEEGIKELGSQILKEHPVENTQLQNEKLYLYYLQNGRDMYVDQELDINRLSDYDVDHIVPQSFLKDDSIDNKVLTRSDKARGKSDNVPSEEVVKKMKNYWRQLLNAKLITQRKFDNLTKAERGGLSELDKAGFIKRQLVETRQITKHVAQILDSRMNTKYDENDKLIREVKVITLKSKLVSDFRKDFQFYKVREINNYHHAHDAYLNAVVGTALIKKYPKLESEFVYGDYKVYDVRKMIAKSEQEIGKATAKYFFYSNIMNFFKTEITLANGEIRKRPLIETNGETGEIVWDKGRDFATVRKVLSMPQVNIVKKTEVQTGGFSKESILPKRNSDKLIARKKDWDPKKYGGFDSPTVAYSVLVVAKVEKGKSKKLKSVKELLGITIMERSSFEKNPIDFLEAKGYKEVKKDLIIKLPKYSLFELENGRKRMLASAGELQKGNELALPSKYVNFLYLASHYEKLKGSPEDNEQKQLFVEQHKHYLDEIIEQISEFSKRVILADANLDKVLSAYNKHRDKPIREQAENIIHLFTLTNLGAPAAFKYFDTTIDRKRYTSTKEVLDATLIHQSITGLYETRIDLSQLGGDGGGGSGGSGGTVSLQDEHRLFDIPVTTSLPDVWLQDFPQAWAETGGLGRAKCQAPIIIDLKPTAVPVSIKQYPMSLEAHMGIRQHIIKFLELGVLRPCRSPWNTPLLPVKKPGTQDYRPVQDLREINKRTVDIHPTVPNPYNLLSTLKPDYSWYTVLDLKDAFFCLPLAPQSQELFAFEWKDPERGISGQLTWTRLPQGFKNSPTLFNEALHRDLTDFRTQHPEVTLLQYVDDLLLAAPTKKACTQGTRHLLQELGEKGYRASAKKAQICQTKVTYLGYILSEGKRWLTPGRIETVARIPPPRNPREVREFLGTAGFCRLWIPGFAELAAPLYALTKPSTPFTWQTEHQLAFEALKKALLSAPALGLPDTSKPFTLFLDERQGIAKGVLTQKLGPWKRPVAYLSKKLDPVAAGWPPCLRIMAATAMLVKDSAKLTLGQPLTVITPHTLEAIVRQPPDRWITNARLTHYQALLLDTDRVQFGPPVTLNPATLLPVPENQPSPHDCRQVLAETHGTREDLKDQELPDADHTWYTDGSSYLDSGTRRAGAAVVDGHNTIWAQSLPPGTSAQKAELIALTKALELSKGKKANIYTDSRYAFATAHTHGSIYERRGWLTSEGKEIKNKAEIIALLKALFLPQEVAIIHCPGHQKGQDPVAVGNRQADRVARQAAMAEVLTLATEPDNTSHITAGKRTADGSEFEKRTADGSEFESPKKKAKVE

SEQ ID NO: 1557 - protein, 2099 aa, synthetic construct
MPAAKRVKLDGGDKKYSIGLDIGTNSVGWAVITDEYKVPSKKFKVLGNTDRHSIKKNLIGALLFDSGETAEATRLKRTARRRYTRRKNRICYLQEIFSNEMAKVDDSFFHRLEESFLVEEDKKHERHPIFGNIVDEVAYHEKYPTIYHLRKKLVDSTDKADLRLIYLALAHMIKFRGHFLIEGDLNPDNSDVDKLFIQLVQTYNQLFEENPINASGVDAKAILSARLSKSRRLENLIAQLPGEKKNGLFGNLIALSLGLTPNFKSNFDLAEDAKLQLSKDTYDDDLDNLLAQIGDQYADLFLAAKNLSDAILLSDILRVNTEITKAPLSASMIKRYDEHHQDLTLLKALVRQQLPEKYKEIFFDQSKNGYAGYIDGGASQEEFYKFIKPILEKMDGTEELLVKLNREDLLRKQRTFDNGSIPHQIHLGELHAILRRQEDFYPFLKDNREKIEKILTFRIPYYVGPLARGNSRFAWMTRKSEETITPWNFEEVVDKGASAQSFIERMTNFDKNLPNEKVLPKHSLLYEYFTVYNELTKVKYVTEGMRKPAFLSGEQKKAIVDLLFKTNRKVTVKQLKEDYFKKIECFDSVEISGVEDRFNASLGTYHDLLKIIKDKDFLDNEENEDILEDIVLTLTLFEDREMIEERLKTYAHLFDDKVMKQLKRRRYTGWGRLSRKLINGIRDKQSGKTILDFLKSDGFANRNFMQLIHDDSLTFKEDIQKAQVSGQGDSLHEHIANLAGSPAIKKGILQTVKVVDELVKVMGRHKPENIVIEMARENQTTQKGQKNSRERMKRIEEGIKELGSQILKEHPVENTQLQNEKLYLYYLQNGRDMYVDQELDINRLSDYDVDHIVPQSFLKDDSIDNKVLTRSDKARGKSDNVPSEEVVKKMKNYWRQLLNAKLITQRKFDNLTKAERGGLSELDKAGFIKRQLVETRQITKHVAQILDSRMNTKYDENDKLIREVKVITLKSKLVSDFRKDFQFYKVREINNYHHAHDAYLNAVVGTALIKKYPKLESEFVYGDYKVYDVRKMIAKSEQEIGKATAKYFFYSNIMNFFKTEITLANGEIRKRPLIETNGETGEIVWDKGRDFATVRKVLSMPQVNIVKKTEVQTGGFSKESILPKRNSDKLIARKKDWDPKKYGGFDSPTVAYSVLVVAKVEKGKSKKLKSVKELLGITIMERSSFEKNPIDFLEAKGYKEVKKDLIIKLPKYSLFELENGRKRMLASAGELQKGNELALPSKYVNFLYLASHYEKLKGSPEDNEQKQLFVEQHKHYLDEIIEQISEFSKRVILADANLDKVLSAYNKHRDKPIREQAENIIHLFTLTNLGAPAAFKYFDTTIDRKRYTSTKEVLDATLIHQSITGLYETRIDLSQLGGDGGEAAAKGGSGGTVSLQDEHRLFDIPVTTSLPDVWLQDFPQAWAETGGLGRAKCQAPIIIDLKPTAVPVSIKQYPMSLEAHMGIRQHIIKFLELGVLRPCRSPWNTPLLPVKKPGTQDYRPVQDLREINKRTVDIHPTVPNPYNLLSTLKPDYSWYTVLDLKDAFFCLPLAPQSQELFAFEWKDPERGISGQLTWTRLPQGFKNSPTLFNEALHRDLTDFRTQHPEVTLLQYVDDLLLAAPTKKACTQGTRHLLQELGEKGYRASAKKAQICQTKVTYLGYILSEGKRWLTPGRIETVARIPPPRNPREVREFLGTAGFCRLWIPGFAELAAPLYALTKPSTPFTWQTEHQLAFEALKKALLSAPALGLPDTSKPFTLFLDERQGIAKGVLTQKLGPWKRPVAYLSKKLDPVAAGWPPCLRIMAATAMLVKDSAKLTLGQPLTVITPHTLEAIVRQPPDRWITNARLTHYQALLLDTDRVQFGPPVTLNPATLLPVPENQPSPHDCRQVLAETHGTREDLKDQELPDADHTWYTDGSSYLDSGTRRAGAAVVDGHNTIWAQSLPPGTSAQKAELIALTKALELSKGKKANIYTDSRYAFATAHTHGSIYERRGWLTSEGKEIKNKAEIIALLKALFLPQEVAIIHCPGHQKGQDPVAVGNRQADRVARQAAMAEVLTLATEPDNTSHITAGKRTADGSEFEKRTADGSEFESPKKKAKVE

SEQ ID NO: 1558 - protein, 2097 aa, synthetic construct
MPAAKRVKLDGGDKKYSIGLDIGTNSVGWAVITDEYKVPSKKFKVLGNTDRHSIKKNLIGALLFDSGETAEATRLKRTARRRYTRRKNRICYLQEIFSNEMAKVDDSFFHRLEESFLVEEDKKHERHPIFGNIVDEVAYHEKYPTIYHLRKKLVDSTDKADLRLIYLALAHMIKFRGHFLIEGDLNPDNSDVDKLFIQLVQTYNQLFEENPINASGVDAKAILSARLSKSRRLENLIAQLPGEKKNGLFGNLIALSLGLTPNFKSNFDLAEDAKLQLSKDTYDDDLDNLLAQIGDQYADLFLAAKNLSDAILLSDILRVNTEITKAPLSASMIKRYDEHHQDLTLLKALVRQQLPEKYKEIFFDQSKNGYAGYIDGGASQEEFYKFIKPILEKMDGTEELLVKLNREDLLRKQRTFDNGSIPHQIHLGELHAILRRQEDFYPFLKDNREKIEKILTFRIPYYVGPLARGNSRFAWMTRKSEETITPWNFEEVVDKGASAQSFIERMTNFDKNLPNEKVLPKHSLLYEYFTVYNELTKVKYVTEGMRKPAFLSGEQKKAIVDLLFKTNRKVTVKQLKEDYFKKIECFDSVEISGVEDRFNASLGTYHDLLKIIKDKDFLDNEENEDILEDIVLTLTLFEDREMIEERLKTYAHLFDDKVMKQLKRRRYTGWGRLSRKLINGIRDKQSGKTILDFLKSDGFANRNFMQLIHDDSLTFKEDIQKAQVSGQGDSLHEHIANLAGSPAIKKGILQTVKVVDELVKVMGRHKPENIVIEMARENQTTQKGQKNSRERMKRIEEGIKELGSQILKEHPVENTQLQNEKLYLYYLQNGRDMYVDQELDINRLSDYDVDHIVPQSFLKDDSIDNKVLTRSDKARGKSDNVPSEEVVKKMKNYWRQLLNAKLITQRKFDNLTKAERGGLSELDKAGFIKRQLVETRQITKHVAQILDSRMNTKYDENDKLIREVKVITLKSKLVSDFRKDFQFYKVREINNYHHAHDAYLNAVVGTALIKKYPKLESEFVYGDYKVYDVRKMIAKSEQEIGKATAKYFFYSNIMNFFKTEITLANGEIRKRPLIETNGETGEIVWDKGRDFATVRKVLSMPQVNIVKKTEVQTGGFSKESILPKRNSDKLIARKKDWDPKKYGGFDSPTVAYSVLVVAKVEKGKSKKLKSVKELLGITIMERSSFEKNPIDFLEAKGYKEVKKDLIIKLPKYSLFELENGRKRMLASAGELQKGNELALPSKYVNFLYLASHYEKLKGSPEDNEQKQLFVEQHKHYLDEIIEQISEFSKRVILADANLDKVLSAYNKHRDKPIREQAENIIHLFTLTNLGAPAAFKYFDTTIDRKRYTSTKEVLDATLIHQSITGLYETRIDLSQLGGDGGPAPGSSGGTVSLQDEHRLFDIPVTTSLPDVWLQDFPQAWAETGGLGRAKCQAPIIIDLKPTAVPVSIKQYPMSLEAHMGIRQHIIKFLELGVLRPCRSPWNTPLLPVKKPGTQDYRPVQDLREINKRTVDIHPTVPNPYNLLSTLKPDYSWYTVLDLKDAFFCLPLAPQSQELFAFEWKDPERGISGQLTWTRLPQGFKNSPTLFNEALHRDLTDFRTQHPEVTLLQYVDDLLLAAPTKKACTQGTRHLLQELGEKGYRASAKKAQICQTKVTYLGYILSEGKRWLTPGRIETVARIPPPRNPREVREFLGTAGFCRLWIPGFAELAAPLYALTKPSTPFTWQTEHQLAFEALKKALLSAPALGLPDTSKPFTLFLDERQGIAKGVLTQKLGPWKRPVAYLSKKLDPVAAGWPPCLRIMAATAMLVKDSAKLTLGQPLTVITPHTLEAIVRQPPDRWITNARLTHYQALLLDTDRVQFGPPVTLNPATLLPVPENQPSPHDCRQVLAETHGTREDLKDQELPDADHTWYTDGSSYLDSGTRRAGAAVVDGHNTIWAQSLPPGTSAQKAELIALTKALELSKGKKANIYTDSRYAFATAHTHGSIYERRGWLTSEGKEIKNKAEIIALLKALFLPQEVAIIHCPGHQKGQDPVAVGNRQADRVARQAAMAEVLTLATEPDNTSHITAGKRTADGSEFEKRTADGSEFESPKKKAKVE

SEQ ID NO: 1559 - protein, 2096 aa, synthetic construct
MPAAKRVKLDGGDKKYSIGLDIGTNSVGWAVITDEYKVPSKKFKVLGNTDRHSIKKNLIGALLFDSGETAEATRLKRTARRRYTRRKNRICYLQEIFSNEMAKVDDSFFHRLEESFLVEEDKKHERHPIFGNIVDEVAYHEKYPTIYHLRKKLVDSTDKADLRLIYLALAHMIKFRGHFLIEGDLNPDNSDVDKLFIQLVQTYNQLFEENPINASGVDAKAILSARLSKSRRLENLIAQLPGEKKNGLFGNLIALSLGLTPNFKSNFDLAEDAKLQLSKDTYDDDLDNLLAQIGDQYADLFLAAKNLSDAILLSDILRVNTEITKAPLSASMIKRYDEHHQDLTLLKALVRQQLPEKYKEIFFDQSKNGYAGYIDGGASQEEFYKFIKPILEKMDGTEELLVKLNREDLLRKQRTFDNGSIPHQIHLGELHAILRRQEDFYPFLKDNREKIEKILTFRIPYYVGPLARGNSRFAWMTRKSEETITPWNFEEVVDKGASAQSFIERMTNFDKNLPNEKVLPKHSLLYEYFTVYNELTKVKYVTEGMRKPAFLSGEQKKAIVDLLFKTNRKVTVKQLKEDYFKKIECFDSVEISGVEDRFNASLGTYHDLLKIIKDKDFLDNEENEDILEDIVLTLTLFEDREMIEERLKTYAHLFDDKVMKQLKRRRYTGWGRLSRKLINGIRDKQSGKTILDFLKSDGFANRNFMQLIHDDSLTFKEDIQKAQVSGQGDSLHEHIANLAGSPAIKKGILQTVKVVDELVKVMGRHKPENIVIEMARENQTTQKGQKNSRERMKRIEEGIKELGSQILKEHPVENTQLQNEKLYLYYLQNGRDMYVDQELDINRLSDYDVDHIVPQSFLKDDSIDNKVLTRSDKARGKSDNVPSEEVVKKMKNYWRQLLNAKLITQRKFDNLTKAERGGLSELDKAGFIKRQLVETRQITKHVAQILDSRMNTKYDENDKLIREVKVITLKSKLVSDFRKDFQFYKVREINNYHHAHDAYLNAVVGTALIKKYPKLESEFVYGDYKVYDVRKMIAKSEQEIGKATAKYFFYSNIMNFFKTEITLANGEIRKRPLIETNGETGEIVWDKGRDFATVRKVLSMPQVNIVKKTEVQTGGFSKESILPKRNSDKLIARKKDWDPKKYGGFDSPTVAYSVLVVAKVEKGKSKKLKSVKELLGITIMERSSFEKNPIDFLEAKGYKEVKKDLIIKLPKYSLFELENGRKRMLASAGELQKGNELALPSKYVNFLYLASHYEKLKGSPEDNEQKQLFVEQHKHYLDEIIEQISEFSKRVILADANLDKVLSAYNKHRDKPIREQAENIIHLFTLTNLGAPAAFKYFDTTIDRKRYTSTKEVLDATLIHQSITGLYETRIDLSQLGGDGGGGGGSGGTVSLQDEHRLFDIPVTTSLPDVWLQDFPQAWAETGGLGRAKCQAPIIIDLKPTAVPVSIKQYPMSLEAHMGIRQHIIKFLELGVLRPCRSPWNTPLLPVKKPGTQDYRPVQDLREINKRTVDIHPTVPNPYNLLSTLKPDYSWYTVLDLKDAFFCLPLAPQSQELFAFEWKDPERGISGQLTWTRLPQGFKNSPTLFNEALHRDLTDFRTQHPEVTLLQYVDDLLLAAPTKKACTQGTRHLLQELGEKGYRASAKKAQICQTKVTYLGYILSEGKRWLTPGRIETVARIPPPRNPREVREFLGTAGFCRLWIPGFAELAAPLYALTKPSTPFTWQTEHQLAFEALKKALLSAPALGLPDTSKPFTLFLDERQGIAKGVLTQKLGPWKRPVAYLSKKLDPVAAGWPPCLRIMAATAMLVKDSAKLTLGQPLTVITPHTLEAIVRQPPDRWITNARLTHYQALLLDTDRVQFGPPVTLNPATLLPVPENQPSPHDCRQVLAETHGTREDLKDQELPDADHTWYTDGSSYLDSGTRRAGAAVVDGHNTIWAQSLPPGTSAQKAELIALTKALELSKGKKANIYTDSRYAFATAHTHGSIYERRGWLTSEGKEIKNKAEIIALLKALFLPQEVAIIHCPGHQKGQDPVAVGNRQADRVARQAAMAEVLTLATEPDNTSHITAGKRTADGSEFEKRTADGSEFESPKKKAKVE

SEQ ID NO: 1560 - protein, 2098 aa, synthetic construct
MPAAKRVKLDGGDKKYSIGLDIGTNSVGWAVITDEYKVPSKKFKVLGNTDRHSIKKNLIGALLFDSGETAEATRLKRTARRRYTRRKNRICYLQEIFSNEMAKVDDSFFHRLEESFLVEEDKKHERHPIFGNIVDEVAYHEKYPTIYHLRKKLVDSTDKADLRLIYLALAHMIKFRGHFLIEGDLNPDNSDVDKLFIQLVQTYNQLFEENPINASGVDAKAILSARLSKSRRLENLIAQLPGEKKNGLFGNLIALSLGLTPNFKSNFDLAEDAKLQLSKDTYDDDLDNLLAQIGDQYADLFLAAKNLSDAILLSDILRVNTEITKAPLSASMIKRYDEHHQDLTLLKALVRQQLPEKYKEIFFDQSKNGYAGYIDGGASQEEFYKFIKPILEKMDGTEELLVKLNREDLLRKQRTFDNGSIPHQIHLGELHAILRRQEDFYPFLKDNREKIEKILTFRIPYYVGPLARGNSRFAWMTRKSEETITPWNFEEVVDKGASAQSFIERMTNFDKNLPNEKVLPKHSLLYEYFTVYNELTKVKYVTEGMRKPAFLSGEQKKAIVDLLFKTNRKVTVKQLKEDYFKKIECFDSVEISGVEDRFNASLGTYHDLLKIIKDKDFLDNEENEDILEDIVLTLTLFEDREMIEERLKTYAHLFDDKVMKQLKRRRYTGWGRLSRKLINGIRDKQSGKTILDFLKSDGFANRNFMQLIHDDSLTFKEDIQKAQVSGQGDSLHEHIANLAGSPAIKKGILQTVKVVDELVKVMGRHKPENIVIEMARENQTTQKGQKNSRERMKRIEEGIKELGSQILKEHPVENTQLQNEKLYLYYLQNGRDMYVDQELDINRLSDYDVDHIVPQSFLKDDSIDNKVLTRSDKARGKSDNVPSEEVVKKMKNYWRQLLNAKLITQRKFDNLTKAERGGLSELDKAGFIKRQLVETRQITKHVAQILDSRMNTKYDENDKLIREVKVITLKSKLVSDFRKDFQFYKVREINNYHHAHDAYLNAVVGTALIKKYPKLESEFVYGDYKVYDVRKMIAKSEQEIGKATAKYFFYSNIMNFFKTEITLANGEIRKRPLIETNGETGEIVWDKGRDFATVRKVLSMPQVNIVKKTEVQTGGFSKESILPKRNSDKLIARKKDWDPKKYGGFDSPTVAYSVLVVAKVEKGKSKKLKSVKELLGITIMERSSFEKNPIDFLEAKGYKEVKKDLIIKLPKYSLFELENGRKRMLASAGELQKGNELALPSKYVNFLYLASHYEKLKGSPEDNEQKQLFVEQHKHYLDEIIEQISEFSKRVILADANLDKVLSAYNKHRDKPIREQAENIIHLFTLTNLGAPAAFKYFDTTIDRKRYTSTKEVLDATLIHQSITGLYETRIDLSQLGGDGGGGGGGGGGGTVSLQDEHRLFDIPVTTSLPDVWLQDFPQAWAETGGLGRAKCQAPIIIDLKPTAVPVSIKQYPMSLEAHMGIRQHIIKFLELGVLRPCRSPWNTPLLPVKKPGTQDYRPVQDLREINKRTVDIHPTVPNPYNLLSTLKPDYSWYTVLDLKDAFFCLPLAPQSQELFAFEWKDPERGISGQLTWTRLPQGFKNSPTLFNEALHRDLTDFRTQHPEVTLLQYVDDLLLAAPTKKACTQGTRHLLQELGEKGYRASAKKAQICQTKVTYLGYILSEGKRWLTPGRIETVARIPPPRNPREVREFLGTAGFCRLWIPGFAELAAPLYALTKPSTPFTWQTEHQLAFEALKKALLSAPALGLPDTSKPFTLFLDERQGIAKGVLTQKLGPWKRPVAYLSKKLDPVAAGWPPCLRIMAATAMLVKDSAKLTLGQPLTVITPHTLEAIVRQPPDRWITNARLTHYQALLLDTDRVQFGPPVTLNPATLLPVPENQPSPHDCRQVLAETHGTREDLKDQELPDADHTWYTDGSSYLDSGTRRAGAAVVDGHNTIWAQSLPPGTSAQKAELIALTKALELSKGKKANIYTDSRYAFATAHTHGSIYERRGWLTSEGKEIKNKAEIIALLKALFLPQEVAIIHCPGHQKGQDPVAVGNRQADRVARQAAMAEVLTLATEPDNTSHITAGKRTADGSEFEKRTADGSEFESPKKKAKVE

SEQ ID NO: 1561 - protein, 2106 aa, synthetic construct
MPAAKRVKLDGGDKKYSIGLDIGTNSVGWAVITDEYKVPSKKFKVLGNTDRHSIKKNLIGALLFDSGETAEATRLKRTARRRYTRRKNRICYLQEIFSNEMAKVDDSFFHRLEESFLVEEDKKHERHPIFGNIVDEVAYHEKYPTIYHLRKKLVDSTDKADLRLIYLALAHMIKFRGHFLIEGDLNPDNSDVDKLFIQLVQTYNQLFEENPINASGVDAKAILSARLSKSRRLENLIAQLPGEKKNGLFGNLIALSLGLTPNFKSNFDLAEDAKLQLSKDTYDDDLDNLLAQIGDQYADLFLAAKNLSDAILLSDILRVNTEITKAPLSASMIKRYDEHHQDLTLLKALVRQQLPEKYKEIFFDQSKNGYAGYIDGGASQEEFYKFIKPILEKMDGTEELLVKLNREDLLRKQRTFDNGSIPHQIHLGELHAILRRQEDFYPFLKDNREKIEKILTFRIPYYVGPLARGNSRFAWMTRKSEETITPWNFEEVVDKGASAQSFIERMTNFDKNLPNEKVLPKHSLLYEYFTVYNELTKVKYVTEGMRKPAFLSGEQKKAIVDLLFKTNRKVTVKQLKEDYFKKIECFDSVEISGVEDRFNASLGTYHDLLKIIKDKDFLDNEENEDILEDIVLTLTLFEDREMIEERLKTYAHLFDDKVMKQLKRRRYTGWGRLSRKLINGIRDKQSGKTILDFLKSDGFANRNFMQLIHDDSLTFKEDIQKAQVSGQGDSLHEHIANLAGSPAIKKGILQTVKVVDELVKVMGRHKPENIVIEMARENQTTQKGQKNSRERMKRIEEGIKELGSQILKEHPVENTQLQNEKLYLYYLQNGRDMYVDQELDINRLSDYDVDHIVPQSFLKDDSIDNKVLTRSDKARGKSDNVPSEEVVKKMKNYWRQLLNAKLITQRKFDNLTKAERGGLSELDKAGFIKRQLVETRQITKHVAQILDSRMNTKYDENDKLIREVKVITLKSKLVSDFRKDFQFYKVREINNYHHAHDAYLNAVVGTALIKKYPKLESEFVYGDYKVYDVRKMIAKSEQEIGKATAKYFFYSNIMNFFKTEITLANGEIRKRPLIETNGETGEIVWDKGRDFATVRKVLSMPQVNIVKKTEVQTGGFSKESILPKRNSDKLIARKKDWDPKKYGGFDSPTVAYSVLVVAKVEKGKSKKLKSVKELLGITIMERSSFEKNPIDFLEAKGYKEVKKDLIIKLPKYSLFELENGRKRMLASAGELQKGNELALPSKYVNFLYLASHYEKLKGSPEDNEQKQLFVEQHKHYLDEIIEQISEFSKRVILADANLDKVLSAYNKHRDKPIREQAENIIHLFTLTNLGAPAAFKYFDTTIDRKRYTSTKEVLDATLIHQSITGLYETRIDLSQLGGDGGGGGGSEAAAKGGGGSGGTVSLQDEHRLFDIPVTTSLPDVWLQDFPQAWAETGGLGRAKCQAPIIIDLKPTAVPVSIKQYPMSLEAHMGIRQHIIKFLELGVLRPCRSPWNTPLLPVKKPGTQDYRPVQDLREINKRTVDIHPTVPNPYNLLSTLKPDYSWYTVLDLKDAFFCLPLAPQSQELFAFEWKDPERGISGQLTWTRLPQGFKNSPTLFNEALHRDLTDFRTQHPEVTLLQYVDDLLLAAPTKKACTQGTRHLLQELGEKGYRASAKKAQICQTKVTYLGYILSEGKRWLTPGRIETVARIPPPRNPREVREFLGTAGFCRLWIPGFAELAAPLYALTKPSTPFTWQTEHQLAFEALKKALLSAPALGLPDTSKPFTLFLDERQGIAKGVLTQKLGPWKRPVAYLSKKLDPVAAGWPPCLRIMAATAMLVKDSAKLTLGQPLTVITPHTLEAIVRQPPDRWITNARLTHYQALLLDTDRVQFGPPVTLNPATLLPVPENQPSPHDCRQVLAETHGTREDLKDQELPDADHTWYTDGSSYLDSGTRRAGAAVVDGHNTIWAQSLPPGTSAQKAELIALTKALELSKGKKANIYTDSRYAFATAHTHGSIYERRGWLTSEGKEIKNKAEIIALLKALFLPQEVAIIHCPGHQKGQDPVAVGNRQADRVARQAAMAEVLTLATEPDNTSHITAGKRTADGSEFEKRTADGSEFESPKKKAKVE

SEQ ID NO: 1562 - protein, 2111 aa, synthetic construct
MPAAKRVKLDGGDKKYSIGLDIGTNSVGWAVITDEYKVPSKKFKVLGNTDRHSIKKNLIGALLFDSGETAEATRLKRTARRRYTRRKNRICYLQEIFSNEMAKVDDSFFHRLEESFLVEEDKKHERHPIFGNIVDEVAYHEKYPTIYHLRKKLVDSTDKADLRLIYLALAHMIKFRGHFLIEGDLNPDNSDVDKLFIQLVQTYNQLFEENPINASGVDAKAILSARLSKSRRLENLIAQLPGEKKNGLFGNLIALSLGLTPNFKSNFDLAEDAKLQLSKDTYDDDLDNLLAQIGDQYADLFLAAKNLSDAILLSDILRVNTEITKAPLSASMIKRYDEHHQDLTLLKALVRQQLPEKYKEIFFDQSKNGYAGYIDGGASQEEFYKFIKPILEKMDGTEELLVKLNREDLLRKQRTFDNGSIPHQIHLGELHAILRRQEDFYPFLKDNREKIEKILTFRIPYYVGPLARGNSRFAWMTRKSEETITPWNFEEVVDKGASAQSFIERMTNFDKNLPNEKVLPKHSLLYEYFTVYNELTKVKYVTEGMRKPAFLSGEQKKAIVDLLFKTNRKVTVKQLKEDYFKKIECFDSVEISGVEDRFNASLGTYHDLLKIIKDKDFLDNEENEDILEDIVLTLTLFEDREMIEERLKTYAHLFDDKVMKQLKRRRYTGWGRLSRKLINGIRDKQSGKTILDFLKSDGFANRNFMQLIHDDSLTFKEDIQKAQVSGQGDSLHEHIANLAGSPAIKKGILQTVKVVDELVKVMGRHKPENIVIEMARENQTTQKGQKNSRERMKRIEEGIKELGSQILKEHPVENTQLQNEKLYLYYLQNGRDMYVDQELDINRLSDYDVDHIVPQSFLKDDSIDNKVLTRSDKARGKSDNVPSEEVVKKMKNYWRQLLNAKLITQRKFDNLTKAERGGLSELDKAGFIKRQLVETRQITKHVAQILDSRMNTKYDENDKLIREVKVITLKSKLVSDFRKDFQFYKVREINNYHHAHDAYLNAVVGTALIKKYPKLESEFVYGDYKVYDVRKMIAKSEQEIGKATAKYFFYSNIMNFFKTEITLANGEIRKRPLIETNGETGEIVWDKGRDFATVRKVLSMPQVNIVKKTEVQTGGFSKESILPKRNSDKLIARKKDWDPKKYGGFDSPTVAYSVLVVAKVEKGKSKKLKSVKELLGITIMERSSFEKNPIDFLEAKGYKEVKKDLIIKLPKYSLFELENGRKRMLASAGELQKGNELALPSKYVNFLYLASHYEKLKGSPEDNEQKQLFVEQHKHYLDEIIEQISEFSKRVILADANLDKVLSAYNKHRDKPIREQAENIIHLFTLTNLGAPAAFKYFDTTIDRKRYTSTKEVLDATLIHQSITGLYETRIDLSQLGGDGGEAAAKEAAAKEAAAKEAAAKGGTVSLQDEHRLFDIPVTTSLPDVWLQDFPQAWAETGGLGRAKCQAPIIIDLKPTAVPVSIKQYPMSLEAHMGIRQHIIKFLELGVLRPCRSPWNTPLLPVKKPGTQDYRPVQDLREINKRTVDIHPTVPNPYNLLSTLKPDYSWYTVLDLKDAFFCLPLAPQSQELFAFEWKDPERGISGQLTWTRLPQGFKNSPTLFNEALHRDLTDFRTQHPEVTLLQYVDDLLLAAPTKKACTQGTRHLLQELGEKGYRASAKKAQICQTKVTYLGYILSEGKRWLTPGRIETVARIPPPRNPREVREFLGTAGFCRLWIPGFAELAAPLYALTKPSTPFTWQTEHQLAFEALKKALLSAPALGLPDTSKPFTLFLDERQGIAKGVLTQKLGPWKRPVAYLSKKLDPVAAGWPPCLRIMAATAMLVKDSAKLTLGQPLTVITPHTLEAIVRQPPDRWITNARLTHYQALLLDTDRVQFGPPVTLNPATLLPVPENQPSPHDCRQVLAETHGTREDLKDQELPDADHTWYTDGSSYLDSGTRRAGAAVVDGHNTIWAQSLPPGTSAQKAELIALTKALELSKGKKANIYTDSRYAFATAHTHGSIYERRGWLTSEGKEIKNKAEIIALLKALFLPQEVAIIHCPGHQKGQDPVAVGNRQADRVARQAAMAEVLTLATEPDNTSHITAGKRTADGSEFEKRTADGSEFESPKKKAKVE

SEQ ID NO: 1563 - protein, 2102 aa, synthetic construct
MPAAKRVKLDGGDKKYSIGLDIGTNSVGWAVITDEYKVPSKKFKVLGNTDRHSIKKNLIGALLFDSGETAEATRLKRTARRRYTRRKNRICYLQEIFSNEMAKVDDSFFHRLEESFLVEEDKKHERHPIFGNIVDEVAYHEKYPTIYHLRKKLVDSTDKADLRLIYLALAHMIKFRGHFLIEGDLNPDNSDVDKLFIQLVQTYNQLFEENPINASGVDAKAILSARLSKSRRLENLIAQLPGEKKNGLFGNLIALSLGLTPNFKSNFDLAEDAKLQLSKDTYDDDLDNLLAQIGDQYADLFLAAKNLSDAILLSDILRVNTEITKAPLSASMIKRYDEHHQDLTLLKALVRQQLPEKYKEIFFDQSKNGYAGYIDGGASQEEFYKFIKPILEKMDGTEELLVKLNREDLLRKQRTFDNGSIPHQIHLGELHAILRRQEDFYPFLKDNREKIEKILTFRIPYYVGPLARGNSRFAWMTRKSEETITPWNFEEVVDKGASAQSFIERMTNFDKNLPNEKVLPKHSLLYEYFTVYNELTKVKYVTEGMRKPAFLSGEQKKAIVDLLFKTNRKVTVKQLKEDYFKKIECFDSVEISGVEDRFNASLGTYHDLLKIIKDKDFLDNEENEDILEDIVLTLTLFEDREMIEERLKTYAHLFDDKVMKQLKRRRYTGWGRLSRKLINGIRDKQSGKTILDFLKSDGFANRNFMQLIHDDSLTFKEDIQKAQVSGQGDSLHEHIANLAGSPAIKKGILQTVKVVDELVKVMGRHKPENIVIEMARENQTTQKGQKNSRERMKRIEEGIKELGSQILKEHPVENTQLQNEKLYLYYLQNGRDMYVDQELDINRLSDYDVDHIVPQSFLKDDSIDNKVLTRSDKARGKSDNVPSEEVVKKMKNYWRQLLNAKLITQRKFDNLTKAERGGLSELDKAGFIKRQLVETRQITKHVAQILDSRMNTKYDENDKLIREVKVITLKSKLVSDFRKDFQFYKVREINNYHHAHDAYLNAVVGTALIKKYPKLESEFVYGDYKVYDVRKMIAKSEQEIGKATAKYFFYSNIMNFFKTEITLANGEIRKRPLIETNGETGEIVWDKGRDFATVRKVLSMPQVNIVKKTEVQTGGFSKESILPKRNSDKLIARKKDWDPKKYGGFDSPTVAYSVLVVAKVEKGKSKKLKSVKELLGITIMERSSFEKNPIDFLEAKGYKEVKKDLIIKLPKYSLFELENGRKRMLASAGELQKGNELALPSKYVNFLYLASHYEKLKGSPEDNEQKQLFVEQHKHYLDEIIEQISEFSKRVILADANLDKVLSAYNKHRDKPIREQAENIIHLFTLTNLGAPAAFKYFDTTIDRKRYTSTKEVLDATLIHQSITGLYETRIDLSQLGGDGGGGSEAAAKPAPGGTVSLQDEHRLFDIPVTTSLPDVWLQDFPQAWAETGGLGRAKCQAPIIIDLKPTAVPVSIKQYPMSLEAHMGIRQHIIKFLELGVLRPCRSPWNTPLLPVKKPGTQDYRPVQDLREINKRTVDIHPTVPNPYNLLSTLKPDYSWYTVLDLKDAFFCLPLAPQSQELFAFEWKDPERGISGQLTWTRLPQGFKNSPTLFNEALHRDLTDFRTQHPEVTLLQYVDDLLLAAPTKKACTQGTRHLLQELGEKGYRASAKKAQICQTKVTYLGYILSEGKRWLTPGRIETVARIPPPRNPREVREFLGTAGFCRLWIPGFAELAAPLYALTKPSTPFTWQTEHQLAFEALKKALLSAPALGLPDTSKPFTLFLDERQGIAKGVLTQKLGPWKRPVAYLSKKLDPVAAGWPPCLRIMAATAMLVKDSAKLTLGQPLTVITPHTLEAIVRQPPDRWITNARLTHYQALLLDTDRVQFGPPVTLNPATLLPVPENQPSPHDCRQVLAETHGTREDLKDQELPDADHTWYTDGSSYLDSGTRRAGAAVVDGHNTIWAQSLPPGTSAQKAELIALTKALELSKGKKANIYTDSRYAFATAHTHGSIYERRGWLTSEGKEIKNKAEIIALLKALFLPQEVAIIHCPGHQKGQDPVAVGNRQADRVARQAAMAEVLTLATEPDNTSHITAGKRTADGSEFEKRTADGSEFESPKKKAKVE

SEQ ID NO: 1564 - protein, 2096 aa, synthetic construct
MPAAKRVKLDGGDKKYSIGLDIGTNSVGWAVITDEYKVPSKKFKVLGNTDRHSIKKNLIGALLFDSGETAEATRLKRTARRRYTRRKNRICYLQEIFSNEMAKVDDSFFHRLEESFLVEEDKKHERHPIFGNIVDEVAYHEKYPTIYHLRKKLVDSTDKADLRLIYLALAHMIKFRGHFLIEGDLNPDNSDVDKLFIQLVQTYNQLFEENPINASGVDAKAILSARLSKSRRLENLIAQLPGEKKNGLFGNLIALSLGLTPNFKSNFDLAEDAKLQLSKDTYDDDLDNLLAQIGDQYADLFLAAKNLSDAILLSDILRVNTEITKAPLSASMIKRYDEHHQDLTLLKALVRQQLPEKYKEIFFDQSKNGYAGYIDGGASQEEFYKFIKPILEKMDGTEELLVKLNREDLLRKQRTFDNGSIPHQIHLGELHAILRRQEDFYPFLKDNREKIEKILTFRIPYYVGPLARGNSRFAWMTRKSEETITPWNFEEVVDKGASAQSFIERMTNFDKNLPNEKVLPKHSLLYEYFTVYNELTKVKYVTEGMRKPAFLSGEQKKAIVDLLFKTNRKVTVKQLKEDYFKKIECFDSVEISGVEDRFNASLGTYHDLLKIIKDKDFLDNEENEDILEDIVLTLTLFEDREMIEERLKTYAHLFDDKVMKQLKRRRYTGWGRLSRKLINGIRDKQSGKTILDFLKSDGFANRNFMQLIHDDSLTFKEDIQKAQVSGQGDSLHEHIANLAGSPAIKKGILQTVKVVDELVKVMGRHKPENIVIEMARENQTTQKGQKNSRERMKRIEEGIKELGSQILKEHPVENTQLQNEKLYLYYLQNGRDMYVDQELDINRLSDYDVDHIVPQSFLKDDSIDNKVLTRSDKARGKSDNVPSEEVVKKMKNYWRQLLNAKLITQRKFDNLTKAERGGLSELDKAGFIKRQLVETRQITKHVAQILDSRMNTKYDENDKLIREVKVITLKSKLVSDFRKDFQFYKVREINNYHHAHDAYLNAVVGTALIKKYPKLESEFVYGDYKVYDVRKMIAKSEQEIGKATAKYFFYSNIMNFFKTEITLANGEIRKRPLIETNGETGEIVWDKGRDFATVRKVLSMPQVNIVKKTEVQTGGFSKESILPKRNSDKLIARKKDWDPKKYGGFDSPTVAYSVLVVAKVEKGKSKKLKSVKELLGITIMERSSFEKNPIDFLEAKGYKEVKKDLIIKLPKYSLFELENGRKRMLASAGELQKGNELALPSKYVNFLYLASHYEKLKGSPEDNEQKQLFVEQHKHYLDEIIEQISEFSKRVILADANLDKVLSAYNKHRDKPIREQAENIIHLFTLTNLGAPAAFKYFDTTIDRKRYTSTKEVLDATLIHQSITGLYETRIDLSQLGGDGGPAPAPGGTVSLQDEHRLFDIPVTTSLPDVWLQDFPQAWAETGGLGRAKCQAPIIIDLKPTAVPVSIKQYPMSLEAHMGIRQHIIKFLELGVLRPCRSPWNTPLLPVKKPGTQDYRPVQDLREINKRTVDIHPTVPNPYNLLSTLKPDYSWYTVLDLKDAFFCLPLAPQSQELFAFEWKDPERGISGQLTWTRLPQGFKNSPTLFNEALHRDLTDFRTQHPEVTLLQYVDDLLLAAPTKKACTQGTRHLLQELGEKGYRASAKKAQICQTKVTYLGYILSEGKRWLTPGRIETVARIPPPRNPREVREFLGTAGFCRLWIPGFAELAAPLYALTKPSTPFTWQTEHQLAFEALKKALLSAPALGLPDTSKPFTLFLDERQGIAKGVLTQKLGPWKRPVAYLSKKLDPVAAGWPPCLRIMAATAMLVKDSAKLTLGQPLTVITPHTLEAIVRQPPDRWITNARLTHYQALLLDTDRVQFGPPVTLNPATLLPVPENQPSPHDCRQVLAETHGTREDLKDQELPDADHTWYTDGSSYLDSGTRRAGAAVVDGHNTIWAQSLPPGTSAQKAELIALTKALELSKGKKANIYTDSRYAFATAHTHGSIYERRGWLTSEGKEIKNKAEIIALLKALFLPQEVAIIHCPGHQKGQDPVAVGNRQADRVARQAAMAEVLTLATEPDNTSHITAGKRTADGSEFEKRTADGSEFESPKKKAKVE

SEQ ID NO: 1565 - protein, 2097 aa, synthetic construct
MPAAKRVKLDGGDKKYSIGLDIGTNSVGWAVITDEYKVPSKKFKVLGNTDRHSIKKNLIGALLFDSGETAEATRLKRTARRRYTRRKNRICYLQEIFSNEMAKVDDSFFHRLEESFLVEEDKKHERHPIFGNIVDEVAYHEKYPTIYHLRKKLVDSTDKADLRLIYLALAHMIKFRGHFLIEGDLNPDNSDVDKLFIQLVQTYNQLFEENPINASGVDAKAILSARLSKSRRLENLIAQLPGEKKNGLFGNLIALSLGLTPNFKSNFDLAEDAKLQLSKDTYDDDLDNLLAQIGDQYADLFLAAKNLSDAILLSDILRVNTEITKAPLSASMIKRYDEHHQDLTLLKALVRQQLPEKYKEIFFDQSKNGYAGYIDGGASQEEFYKFIKPILEKMDGTEELLVKLNREDLLRKQRTFDNGSIPHQIHLGELHAILRRQEDFYPFLKDNREKIEKILTFRIPYYVGPLARGNSRFAWMTRKSEETITPWNFEEVVDKGASAQSFIERMTNFDKNLPNEKVLPKHSLLYEYFTVYNELTKVKYVTEGMRKPAFLSGEQKKAIVDLLFKTNRKVTVKQLKEDYFKKIECFDSVEISGVEDRFNASLGTYHDLLKIIKDKDFLDNEENEDILEDIVLTLTLFEDREMIEERLKTYAHLFDDKVMKQLKRRRYTGWGRLSRKLINGIRDKQSGKTILDFLKSDGFANRNFMQLIHDDSLTFKEDIQKAQVSGQGDSLHEHIANLAGSPAIKKGILQTVKVVDELVKVMGRHKPENIVIEMARENQTTQKGQKNSRERMKRIEEGIKELGSQILKEHPVENTQLQNEKLYLYYLQNGRDMYVDQELDINRLSDYDVDHIVPQSFLKDDSIDNKVLTRSDKARGKSDNVPSEEVVKKMKNYWRQLLNAKLITQRKFDNLTKAERGGLSELDKAGFIKRQLVETRQITKHVAQILDSRMNTKYDENDKLIREVKVITLKSKLVSDFRKDFQFYKVREINNYHHAHDAYLNAVVGTALIKKYPKLESEFVYGDYKVYDVRKMIAKSEQEIGKATAKYFFYSNIMNFFKTEITLANGEIRKRPLIETNGETGEIVWDKGRDFATVRKVLSMPQVNIVKKTEVQTGGFSKESILPKRNSDKLIARKKDWDPKKYGGFDSPTVAYSVLVVAKVEKGKSKKLKSVKELLGITIMERSSFEKNPIDFLEAKGYKEVKKDLIIKLPKYSLFELENGRKRMLASAGELQKGNELALPSKYVNFLYLASHYEKLKGSPEDNEQKQLFVEQHKHYLDEIIEQISEFSKRVILADANLDKVLSAYNKHRDKPIREQAENIIHLFTLTNLGAPAAFKYFDTTIDRKRYTSTKEVLDATLIHQSITGLYETRIDLSQLGGDGGGGGGSSGGTVSLQDEHRLFDIPVTTSLPDVWLQDFPQAWAETGGLGRAKCQAPIIIDLKPTAVPVSIKQYPMSLEAHMGIRQHIIKFLELGVLRPCRSPWNTPLLPVKKPGTQDYRPVQDLREINKRTVDIHPTVPNPYNLLSTLKPDYSWYTVLDLKDAFFCLPLAPQSQELFAFEWKDPERGISGQLTWTRLPQGFKNSPTLFNEALHRDLTDFRTQHPEVTLLQYVDDLLLAAPTKKACTQGTRHLLQELGEKGYRASAKKAQICQTKVTYLGYILSEGKRWLTPGRIETVARIPPPRNPREVREFLGTAGFCRLWIPGFAELAAPLYALTKPSTPFTWQTEHQLAFEALKKALLSAPALGLPDTSKPFTLFLDERQGIAKGVLTQKLGPWKRPVAYLSKKLDPVAAGWPPCLRIMAATAMLVKDSAKLTLGQPLTVITPHTLEAIVRQPPDRWITNARLTHYQALLLDTDRVQFGPPVTLNPATLLPVPENQPSPHDCRQVLAETHGTREDLKDQELPDADHTWYTDGSSYLDSGTRRAGAAVVDGHNTIWAQSLPPGTSAQKAELIALTKALELSKGKKANIYTDSRYAFATAHTHGSIYERRGWLTSEGKEIKNKAEIIALLKALFLPQEVAIIHCPGHQKGQDPVAVGNRQADRVARQAAMAEVLTLATEPDNTSHITAGKRTADGSEFEKRTADGSEFESPKKKAKVE

SEQ ID NO: 1566 - protein, 2099 aa, synthetic construct
MPAAKRVKLDGGDKKYSIGLDIGTNSVGWAVITDEYKVPSKKFKVLGNTDRHSIKKNLIGALLFDSGETAEATRLKRTARRRYTRRKNRICYLQEIFSNEMAKVDDSFFHRLEESFLVEEDKKHERHPIFGNIVDEVAYHEKYPTIYHLRKKLVDSTDKADLRLIYLALAHMIKFRGHFLIEGDLNPDNSDVDKLFIQLVQTYNQLFEENPINASGVDAKAILSARLSKSRRLENLIAQLPGEKKNGLFGNLIALSLGLTPNFKSNFDLAEDAKLQLSKDTYDDDLDNLLAQIGDQYADLFLAAKNLSDAILLSDILRVNTEITKAPLSASMIKRYDEHHQDLTLLKALVRQQLPEKYKEIFFDQSKNGYAGYIDGGASQEEFYKFIKPILEKMDGTEELLVKLNREDLLRKQRTFDNGSIPHQIHLGELHAILRRQEDFYPFLKDNREKIEKILTFRIPYYVGPLARGNSRFAWMTRKSEETITPWNFEEVVDKGASAQSFIERMTNFDKNLPNEKVLPKHSLLYEYFTVYNELTKVKYVTEGMRKPAFLSGEQKKAIVDLLFKTNRKVTVKQLKEDYFKKIECFDSVEISGVEDRFNASLGTYHDLLKIIKDKDFLDNEENEDILEDIVLTLTLFEDREMIEERLKTYAHLFDDKVMKQLKRRRYTGWGRLSRKLINGIRDKQSGKTILDFLKSDGFANRNFMQLIHDDSLTFKEDIQKAQVSGQGDSLHEHIANLAGSPAIKKGILQTVKVVDELVKVMGRHKPENIVIEMARENQTTQKGQKNSRERMKRIEEGIKELGSQILKEHPVENTQLQNEKLYLYYLQNGRDMYVDQELDINRLSDYDVDHIVPQSFLKDDSIDNKVLTRSDKARGKSDNVPSEEVVKKMKNYWRQLLNAKLITQRKFDNLTKAERGGLSELDKAGFIKRQLVETRQITKHVAQILDSRMNTKYDENDKLIREVKVITLKSKLVSDFRKDFQFYKVREINNYHHAHDAYLNAVVGTALIKKYPKLESEFVYGDYKVYDVRKMIAKSEQEIGKATAKYFFYSNIMNFFKTEITLANGEIRKRPLIETNGETGEIVWDKGRDFATVRKVLSMPQVNIVKKTEVQTGGFSKESILPKRNSDKLIARKKDWDPKKYGGFDSPTVAYSVLVVAKVEKGKSKKLKSVKELLGITIMERSSFEKNPIDFLEAKGYKEVKKDLIIKLPKYSLFELENGRKRMLASAGELQKGNELALPSKYVNFLYLASHYEKLKGSPEDNEQKQLFVEQHKHYLDEIIEQISEFSKRVILADANLDKVLSAYNKHRDKPIREQAENIIHLFTLTNLGAPAAFKYFDTTIDRKRYTSTKEVLDATLIHQSITGLYETRIDLSQLGGDGGGGGEAAAKGGTVSLQDEHRLFDIPVTTSLPDVWLQDFPQAWAETGGLGRAKCQAPIIIDLKPTAVPVSIKQYPMSLEAHMGIRQHIIKFLELGVLRPCRSPWNTPLLPVKKPGTQDYRPVQDLREINKRTVDIHPTVPNPYNLLSTLKPDYSWYTVLDLKDAFFCLPLAPQSQELFAFEWKDPERGISGQLTWTRLPQGFKNSPTLFNEALHRDLTDFRTQHPEVTLLQYVDDLLLAAPTKKACTQGTRHLLQELGEKGYRASAKKAQICQTKVTYLGYILSEGKRWLTPGRIETVARIPPPRNPREVREFLGTAGFCRLWIPGFAELAAPLYALTKPSTPFTWQTEHQLAFEALKKALLSAPALGLPDTSKPFTLFLDERQGIAKGVLTQKLGPWKRPVAYLSKKLDPVAAGWPPCLRIMAATAMLVKDSAKLTLGQPLTVITPHTLEAIVRQPPDRWITNARLTHYQALLLDTDRVQFGPPVTLNPATLLPVPENQPSPHDCRQVLAETHGTREDLKDQELPDADHTWYTDGSSYLDSGTRRAGAAVVDGHNTIWAQSLPPGTSAQKAELIALTKALELSKGKKANIYTDSRYAFATAHTHGSIYERRGWLTSEGKEIKNKAEIIALLKALFLPQEVAIIHCPGHQKGQDPVAVGNRQADRVARQAAMAEVLTLATEPDNTSHITAGKRTADGSEFEKRTADGSEFESPKKKAKVE

SEQ ID NO: 1567 - protein, 2102 aa, synthetic construct
MPAAKRVKLDGGDKKYSIGLDIGTNSVGWAVITDEYKVPSKKFKVLGNTDRHSIKKNLIGALLFDSGETAEATRLKRTARRRYTRRKNRICYLQEIFSNEMAKVDDSFFHRLEESFLVEEDKKHERHPIFGNIVDEVAYHEKYPTIYHLRKKLVDSTDKADLRLIYLALAHMIKFRGHFLIEGDLNPDNSDVDKLFIQLVQTYNQLFEENPINASGVDAKAILSARLSKSRRLENLIAQLPGEKKNGLFGNLIALSLGLTPNFKSNFDLAEDAKLQLSKDTYDDDLDNLLAQIGDQYADLFLAAKNLSDAILLSDILRVNTEITKAPLSASMIKRYDEHHQDLTLLKALVRQQLPEKYKEIFFDQSKNGYAGYIDGGASQEEFYKFIKPILEKMDGTEELLVKLNREDLLRKQRTFDNGSIPHQIHLGELHAILRRQEDFYPFLKDNREKIEKILTFRIPYYVGPLARGNSRFAWMTRKSEETITPWNFEEVVDKGASAQSFIERMTNFDKNLPNEKVLPKHSLLYEYFTVYNELTKVKYVTEGMRKPAFLSGEQKKAIVDLLFKTNRKVTVKQLKEDYFKKIECFDSVEISGVEDRFNASLGTYHDLLKIIKDKDFLDNEENEDILEDIVLTLTLFEDREMIEERLKTYAHLFDDKVMKQLKRRRYTGWGRLSRKLINGIRDKQSGKTILDFLKSDGFANRNFMQLIHDDSLTFKEDIQKAQVSGQGDSLHEHIANLAGSPAIKKGILQTVKVVDELVKVMGRHKPENIVIEMARENQTTQKGQKNSRERMKRIEEGIKELGSQILKEHPVENTQLQNEKLYLYYLQNGRDMYVDQELDINRLSDYDVDHIVPQSFLKDDSIDNKVLTRSDKARGKSDNVPSEEVVKKMKNYWRQLLNAKLITQRKFDNLTKAERGGLSELDKAGFIKRQLVETRQITKHVAQILDSRMNTKYDENDKLIREVKVITLKSKLVSDFRKDFQFYKVREINNYHHAHDAYLNAVVGTALIKKYPKLESEFVYGDYKVYDVRKMIAKSEQEIGKATAKYFFYSNIMNFFKTEITLANGEIRKRPLIETNGETGEIVWDKGRDFATVRKVLSMPQVNIVKKTEVQTGGFSKESILPKRNSDKLIARKKDWDPKKYGGFDSPTVAYSVLVVAKVEKGKSKKLKSVKELLGITIMERSSFEKNPIDFLEAKGYKEVKKDLIIKLPKYSLFELENGRKRMLASAGELQKGNELALPSKYVNFLYLASHYEKLKGSPEDNEQKQLFVEQHKHYLDEIIEQISEFSKRVILADANLDKVLSAYNKHRDKPIREQAENIIHLFTLTNLGAPAAFKYFDTTIDRKRYTSTKEVLDATLIHQSITGLYETRIDLSQLGGDGGGSSGGSEAAAKGGTVSLQDEHRLFDIPVTTSLPDVWLQDFPQAWAETGGLGRAKCQAPIIIDLKPTAVPVSIKQYPMSLEAHMGIRQHIIKFLELGVLRPCRSPWNTPLLPVKKPGTQDYRPVQDLREINKRTVDIHPTVPNPYNLLSTLKPDYSWYTVLDLKDAFFCLPLAPQSQELFAFEWKDPERGISGQLTWTRLPQGFKNSPTLFNEALHRDLTDFRTQHPEVTLLQYVDDLLLAAPTKKACTQGTRHLLQELGEKGYRASAKKAQICQTKVTYLGYILSEGKRWLTPGRIETVARIPPPRNPREVREFLGTAGFCRLWIPGFAELAAPLYALTKPSTPFTWQTEHQLAFEALKKALLSAPALGLPDTSKPFTLFLDERQGIAKGVLTQKLGPWKRPVAYLSKKLDPVAAGWPPCLRIMAATAMLVKDSAKLTLGQPLTVITPHTLEAIVRQPPDRWITNARLTHYQALLLDTDRVQFGPPVTLNPATLLPVPENQPSPHDCRQVLAETHGTREDLKDQELPDADHTWYTDGSSYLDSGTRRAGAAVVDGHNTIWAQSLPPGTSAQKAELIALTKALELSKGKKANIYTDSRYAFATAHTHGSIYERRGWLTSEGKEIKNKAEIIALLKALFLPQEVAIIHCPGHQKGQDPVAVGNRQADRVARQAAMAEVLTLATEPDNTSHITAGKRTADGSEFEKRTADGSEFESPKKKAKVE

SEQ ID NO: 1568 - protein, 2100 aa, synthetic construct
MPAAKRVKLDGGDKKYSIGLDIGTNSVGWAVITDEYKVPSKKFKVLGNTDRHSIKKNLIGALLFDSGETAEATRLKRTARRRYTRRKNRICYLQEIFSNEMAKVDDSFFHRLEESFLVEEDKKHERHPIFGNIVDEVAYHEKYPTIYHLRKKLVDSTDKADLRLIYLALAHMIKFRGHFLIEGDLNPDNSDVDKLFIQLVQTYNQLFEENPINASGVDAKAILSARLSKSRRLENLIAQLPGEKKNGLFGNLIALSLGLTPNFKSNFDLAEDAKLQLSKDTYDDDLDNLLAQIGDQYADLFLAAKNLSDAILLSDILRVNTEITKAPLSASMIKRYDEHHQDLTLLKALVRQQLPEKYKEIFFDQSKNGYAGYIDGGASQEEFYKFIKPILEKMDGTEELLVKLNREDLLRKQRTFDNGSIPHQIHLGELHAILRRQEDFYPFLKDNREKIEKILTFRIPYYVGPLARGNSRFAWMTRKSEETITPWNFEEVVDKGASAQSFIERMTNFDKNLPNEKVLPKHSLLYEYFTVYNELTKVKYVTEGMRKPAFLSGEQKKAIVDLLFKTNRKVTVKQLKEDYFKKIECFDSVEISGVEDRFNASLGTYHDLLKIIKDKDFLDNEENEDILEDIVLTLTLFEDREMIEERLKTYAHLFDDKVMKQLKRRRYTGWGRLSRKLINGIRDKQSGKTILDFLKSDGFANRNFMQLIHDDSLTFKEDIQKAQVSGQGDSLHEHIANLAGSPAIKKGILQTVKVVDELVKVMGRHKPENIVIEMARENQTTQKGQKNSRERMKRIEEGIKELGSQILKEHPVENTQLQNEKLYLYYLQNGRDMYVDQELDINRLSDYDVDHIVPQSFLKDDSIDNKVLTRSDKARGKSDNVPSEEVVKKMKNYWRQLLNAKLITQRKFDNLTKAERGGLSELDKAGFIKRQLVETRQITKHVAQILDSRMNTKYDENDKLIREVKVITLKSKLVSDFRKDFQFYKVREINNYHHAHDAYLNAVVGTALIKKYPKLESEFVYGDYKVYDVRKMIAKSEQEIGKATAKYFFYSNIMNFFKTEITLANGEIRKRPLIETNGETGEIVWDKGRDFATVRKVLSMPQVNIVKKTEVQTGGFSKESILPKRNSDKLIARKKDWDPKKYGGFDSPTVAYSVLVVAKVEKGKSKKLKSVKELLGITIMERSSFEKNPIDFLEAKGYKEVKKDLIIKLPKYSLFELENGRKRMLASAGELQKGNELALPSKYVNFLYLASHYEKLKGSPEDNEQKQLFVEQHKHYLDEIIEQISEFSKRVILADANLDKVLSAYNKHRDKPIREQAENIIHLFTLTNLGAPAAFKYFDTTIDRKRYTSTKEVLDATLIHQSITGLYETRIDLSQLGGDGGPAPGSSGGGGGTVSLQDEHRLFDIPVTTSLPDVWLQDFPQAWAETGGLGRAKCQAPIIIDLKPTAVPVSIKQYPMSLEAHMGIRQHIIKFLELGVLRPCRSPWNTPLLPVKKPGTQDYRPVQDLREINKRTVDIHPTVPNPYNLLSTLKPDYSWYTVLDLKDAFFCLPLAPQSQELFAFEWKDPERGISGQLTWTRLPQGFKNSPTLFNEALHRDLTDFRTQHPEVTLLQYVDDLLLAAPTKKACTQGTRHLLQELGEKGYRASAKKAQICQTKVTYLGYILSEGKRWLTPGRIETVARIPPPRNPREVREFLGTAGFCRLWIPGFAELAAPLYALTKPSTPFTWQTEHQLAFEALKKALLSAPALGLPDTSKPFTLFLDERQGIAKGVLTQKLGPWKRPVAYLSKKLDPVAAGWPPCLRIMAATAMLVKDSAKLTLGQPLTVITPHTLEAIVRQPPDRWITNARLTHYQALLLDTDRVQFGPPVTLNPATLLPVPENQPSPHDCRQVLAETHGTREDLKDQELPDADHTWYTDGSSYLDSGTRRAGAAVVDGHNTIWAQSLPPGTSAQKAELIALTKALELSKGKKANIYTDSRYAFATAHTHGSIYERRGWLTSEGKEIKNKAEIIALLKALFLPQEVAIIHCPGHQKGQDPVAVGNRQADRVARQAAMAEVLTLATEPDNTSHITAGKRTADGSEFEKRTADGSEFESPKKKAKVE

SEQ ID NO: 1569 - protein, 2099 aa, synthetic construct
MPAAKRVKLDGGDKKYSIGLDIGTNSVGWAVITDEYKVPSKKFKVLGNTDRHSIKKNLIGALLFDSGETAEATRLKRTARRRYTRRKNRICYLQEIFSNEMAKVDDSFFHRLEESFLVEEDKKHERHPIFGNIVDEVAYHEKYPTIYHLRKKLVDSTDKADLRLIYLALAHMIKFRGHFLIEGDLNPDNSDVDKLFIQLVQTYNQLFEENPINASGVDAKAILSARLSKSRRLENLIAQLPGEKKNGLFGNLIALSLGLTPNFKSNFDLAEDAKLQLSKDTYDDDLDNLLAQIGDQYADLFLAAKNLSDAILLSDILRVNTEITKAPLSASMIKRYDEHHQDLTLLKALVRQQLPEKYKEIFFDQSKNGYAGYIDGGASQEEFYKFIKPILEKMDGTEELLVKLNREDLLRKQRTFDNGSIPHQIHLGELHAILRRQEDFYPFLKDNREKIEKILTFRIPYYVGPLARGNSRFAWMTRKSEETITPWNFEEVVDKGASAQSFIERMTNFDKNLPNEKVLPKHSLLYEYFTVYNELTKVKYVTEGMRKPAFLSGEQKKAIVDLLFKTNRKVTVKQLKEDYFKKIECFDSVEISGVEDRFNASLGTYHDLLKIIKDKDFLDNEENEDILEDIVLTLTLFEDREMIEERLKTYAHLFDDKVMKQLKRRRYTGWGRLSRKLINGIRDKQSGKTILDFLKSDGFANRNFMQLIHDDSLTFKEDIQKAQVSGQGDSLHEHIANLAGSPAIKKGILQTVKVVDELVKVMGRHKPENIVIEMARENQTTQKGQKNSRERMKRIEEGIKELGSQILKEHPVENTQLQNEKLYLYYLQNGRDMYVDQELDINRLSDYDVDHIVPQSFLKDDSIDNKVLTRSDKARGKSDNVPSEEVVKKMKNYWRQLLNAKLITQRKFDNLTKAERGGLSELDKAGFIKRQLVETRQITKHVAQILDSRMNTKYDENDKLIREVKVITLKSKLVSDFRKDFQFYKVREINNYHHAHDAYLNAVVGTALIKKYPKLESEFVYGDYKVYDVRKMIAKSEQEIGKATAKYFFYSNIMNFFKTEITLANGEIRKRPLIETNGETGEIVWDKGRDFATVRKVLSMPQVNIVKKTEVQTGGFSKESILPKRNSDKLIARKKDWDPKKYGGFDSPTVAYSVLVVAKVEKGKSKKLKSVKELLGITIMERSSFEKNPIDFLEAKGYKEVKKDLIIKLPKYSLFELENGRKRMLASAGELQKGNELALPSKYVNFLYLASHYEKLKGSPEDNEQKQLFVEQHKHYLDEIIEQISEFSKRVILADANLDKVLSAYNKHRDKPIREQAENIIHLFTLTNLGAPAAFKYFDTTIDRKRYTSTKEVLDATLIHQSITGLYETRIDLSQLGGDGGPAPEAAAKGGTVSLQDEHRLFDIPVTTSLPDVWLQDFPQAWAETGGLGRAKCQAPIIIDLKPTAVPVSIKQYPMSLEAHMGIRQHIIKFLELGVLRPCRSPWNTPLLPVKKPGTQDYRPVQDLREINKRTVDIHPTVPNPYNLLSTLKPDYSWYTVLDLKDAFFCLPLAPQSQELFAFEWKDPERGISGQLTWTRLPQGFKNSPTLFNEALHRDLTDFRTQHPEVTLLQYVDDLLLAAPTKKACTQGTRHLLQELGEKGYRASAKKAQICQTKVTYLGYILSEGKRWLTPGRIETVARIPPPRNPREVREFLGTAGFCRLWIPGFAELAAPLYALTKPSTPFTWQTEHQLAFEALKKALLSAPALGLPDTSKPFTLFLDERQGIAKGVLTQKLGPWKRPVAYLSKKLDPVAAGWPPCLRIMAATAMLVKDSAKLTLGQPLTVITPHTLEAIVRQPPDRWITNARLTHYQALLLDTDRVQFGPPVTLNPATLLPVPENQPSPHDCRQVLAETHGTREDLKDQELPDADHTWYTDGSSYLDSGTRRAGAAVVDGHNTIWAQSLPPGTSAQKAELIALTKALELSKGKKANIYTDSRYAFATAHTHGSIYERRGWLTSEGKEIKNKAEIIALLKALFLPQEVAIIHCPGHQKGQDPVAVGNRQADRVARQAAMAEVLTLATEPDNTSHITAGKRTADGSEFEKRTADGSEFESPKKKAKVE

SEQ ID NO: 1570 - protein, 2107 aa, synthetic construct
MPAAKRVKLDGGDKKYSIGLDIGTNSVGWAVITDEYKVPSKKFKVLGNTDRHSIKKNLIGALLFDSGETAEATRLKRTARRRYTRRKNRICYLQEIFSNEMAKVDDSFFHRLEESFLVEEDKKHERHPIFGNIVDEVAYHEKYPTIYHLRKKLVDSTDKADLRLIYLALAHMIKFRGHFLIEGDLNPDNSDVDKLFIQLVQTYNQLFEENPINASGVDAKAILSARLSKSRRLENLIAQLPGEKKNGLFGNLIALSLGLTPNFKSNFDLAEDAKLQLSKDTYDDDLDNLLAQIGDQYADLFLAAKNLSDAILLSDILRVNTEITKAPLSASMIKRYDEHHQDLTLLKALVRQQLPEKYKEIFFDQSKNGYAGYIDGGASQEEFYKFIKPILEKMDGTEELLVKLNREDLLRKQRTFDNGSIPHQIHLGELHAILRRQEDFYPFLKDNREKIEKILTFRIPYYVGPLARGNSRFAWMTRKSEETITPWNFEEVVDKGASAQSFIERMTNFDKNLPNEKVLPKHSLLYEYFTVYNELTKVKYVTEGMRKPAFLSGEQKKAIVDLLFKTNRKVTVKQLKEDYFKKIECFDSVEISGVEDRFNASLGTYHDLLKIIKDKDFLDNEENEDILEDIVLTLTLFEDREMIEERLKTYAHLFDDKVMKQLKRRRYTGWGRLSRKLINGIRDKQSGKTILDFLKSDGFANRNFMQLIHDDSLTFKEDIQKAQVSGQGDSLHEHIANLAGSPAIKKGILQTVKVVDELVKVMGRHKPENIVIEMARENQTTQKGQKNSRERMKRIEEGIKELGSQILKEHPVENTQLQNEKLYLYYLQNGRDMYVDQELDINRLSDYDVDHIVPQSFLKDDSIDNKVLTRSDKARGKSDNVPSEEVVKKMKNYWRQLLNAKLITQRKFDNLTKAERGGLSELDKAGFIKRQLVETRQITKHVAQILDSRMNTKYDENDKLIREVKVITLKSKLVSDFRKDFQFYKVREINNYHHAHDAYLNAVVGTALIKKYPKLESEFVYGDYKVYDVRKMIAKSEQEIGKATAKYFFYSNIMNFFKTEITLANGEIRKRPLIETNGETGEIVWDKGRDFATVRKVLSMPQVNIVKKTEVQTGGFSKESILPKRNSDKLIARKKDWDPKKYGGFDSPTVAYSVLVVAKVEKGKSKKLKSVKELLGITIMERSSFEKNPIDFLEAKGYKEVKKDLIIKLPKYSLFELENGRKRMLASAGELQKGNELALPSKYVNFLYLASHYEKLKGSPEDNEQKQLFVEQHKHYLDEIIEQISEFSKRVILADANLDKVLSAYNKHRDKPIREQAENIIHLFTLTNLGAPAAFKYFDTTIDRKRYTSTKEVLDATLIHQSITGLYETRIDLSQLGGDGGSGSETPGTSESATPESGGTVSLQDEHRLFDIPVTTSLPDVWLQDFPQAWAETGGLGRAKCQAPIIIDLKPTAVPVSIKQYPMSLEAHMGIRQHIIKFLELGVLRPCRSPWNTPLLPVKKPGTQDYRPVQDLREINKRTVDIHPTVPNPYNLLSTLKPDYSWYTVLDLKDAFFCLPLAPQSQELFAFEWKDPERGISGQLTWTRLPQGFKNSPTLFNEALHRDLTDFRTQHPEVTLLQYVDDLLLAAPTKKACTQGTRHLLQELGEKGYRASAKKAQICQTKVTYLGYILSEGKRWLTPGRIETVARIPPPRNPREVREFLGTAGFCRLWIPGFAELAAPLYALTKPSTPFTWQTEHQLAFEALKKALLSAPALGLPDTSKPFTLFLDERQGIAKGVLTQKLGPWKRPVAYLSKKLDPVAAGWPPCLRIMAATAMLVKDSAKLTLGQPLTVITPHTLEAIVRQPPDRWITNARLTHYQALLLDTDRVQFGPPVTLNPATLLPVPENQPSPHDCRQVLAETHGTREDLKDQELPDADHTWYTDGSSYLDSGTRRAGAAVVDGHNTIWAQSLPPGTSAQKAELIALTKALELSKGKKANIYTDSRYAFATAHTHGSIYERRGWLTSEGKEIKNKAEIIALLKALFLPQEVAIIHCPGHQKGQDPVAVGNRQADRVARQAAMAEVLTLATEPDNTSHITAGKRTADGSEFEKRTADGSEFESPKKKAKVE

SEQ ID NO: 1571 - protein, 2102 aa, synthetic construct
MPAAKRVKLDGGDKKYSIGLDIGTNSVGWAVITDEYKVPSKKFKVLGNTDRHSIKKNLIGALLFDSGETAEATRLKRTARRRYTRRKNRICYLQEIFSNEMAKVDDSFFHRLEESFLVEEDKKHERHPIFGNIVDEVAYHEKYPTIYHLRKKLVDSTDKADLRLIYLALAHMIKFRGHFLIEGDLNPDNSDVDKLFIQLVQTYNQLFEENPINASGVDAKAILSARLSKSRRLENLIAQLPGEKKNGLFGNLIALSLGLTPNFKSNFDLAEDAKLQLSKDTYDDDLDNLLAQIGDQYADLFLAAKNLSDAILLSDILRVNTEITKAPLSASMIKRYDEHHQDLTLLKALVRQQLPEKYKEIFFDQSKNGYAGYIDGGASQEEFYKFIKPILEKMDGTEELLVKLNREDLLRKQRTFDNGSIPHQIHLGELHAILRRQEDFYPFLKDNREKIEKILTFRIPYYVGPLARGNSRFAWMTRKSEETITPWNFEEVVDKGASAQSFIERMTNFDKNLPNEKVLPKHSLLYEYFTVYNELTKVKYVTEGMRKPAFLSGEQKKAIVDLLFKTNRKVTVKQLKEDYFKKIECFDSVEISGVEDRFNASLGTYHDLLKIIKDKDFLDNEENEDILEDIVLTLTLFEDREMIEERLKTYAHLFDDKVMKQLKRRRYTGWGRLSRKLINGIRDKQSGKTILDFLKSDGFANRNFMQLIHDDSLTFKEDIQKAQVSGQGDSLHEHIANLAGSPAIKKGILQTVKVVDELVKVMGRHKPENIVIEMARENQTTQKGQKNSRERMKRIEEGIKELGSQILKEHPVENTQLQNEKLYLYYLQNGRDMYVDQELDINRLSDYDVDHIVPQSFLKDDSIDNKVLTRSDKARGKSDNVPSEEVVKKMKNYWRQLLNAKLITQRKFDNLTKAERGGLSELDKAGFIKRQLVETRQITKHVAQILDSRMNTKYDENDKLIREVKVITLKSKLVSDFRKDFQFYKVREINNYHHAHDAYLNAVVGTALIKKYPKLESEFVYGDYKVYDVRKMIAKSEQEIGKATAKYFFYSNIMNFFKTEITLANGEIRKRPLIETNGETGEIVWDKGRDFATVRKVLSMPQVNIVKKTEVQTGGFSKESILPKRNSDKLIARKKDWDPKKYGGFDSPTVAYSVLVVAKVEKGKSKKLKSVKELLGITIMERSSFEKNPIDFLEAKGYKEVKKDLIIKLPKYSLFELENGRKRMLASAGELQKGNELALPSKYVNFLYLASHYEKLKGSPEDNEQKQLFVEQHKHYLDEIIEQISEFSKRVILADANLDKVLSAYNKHRDKPIREQAENIIHLFTLTNLGAPAAFKYFDTTIDRKRYTSTKEVLDATLIHQSITGLYETRIDLSQLGGDGGEAAAKGSSPAPGGTVSLQDEHRLFDIPVTTSLPDVWLQDFPQAWAETGGLGRAKCQAPIIIDLKPTAVPVSIKQYPMSLEAHMGIRQHIIKFLELGVLRPCRSPWNTPLLPVKKPGTQDYRPVQDLREINKRTVDIHPTVPNPYNLLSTLKPDYSWYTVLDLKDAFFCLPLAPQSQELFAFEWKDPERGISGQLTWTRLPQGFKNSPTLFNEALHRDLTDFRTQHPEVTLLQYVDDLLLAAPTKKACTQGTRHLLQELGEKGYRASAKKAQICQTKVTYLGYILSEGKRWLTPGRIETVARIPPPRNPREVREFLGTAGFCRLWIPGFAELAAPLYALTKPSTPFTWQTEHQLAFEALKKALLSAPALGLPDTSKPFTLFLDERQGIAKGVLTQKLGPWKRPVAYLSKKLDPVAAGWPPCLRIMAATAMLVKDSAKLTLGQPLTVITPHTLEAIVRQPPDRWITNARLTHYQALLLDTDRVQFGPPVTLNPATLLPVPENQPSPHDCRQVLAETHGTREDLKDQELPDADHTWYTDGSSYLDSGTRRAGAAVVDGHNTIWAQSLPPGTSAQKAELIALTKALELSKGKKANIYTDSRYAFATAHTHGSIYERRGWLTSEGKEIKNKAEIIALLKALFLPQEVAIIHCPGHQKGQDPVAVGNRQADRVARQAAMAEVLTLATEPDNTSHITAGKRTADGSEFEKRTADGSEFESPKKKAKVE

SEQ ID NO: 1572 - protein, 2097 aa, synthetic construct
MPAAKRVKLDGGDKKYSIGLDIGTNSVGWAVITDEYKVPSKKFKVLGNTDRHSIKKNLIGALLFDSGETAEATRLKRTARRRYTRRKNRICYLQEIFSNEMAKVDDSFFHRLEESFLVEEDKKHERHPIFGNIVDEVAYHEKYPTIYHLRKKLVDSTDKADLRLIYLALAHMIKFRGHFLIEGDLNPDNSDVDKLFIQLVQTYNQLFEENPINASGVDAKAILSARLSKSRRLENLIAQLPGEKKNGLFGNLIALSLGLTPNFKSNFDLAEDAKLQLSKDTYDDDLDNLLAQIGDQYADLFLAAKNLSDAILLSDILRVNTEITKAPLSASMIKRYDEHHQDLTLLKALVRQQLPEKYKEIFFDQSKNGYAGYIDGGASQEEFYKFIKPILEKMDGTEELLVKLNREDLLRKQRTFDNGSIPHQIHLGELHAILRRQEDFYPFLKDNREKIEKILTFRIPYYVGPLARGNSRFAWMTRKSEETITPWNFEEVVDKGASAQSFIERMTNFDKNLPNEKVLPKHSLLYEYFTVYNELTKVKYVTEGMRKPAFLSGEQKKAIVDLLFKTNRKVTVKQLKEDYFKKIECFDSVEISGVEDRFNASLGTYHDLLKIIKDKDFLDNEENEDILEDIVLTLTLFEDREMIEERLKTYAHLFDDKVMKQLKRRRYTGWGRLSRKLINGIRDKQSGKTILDFLKSDGFANRNFMQLIHDDSLTFKEDIQKAQVSGQGDSLHEHIANLAGSPAIKKGILQTVKVVDELVKVMGRHKPENIVIEMARENQTTQKGQKNSRERMKRIEEGIKELGSQILKEHPVENTQLQNEKLYLYYLQNGRDMYVDQELDINRLSDYDVDHIVPQSFLKDDSIDNKVLTRSDKARGKSDNVPSEEVVKKMKNYWRQLLNAKLITQRKFDNLTKAERGGLSELDKAGFIKRQLVETRQITKHVAQILDSRMNTKYDENDKLIREVKVITLKSKLVSDFRKDFQFYKVREINNYHHAHDAYLNAVVGTALIKKYPKLESEFVYGDYKVYDVRKMIAKSEQEIGKATAKYFFYSNIMNFFKTEITLANGEIRKRPLIETNGETGEIVWDKGRDFATVRKVLSMPQVNIVKKTEVQTGGFSKESILPKRNSDKLIARKKDWDPKKYGGFDSPTVAYSVLVVAKVEKGKSKKLKSVKELLGITIMERSSFEKNPIDFLEAKGYKEVKKDLIIKLPKYSLFELENGRKRMLASAGELQKGNELALPSKYVNFLYLASHYEKLKGSPEDNEQKQLFVEQHKHYLDEIIEQISEFSKRVILADANLDKVLSAYNKHRDKPIREQAENIIHLFTLTNLGAPAAFKYFDTTIDRKRYTSTKEVLDATLIHQSITGLYETRIDLSQLGGDGGGGGGGGGGTVSLQDEHRLFDIPVTTSLPDVWLQDFPQAWAETGGLGRAKCQAPIIIDLKPTAVPVSIKQYPMSLEAHMGIRQHIIKFLELGVLRPCRSPWNTPLLPVKKPGTQDYRPVQDLREINKRTVDIHPTVPNPYNLLSTLKPDYSWYTVLDLKDAFFCLPLAPQSQELFAFEWKDPERGISGQLTWTRLPQGFKNSPTLFNEALHRDLTDFRTQHPEVTLLQYVDDLLLAAPTKKACTQGTRHLLQELGEKGYRASAKKAQICQTKVTYLGYILSEGKRWLTPGRIETVARIPPPRNPREVREFLGTAGFCRLWIPGFAELAAPLYALTKPSTPFTWQTEHQLAFEALKKALLSAPALGLPDTSKPFTLFLDERQGIAKGVLTQKLGPWKRPVAYLSKKLDPVAAGWPPCLRIMAATAMLVKDSAKLTLGQPLTVITPHTLEAIVRQPPDRWITNARLTHYQALLLDTDRVQFGPPVTLNPATLLPVPENQPSPHDCRQVLAETHGTREDLKDQELPDADHTWYTDGSSYLDSGTRRAGAAVVDGHNTIWAQSLPPGTSAQKAELIALTKALELSKGKKANIYTDSRYAFATAHTHGSIYERRGWLTSEGKEIKNKAEIIALLKALFLPQEVAIIHCPGHQKGQDPVAVGNRQADRVARQAAMAEVLTLATEPDNTSHITAGKRTADGSEFEKRTADGSEFESPKKKAKVE

SEQ ID NO: 1573 - protein, 2100 aa, synthetic construct
MPAAKRVKLDGGDKKYSIGLDIGTNSVGWAVITDEYKVPSKKFKVLGNTDRHSIKKNLIGALLFDSGETAEATRLKRTARRRYTRRKNRICYLQEIFSNEMAKVDDSFFHRLEESFLVEEDKKHERHPIFGNIVDEVAYHEKYPTIYHLRKKLVDSTDKADLRLIYLALAHMIKFRGHFLIEGDLNPDNSDVDKLFIQLVQTYNQLFEENPINASGVDAKAILSARLSKSRRLENLIAQLPGEKKNGLFGNLIALSLGLTPNFKSNFDLAEDAKLQLSKDTYDDDLDNLLAQIGDQYADLFLAAKNLSDAILLSDILRVNTEITKAPLSASMIKRYDEHHQDLTLLKALVRQQLPEKYKEIFFDQSKNGYAGYIDGGASQEEFYKFIKPILEKMDGTEELLVKLNREDLLRKQRTFDNGSIPHQIHLGELHAILRRQEDFYPFLKDNREKIEKILTFRIPYYVGPLARGNSRFAWMTRKSEETITPWNFEEVVDKGASAQSFIERMTNFDKNLPNEKVLPKHSLLYEYFTVYNELTKVKYVTEGMRKPAFLSGEQKKAIVDLLFKTNRKVTVKQLKEDYFKKIECFDSVEISGVEDRFNASLGTYHDLLKIIKDKDFLDNEENEDILEDIVLTLTLFEDREMIEERLKTYAHLFDDKVMKQLKRRRYTGWGRLSRKLINGIRDKQSGKTILDFLKSDGFANRNFMQLIHDDSLTFKEDIQKAQVSGQGDSLHEHIANLAGSPAIKKGILQTVKVVDELVKVMGRHKPENIVIEMARENQTTQKGQKNSRERMKRIEEGIKELGSQILKEHPVENTQLQNEKLYLYYLQNGRDMYVDQELDINRLSDYDVDHIVPQSFLKDDSIDNKVLTRSDKARGKSDNVPSEEVVKKMKNYWRQLLNAKLITQRKFDNLTKAERGGLSELDKAGFIKRQLVETRQITKHVAQILDSRMNTKYDENDKLIREVKVITLKSKLVSDFRKDFQFYKVREINNYHHAHDAYLNAVVGTALIKKYPKLESEFVYGDYKVYDVRKMIAKSEQEIGKATAKYFFYSNIMNFFKTEITLANGEIRKRPLIETNGETGEIVWDKGRDFATVRKVLSMPQVNIVKKTEVQTGGFSKESILPKRNSDKLIARKKDWDPKKYGGFDSPTVAYSVLVVAKVEKGKSKKLKSVKELLGITIMERSSFEKNPIDFLEAKGYKEVKKDLIIKLPKYSLFELENGRKRMLASAGELQKGNELALPSKYVNFLYLASHYEKLKGSPEDNEQKQLFVEQHKHYLDEIIEQISEFSKRVILADANLDKVLSAYNKHRDKPIREQAENIIHLFTLTNLGAPAAFKYFDTTIDRKRYTSTKEVLDATLIHQSITGLYETRIDLSQLGGDGGGGSGGSGGSGGTVSLQDEHRLFDIPVTTSLPDVWLQDFPQAWAETGGLGRAKCQAPIIIDLKPTAVPVSIKQYPMSLEAHMGIRQHIIKFLELGVLRPCRSPWNTPLLPVKKPGTQDYRPVQDLREINKRTVDIHPTVPNPYNLLSTLKPDYSWYTVLDLKDAFFCLPLAPQSQELFAFEWKDPERGISGQLTWTRLPQGFKNSPTLFNEALHRDLTDFRTQHPEVTLLQYVDDLLLAAPTKKACTQGTRHLLQELGEKGYRASAKKAQICQTKVTYLGYILSEGKRWLTPGRIETVARIPPPRNPREVREFLGTAGFCRLWIPGFAELAAPLYALTKPSTPFTWQTEHQLAFEALKKALLSAPALGLPDTSKPFTLFLDERQGIAKGVLTQKLGPWKRPVAYLSKKLDPVAAGWPPCLRIMAATAMLVKDSAKLTLGQPLTVITPHTLEAIVRQPPDRWITNARLTHYQALLLDTDRVQFGPPVTLNPATLLPVPENQPSPHDCRQVLAETHGTREDLKDQELPDADHTWYTDGSSYLDSGTRRAGAAVVDGHNTIWAQSLPPGTSAQKAELIALTKALELSKGKKANIYTDSRYAFATAHTHGSIYERRGWLTSEGKEIKNKAEIIALLKALFLPQEVAIIHCPGHQKGQDPVAVGNRQADRVARQAAMAEVLTLATEPDNTSHITAGKRTADGSEFEKRTADGSEFESPKKKAKVE

SEQ ID NO: 1574 - protein, 2102 aa, synthetic construct
MPAAKRVKLDGGDKKYSIGLDIGTNSVGWAVITDEYKVPSKKFKVLGNTDRHSIKKNLIGALLFDSGETAEATRLKRTARRRYTRRKNRICYLQEIFSNEMAKVDDSFFHRLEESFLVEEDKKHERHPIFGNIVDEVAYHEKYPTIYHLRKKLVDSTDKADLRLIYLALAHMIKFRGHFLIEGDLNPDNSDVDKLFIQLVQTYNQLFEENPINASGVDAKAILSARLSKSRRLENLIAQLPGEKKNGLFGNLIALSLGLTPNFKSNFDLAEDAKLQLSKDTYDDDLDNLLAQIGDQYADLFLAAKNLSDAILLSDILRVNTEITKAPLSASMIKRYDEHHQDLTLLKALVRQQLPEKYKEIFFDQSKNGYAGYIDGGASQEEFYKFIKPILEKMDGTEELLVKLNREDLLRKQRTFDNGSIPHQIHLGELHAILRRQEDFYPFLKDNREKIEKILTFRIPYYVGPLARGNSRFAWMTRKSEETITPWNFEEVVDKGASAQSFIERMTNFDKNLPNEKVLPKHSLLYEYFTVYNELTKVKYVTEGMRKPAFLSGEQKKAIVDLLFKTNRKVTVKQLKEDYFKKIECFDSVEISGVEDRFNASLGTYHDLLKIIKDKDFLDNEENEDILEDIVLTLTLFEDREMIEERLKTYAHLFDDKVMKQLKRRRYTGWGRLSRKLINGIRDKQSGKTILDFLKSDGFANRNFMQLIHDDSLTFKEDIQKAQVSGQGDSLHEHIANLAGSPAIKKGILQTVKVVDELVKVMGRHKPENIVIEMARENQTTQKGQKNSRERMKRIEEGIKELGSQILKEHPVENTQLQNEKLYLYYLQNGRDMYVDQELDINRLSDYDVDHIVPQSFLKDDSIDNKVLTRSDKARGKSDNVPSEEVVKKMKNYWRQLLNAKLITQRKFDNLTKAERGGLSELDKAGFIKRQLVETRQITKHVAQILDSRMNTKYDENDKLIREVKVITLKSKLVSDFRKDFQFYKVREINNYHHAHDAYLNAVVGTALIKKYPKLESEFVYGDYKVYDVRKMIAKSEQEIGKATAKYFFYSNIMNFFKTEITLANGEIRKRPLIETNGETGEIVWDKGRDFATVRKVLSMPQVNIVKKTEVQTGGFSKESILPKRNSDKLIARKKDWDPKKYGGFDSPTVAYSVLVVAKVEKGKSKKLKSVKELLGITIMERSSFEKNPIDFLEAKGYKEVKKDLIIKLPKYSLFELENGRKRMLASAGELQKGNELALPSKYVNFLYLASHYEKLKGSPEDNEQKQLFVEQHKHYLDEIIEQISEFSKRVILADANLDKVLSAYNKHRDKPIREQAENIIHLFTLTNLGAPAAFKYFDTTIDRKRYTSTKEVLDATLIHQSITGLYETRIDLSQLGGDGGGGGEAAAKGSSGGTVSLQDEHRLFDIPVTTSLPDVWLQDFPQAWAETGGLGRAKCQAPIIIDLKPTAVPVSIKQYPMSLEAHMGIRQHIIKFLELGVLRPCRSPWNTPLLPVKKPGTQDYRPVQDLREINKRTVDIHPTVPNPYNLLSTLKPDYSWYTVLDLKDAFFCLPLAPQSQELFAFEWKDPERGISGQLTWTRLPQGFKNSPTLFNEALHRDLTDFRTQHPEVTLLQYVDDLLLAAPTKKACTQGTRHLLQELGEKGYRASAKKAQICQTKVTYLGYILSEGKRWLTPGRIETVARIPPPRNPREVREFLGTAGFCRLWIPGFAELAAPLYALTKPSTPFTWQTEHQLAFEALKKALLSAPALGLPDTSKPFTLFLDERQGIAKGVLTQKLGPWKRPVAYLSKKLDPVAAGWPPCLRIMAATAMLVKDSAKLTLGQPLTVITPHTLEAIVRQPPDRWITNARLTHYQALLLDTDRVQFGPPVTLNPATLLPVPENQPSPHDCRQVLAETHGTREDLKDQELPDADHTWYTDGSSYLDSGTRRAGAAVVDGHNTIWAQSLPPGTSAQKAELIALTKALELSKGKKANIYTDSRYAFATAHTHGSIYERRGWLTSEGKEIKNKAEIIALLKALFLPQEVAIIHCPGHQKGQDPVAVGNRQADRVARQAAMAEVLTLATEPDNTSHITAGKRTADGSEFEKRTADGSEFESPKKKAKVE

SEQ ID NO: 1575 - protein, 2102 aa, synthetic construct
MPAAKRVKLDGGDKKYSIGLDIGTNSVGWAVITDEYKVPSKKFKVLGNTDRHSIKKNLIGALLFDSGETAEATRLKRTARRRYTRRKNRICYLQEIFSNEMAKVDDSFFHRLEESFLVEEDKKHERHPIFGNIVDEVAYHEKYPTIYHLRKKLVDSTDKADLRLIYLALAHMIKFRGHFLIEGDLNPDNSDVDKLFIQLVQTYNQLFEENPINASGVDAKAILSARLSKSRRLENLIAQLPGEKKNGLFGNLIALSLGLTPNFKSNFDLAEDAKLQLSKDTYDDDLDNLLAQIGDQYADLFLAAKNLSDAILLSDILRVNTEITKAPLSASMIKRYDEHHQDLTLLKALVRQQLPEKYKEIFFDQSKNGYAGYIDGGASQEEFYKFIKPILEKMDGTEELLVKLNREDLLRKQRTFDNGSIPHQIHLGELHAILRRQEDFYPFLKDNREKIEKILTFRIPYYVGPLARGNSRFAWMTRKSEETITPWNFEEVVDKGASAQSFIERMTNFDKNLPNEKVLPKHSLLYEYFTVYNELTKVKYVTEGMRKPAFLSGEQKKAIVDLLFKTNRKVTVKQLKEDYFKKIECFDSVEISGVEDRFNASLGTYHDLLKIIKDKDFLDNEENEDILEDIVLTLTLFEDREMIEERLKTYAHLFDDKVMKQLKRRRYTGWGRLSRKLINGIRDKQSGKTILDFLKSDGFANRNFMQLIHDDSLTFKEDIQKAQVSGQGDSLHEHIANLAGSPAIKKGILQTVKVVDELVKVMGRHKPENIVIEMARENQTTQKGQKNSRERMKRIEEGIKELGSQILKEHPVENTQLQNEKLYLYYLQNGRDMYVDQELDINRLSDYDVDHIVPQSFLKDDSIDNKVLTRSDKARGKSDNVPSEEVVKKMKNYWRQLLNAKLITQRKFDNLTKAERGGLSELDKAGFIKRQLVETRQITKHVAQILDSRMNTKYDENDKLIREVKVITLKSKLVSDFRKDFQFYKVREINNYHHAHDAYLNAVVGTALIKKYPKLESEFVYGDYKVYDVRKMIAKSEQEIGKATAKYFFYSNIMNFFKTEITLANGEIRKRPLIETNGETGEIVWDKGRDFATVRKVLSMPQVNIVKKTEVQTGGFSKESILPKRNSDKLIARKKDWDPKKYGGFDSPTVAYSVLVVAKVEKGKSKKLKSVKELLGITIMERSSFEKNPIDFLEAKGYKEVKKDLIIKLPKYSLFELENGRKRMLASAGELQKGNELALPSKYVNFLYLASHYEKLKGSPEDNEQKQLFVEQHKHYLDEIIEQISEFSKRVILADANLDKVLSAYNKHRDKPIREQAENIIHLFTLTNLGAPAAFKYFDTTIDRKRYTSTKEVLDATLIHQSITGLYETRIDLSQLGGDGGPAPEAAAKGSSGGTVSLQDEHRLFDIPVTTSLPDVWLQDFPQAWAETGGLGRAKCQAPIIIDLKPTAVPVSIKQYPMSLEAHMGIRQHIIKFLELGVLRPCRSPWNTPLLPVKKPGTQDYRPVQDLREINKRTVDIHPTVPNPYNLLSTLKPDYSWYTVLDLKDAFFCLPLAPQSQELFAFEWKDPERGISGQLTWTRLPQGFKNSPTLFNEALHRDLTDFRTQHPEVTLLQYVDDLLLAAPTKKACTQGTRHLLQELGEKGYRASAKKAQICQTKVTYLGYILSEGKRWLTPGRIETVARIPPPRNPREVREFLGTAGFCRLWIPGFAELAAPLYALTKPSTPFTWQTEHQLAFEALKKALLSAPALGLPDTSKPFTLFLDERQGIAKGVLTQKLGPWKRPVAYLSKKLDPVAAGWPPCLRIMAATAMLVKDSAKLTLGQPLTVITPHTLEAIVRQPPDRWITNARLTHYQALLLDTDRVQFGPPVTLNPATLLPVPENQPSPHDCRQVLAETHGTREDLKDQELPDADHTWYTDGSSYLDSGTRRAGAAVVDGHNTIWAQSLPPGTSAQKAELIALTKALELSKGKKANIYTDSRYAFATAHTHGSIYERRGWLTSEGKEIKNKAEIIALLKALFLPQEVAIIHCPGHQKGQDPVAVGNRQADRVARQAAMAEVLTLATEPDNTSHITAGKRTADGSEFEKRTADGSEFESPKKKAKVE

SEQ ID NO: 1576 - protein, 2102 aa, synthetic construct
MPAAKRVKLDGGDKKYSIGLDIGTNSVGWAVITDEYKVPSKKFKVLGNTDRHSIKKNLIGALLFDSGETAEATRLKRTARRRYTRRKNRICYLQEIFSNEMAKVDDSFFHRLEESFLVEEDKKHERHPIFGNIVDEVAYHEKYPTIYHLRKKLVDSTDKADLRLIYLALAHMIKFRGHFLIEGDLNPDNSDVDKLFIQLVQTYNQLFEENPINASGVDAKAILSARLSKSRRLENLIAQLPGEKKNGLFGNLIALSLGLTPNFKSNFDLAEDAKLQLSKDTYDDDLDNLLAQIGDQYADLFLAAKNLSDAILLSDILRVNTEITKAPLSASMIKRYDEHHQDLTLLKALVRQQLPEKYKEIFFDQSKNGYAGYIDGGASQEEFYKFIKPILEKMDGTEELLVKLNREDLLRKQRTFDNGSIPHQIHLGELHAILRRQEDFYPFLKDNREKIEKILTFRIPYYVGPLARGNSRFAWMTRKSEETITPWNFEEVVDKGASAQSFIERMTNFDKNLPNEKVLPKHSLLYEYFTVYNELTKVKYVTEGMRKPAFLSGEQKKAIVDLLFKTNRKVTVKQLKEDYFKKIECFDSVEISGVEDRFNASLGTYHDLLKIIKDKDFLDNEENEDILEDIVLTLTLFEDREMIEERLKTYAHLFDDKVMKQLKRRRYTGWGRLSRKLINGIRDKQSGKTILDFLKSDGFANRNFMQLIHDDSLTFKEDIQKAQVSGQGDSLHEHIANLAGSPAIKKGILQTVKVVDELVKVMGRHKPENIVIEMARENQTTQKGQKNSRERMKRIEEGIKELGSQILKEHPVENTQLQNEKLYLYYLQNGRDMYVDQELDINRLSDYDVDHIVPQSFLKDDSIDNKVLTRSDKARGKSDNVPSEEVVKKMKNYWRQLLNAKLITQRKFDNLTKAERGGLSELDKAGFIKRQLVETRQITKHVAQILDSRMNTKYDENDKLIREVKVITLKSKLVSDFRKDFQFYKVREINNYHHAHDAYLNAVVGTALIKKYPKLESEFVYGDYKVYDVRKMIAKSEQEIGKATAKYFFYSNIMNFFKTEITLANGEIRKRPLIETNGETGEIVWDKGRDFATVRKVLSMPQVNIVKKTEVQTGGFSKESILPKRNSDKLIARKKDWDPKKYGGFDSPTVAYSVLVVAKVEKGKSKKLKSVKELLGITIMERSSFEKNPIDFLEAKGYKEVKKDLIIKLPKYSLFELENGRKRMLASAGELQKGNELALPSKYVNFLYLASHYEKLKGSPEDNEQKQLFVEQHKHYLDEIIEQISEFSKRVILADANLDKVLSAYNKHRDKPIREQAENIIHLFTLTNLGAPAAFKYFDTTIDRKRYTSTKEVLDATLIHQSITGLYETRIDLSQLGGDGGEAAAKGSSGGGGGTVSLQDEHRLFDIPVTTSLPDVWLQDFPQAWAETGGLGRAKCQAPIIIDLKPTAVPVSIKQYPMSLEAHMGIRQHIIKFLELGVLRPCRSPWNTPLLPVKKPGTQDYRPVQDLREINKRTVDIHPTVPNPYNLLSTLKPDYSWYTVLDLKDAFFCLPLAPQSQELFAFEWKDPERGISGQLTWTRLPQGFKNSPTLFNEALHRDLTDFRTQHPEVTLLQYVDDLLLAAPTKKACTQGTRHLLQELGEKGYRASAKKAQICQTKVTYLGYILSEGKRWLTPGRIETVARIPPPRNPREVREFLGTAGFCRLWIPGFAELAAPLYALTKPSTPFTWQTEHQLAFEALKKALLSAPALGLPDTSKPFTLFLDERQGIAKGVLTQKLGPWKRPVAYLSKKLDPVAAGWPPCLRIMAATAMLVKDSAKLTLGQPLTVITPHTLEAIVRQPPDRWITNARLTHYQALLLDTDRVQFGPPVTLNPATLLPVPENQPSPHDCRQVLAETHGTREDLKDQELPDADHTWYTDGSSYLDSGTRRAGAAVVDGHNTIWAQSLPPGTSAQKAELIALTKALELSKGKKANIYTDSRYAFATAHTHGSIYERRGWLTSEGKEIKNKAEIIALLKALFLPQEVAIIHCPGHQKGQDPVAVGNRQADRVARQAAMAEVLTLATEPDNTSHITAGKRTADGSEFEKRTADGSEFESPKKKAKVE

SEQ ID NO: 1577 - protein, 2102 aa, synthetic construct
MPAAKRVKLDGGDKKYSIGLDIGTNSVGWAVITDEYKVPSKKFKVLGNTDRHSIKKNLIGALLFDSGETAEATRLKRTARRRYTRRKNRICYLQEIFSNEMAKVDDSFFHRLEESFLVEEDKKHERHPIFGNIVDEVAYHEKYPTIYHLRKKLVDSTDKADLRLIYLALAHMIKFRGHFLIEGDLNPDNSDVDKLFIQLVQTYNQLFEENPINASGVDAKAILSARLSKSRRLENLIAQLPGEKKNGLFGNLIALSLGLTPNFKSNFDLAEDAKLQLSKDTYDDDLDNLLAQIGDQYADLFLAAKNLSDAILLSDILRVNTEITKAPLSASMIKRYDEHHQDLTLLKALVRQQLPEKYKEIFFDQSKNGYAGYIDGGASQEEFYKFIKPILEKMDGTEELLVKLNREDLLRKQRTFDNGSIPHQIHLGELHAILRRQEDFYPFLKDNREKIEKILTFRIPYYVGPLARGNSRFAWMTRKSEETITPWNFEEVVDKGASAQSFIERMTNFDKNLPNEKVLPKHSLLYEYFTVYNELTKVKYVTEGMRKPAFLSGEQKKAIVDLLFKTNRKVTVKQLKEDYFKKIECFDSVEISGVEDRFNASLGTYHDLLKIIKDKDFLDNEENEDILEDIVLTLTLFEDREMIEERLKTYAHLFDDKVMKQLKRRRYTGWGRLSRKLINGIRDKQSGKTILDFLKSDGFANRNFMQLIHDDSLTFKEDIQKAQVSGQGDSLHEHIANLAGSPAIKKGILQTVKVVDELVKVMGRHKPENIVIEMARENQTTQKGQKNSRERMKRIEEGIKELGSQILKEHPVENTQLQNEKLYLYYLQNGRDMYVDQELDINRLSDYDVDHIVPQSFLKDDSIDNKVLTRSDKARGKSDNVPSEEVVKKMKNYWRQLLNAKLITQRKFDNLTKAERGGLSELDKAGFIKRQLVETRQITKHVAQILDSRMNTKYDENDKLIREVKVITLKSKLVSDFRKDFQFYKVREINNYHHAHDAYLNAVVGTALIKKYPKLESEFVYGDYKVYDVRKMIAKSEQEIGKATAKYFFYSNIMNFFKTEITLANGEIRKRPLIETNGETGEIVWDKGRDFATVRKVLSMPQVNIVKKTEVQTGGFSKESILPKRNSDKLIARKKDWDPKKYGGFDSPTVAYSVLVVAKVEKGKSKKLKSVKELLGITIMERSSFEKNPIDFLEAKGYKEVKKDLIIKLPKYSLFELENGRKRMLASAGELQKGNELALPSKYVNFLYLASHYEKLKGSPEDNEQKQLFVEQHKHYLDEIIEQISEFSKRVILADANLDKVLSAYNKHRDKPIREQAENIIHLFTLTNLGAPAAFKYFDTTIDRKRYTSTKEVLDATLIHQSITGLYETRIDLSQLGGDGGEAAAKGGGGGSGGTVSLQDEHRLFDIPVTTSLPDVWLQDFPQAWAETGGLGRAKCQAPIIIDLKPTAVPVSIKQYPMSLEAHMGIRQHIIKFLELGVLRPCRSPWNTPLLPVKKPGTQDYRPVQDLREINKRTVDIHPTVPNPYNLLSTLKPDYSWYTVLDLKDAFFCLPLAPQSQELFAFEWKDPERGISGQLTWTRLPQGFKNSPTLFNEALHRDLTDFRTQHPEVTLLQYVDDLLLAAPTKKACTQGTRHLLQELGEKGYRASAKKAQICQTKVTYLGYILSEGKRWLTPGRIETVARIPPPRNPREVREFLGTAGFCRLWIPGFAELAAPLYALTKPSTPFTWQTEHQLAFEALKKALLSAPALGLPDTSKPFTLFLDERQGIAKGVLTQKLGPWKRPVAYLSKKLDPVAAGWPPCLRIMAATAMLVKDSAKLTLGQPLTVITPHTLEAIVRQPPDRWITNARLTHYQALLLDTDRVQFGPPVTLNPATLLPVPENQPSPHDCRQVLAETHGTREDLKDQELPDADHTWYTDGSSYLDSGTRRAGAAVVDGHNTIWAQSLPPGTSAQKAELIALTKALELSKGKKANIYTDSRYAFATAHTHGSIYERRGWLTSEGKEIKNKAEIIALLKALFLPQEVAIIHCPGHQKGQDPVAVGNRQADRVARQAAMAEVLTLATEPDNTSHITAGKRTADGSEFEKRTADGSEFESPKKKAKVE

SEQ ID NO: 1578 - protein, 2100 aa, synthetic construct
MPAAKRVKLDGGDKKYSIGLDIGTNSVGWAVITDEYKVPSKKFKVLGNTDRHSIKKNLIGALLFDSGETAEATRLKRTARRRYTRRKNRICYLQEIFSNEMAKVDDSFFHRLEESFLVEEDKKHERHPIFGNIVDEVAYHEKYPTIYHLRKKLVDSTDKADLRLIYLALAHMIKFRGHFLIEGDLNPDNSDVDKLFIQLVQTYNQLFEENPINASGVDAKAILSARLSKSRRLENLIAQLPGEKKNGLFGNLIALSLGLTPNFKSNFDLAEDAKLQLSKDTYDDDLDNLLAQIGDQYADLFLAAKNLSDAILLSDILRVNTEITKAPLSASMIKRYDEHHQDLTLLKALVRQQLPEKYKEIFFDQSKNGYAGYIDGGASQEEFYKFIKPILEKMDGTEELLVKLNREDLLRKQRTFDNGSIPHQIHLGELHAILRRQEDFYPFLKDNREKIEKILTFRIPYYVGPLARGNSRFAWMTRKSEETITPWNFEEVVDKGASAQSFIERMTNFDKNLPNEKVLPKHSLLYEYFTVYNELTKVKYVTEGMRKPAFLSGEQKKAIVDLLFKTNRKVTVKQLKEDYFKKIECFDSVEISGVEDRFNASLGTYHDLLKIIKDKDFLDNEENEDILEDIVLTLTLFEDREMIEERLKTYAHLFDDKVMKQLKRRRYTGWGRLSRKLINGIRDKQSGKTILDFLKSDGFANRNFMQLIHDDSLTFKEDIQKAQVSGQGDSLHEHIANLAGSPAIKKGILQTVKVVDELVKVMGRHKPENIVIEMARENQTTQKGQKNSRERMKRIEEGIKELGSQILKEHPVENTQLQNEKLYLYYLQNGRDMYVDQELDINRLSDYDVDHIVPQSFLKDDSIDNKVLTRSDKARGKSDNVPSEEVVKKMKNYWRQLLNAKLITQRKFDNLTKAERGGLSELDKAGFIKRQLVETRQITKHVAQILDSRMNTKYDENDKLIREVKVITLKSKLVSDFRKDFQFYKVREINNYHHAHDAYLNAVVGTALIKKYPKLESEFVYGDYKVYDVRKMIAKSEQEIGKATAKYFFYSNIMNFFKTEITLANGEIRKRPLIETNGETGEIVWDKGRDFATVRKVLSMPQVNIVKKTEVQTGGFSKESILPKRNSDKLIARKKDWDPKKYGGFDSPTVAYSVLVVAKVEKGKSKKLKSVKELLGITIMERSSFEKNPIDFLEAKGYKEVKKDLIIKLPKYSLFELENGRKRMLASAGELQKGNELALPSKYVNFLYLASHYEKLKGSPEDNEQKQLFVEQHKHYLDEIIEQISEFSKRVILADANLDKVLSAYNKHRDKPIREQAENIIHLFTLTNLGAPAAFKYFDTTIDRKRYTSTKEVLDATLIHQSITGLYETRIDLSQLGGDGGGGGGSSPAPGGTVSLQDEHRLFDIPVTTSLPDVWLQDFPQAWAETGGLGRAKCQAPIIIDLKPTAVPVSIKQYPMSLEAHMGIRQHIIKFLELGVLRPCRSPWNTPLLPVKKPGTQDYRPVQDLREINKRTVDIHPTVPNPYNLLSTLKPDYSWYTVLDLKDAFFCLPLAPQSQELFAFEWKDPERGISGQLTWTRLPQGFKNSPTLFNEALHRDLTDFRTQHPEVTLLQYVDDLLLAAPTKKACTQGTRHLLQELGEKGYRASAKKAQICQTKVTYLGYILSEGKRWLTPGRIETVARIPPPRNPREVREFLGTAGFCRLWIPGFAELAAPLYALTKPSTPFTWQTEHQLAFEALKKALLSAPALGLPDTSKPFTLFLDERQGIAKGVLTQKLGPWKRPVAYLSKKLDPVAAGWPPCLRIMAATAMLVKDSAKLTLGQPLTVITPHTLEAIVRQPPDRWITNARLTHYQALLLDTDRVQFGPPVTLNPATLLPVPENQPSPHDCRQVLAETHGTREDLKDQELPDADHTWYTDGSSYLDSGTRRAGAAVVDGHNTIWAQSLPPGTSAQKAELIALTKALELSKGKKANIYTDSRYAFATAHTHGSIYERRGWLTSEGKEIKNKAEIIALLKALFLPQEVAIIHCPGHQKGQDPVAVGNRQADRVARQAAMAEVLTLATEPDNTSHITAGKRTADGSEFEKRTADGSEFESPKKKAKVE

SEQ ID NO: 1579 - protein, 2102 aa, synthetic construct
MPAAKRVKLDGGDKKYSIGLDIGTNSVGWAVITDEYKVPSKKFKVLGNTDRHSIKKNLIGALLFDSGETAEATRLKRTARRRYTRRKNRICYLQEIFSNEMAKVDDSFFHRLEESFLVEEDKKHERHPIFGNIVDEVAYHEKYPTIYHLRKKLVDSTDKADLRLIYLALAHMIKFRGHFLIEGDLNPDNSDVDKLFIQLVQTYNQLFEENPINASGVDAKAILSARLSKSRRLENLIAQLPGEKKNGLFGNLIALSLGLTPNFKSNFDLAEDAKLQLSKDTYDDDLDNLLAQIGDQYADLFLAAKNLSDAILLSDILRVNTEITKAPLSASMIKRYDEHHQDLTLLKALVRQQLPEKYKEIFFDQSKNGYAGYIDGGASQEEFYKFIKPILEKMDGTEELLVKLNREDLLRKQRTFDNGSIPHQIHLGELHAILRRQEDFYPFLKDNREKIEKILTFRIPYYVGPLARGNSRFAWMTRKSEETITPWNFEEVVDKGASAQSFIERMTNFDKNLPNEKVLPKHSLLYEYFTVYNELTKVKYVTEGMRKPAFLSGEQKKAIVDLLFKTNRKVTVKQLKEDYFKKIECFDSVEISGVEDRFNASLGTYHDLLKIIKDKDFLDNEENEDILEDIVLTLTLFEDREMIEERLKTYAHLFDDKVMKQLKRRRYTGWGRLSRKLINGIRDKQSGKTILDFLKSDGFANRNFMQLIHDDSLTFKEDIQKAQVSGQGDSLHEHIANLAGSPAIKKGILQTVKVVDELVKVMGRHKPENIVIEMARENQTTQKGQKNSRERMKRIEEGIKELGSQILKEHPVENTQLQNEKLYLYYLQNGRDMYVDQELDINRLSDYDVDHIVPQSFLKDDSIDNKVLTRSDKARGKSDNVPSEEVVKKMKNYWRQLLNAKLITQRKFDNLTKAERGGLSELDKAGFIKRQLVETRQITKHVAQILDSRMNTKYDENDKLIREVKVITLKSKLVSDFRKDFQFYKVREINNYHHAHDAYLNAVVGTALIKKYPKLESEFVYGDYKVYDVRKMIAKSEQEIGKATAKYFFYSNIMNFFKTEITLANGEIRKRPLIETNGETGEIVWDKGRDFATVRKVLSMPQVNIVKKTEVQTGGFSKESILPKRNSDKLIARKKDWDPKKYGGFDSPTVAYSVLVVAKVEKGKSKKLKSVKELLGITIMERSSFEKNPIDFLEAKGYKEVKKDLIIKLPKYSLFELENGRKRMLASAGELQKGNELALPSKYVNFLYLASHYEKLKGSPEDNEQKQLFVEQHKHYLDEIIEQISEFSKRVILADANLDKVLSAYNKHRDKPIREQAENIIHLFTLTNLGAPAAFKYFDTTIDRKRYTSTKEVLDATLIHQSITGLYETRIDLSQLGGDGGEAAAKPAPGGSGGTVSLQDEHRLFDIPVTTSLPDVWLQDFPQAWAETGGLGRAKCQAPIIIDLKPTAVPVSIKQYPMSLEAHMGIRQHIIKFLELGVLRPCRSPWNTPLLPVKKPGTQDYRPVQDLREINKRTVDIHPTVPNPYNLLSTLKPDYSWYTVLDLKDAFFCLPLAPQSQELFAFEWKDPERGISGQLTWTRLPQGFKNSPTLFNEALHRDLTDFRTQHPEVTLLQYVDDLLLAAPTKKACTQGTRHLLQELGEKGYRASAKKAQICQTKVTYLGYILSEGKRWLTPGRIETVARIPPPRNPREVREFLGTAGFCRLWIPGFAELAAPLYALTKPSTPFTWQTEHQLAFEALKKALLSAPALGLPDTSKPFTLFLDERQGIAKGVLTQKLGPWKRPVAYLSKKLDPVAAGWPPCLRIMAATAMLVKDSAKLTLGQPLTVITPHTLEAIVRQPPDRWITNARLTHYQALLLDTDRVQFGPPVTLNPATLLPVPENQPSPHDCRQVLAETHGTREDLKDQELPDADHTWYTDGSSYLDSGTRRAGAAVVDGHNTIWAQSLPPGTSAQKAELIALTKALELSKGKKANIYTDSRYAFATAHTHGSIYERRGWLTSEGKEIKNKAEIIALLKALFLPQEVAIIHCPGHQKGQDPVAVGNRQADRVARQAAMAEVLTLATEPDNTSHITAGKRTADGSEFEKRTADGSEFESPKKKAKVE

SEQ ID NO: 1580 - protein, 2102 aa, synthetic construct
MPAAKRVKLDGGDKKYSIGLDIGTNSVGWAVITDEYKVPSKKFKVLGNTDRHSIKKNLIGALLFDSGETAEATRLKRTARRRYTRRKNRICYLQEIFSNEMAKVDDSFFHRLEESFLVEEDKKHERHPIFGNIVDEVAYHEKYPTIYHLRKKLVDSTDKADLRLIYLALAHMIKFRGHFLIEGDLNPDNSDVDKLFIQLVQTYNQLFEENPINASGVDAKAILSARLSKSRRLENLIAQLPGEKKNGLFGNLIALSLGLTPNFKSNFDLAEDAKLQLSKDTYDDDLDNLLAQIGDQYADLFLAAKNLSDAILLSDILRVNTEITKAPLSASMIKRYDEHHQDLTLLKALVRQQLPEKYKEIFFDQSKNGYAGYIDGGASQEEFYKFIKPILEKMDGTEELLVKLNREDLLRKQRTFDNGSIPHQIHLGELHAILRRQEDFYPFLKDNREKIEKILTFRIPYYVGPLARGNSRFAWMTRKSEETITPWNFEEVVDKGASAQSFIERMTNFDKNLPNEKVLPKHSLLYEYFTVYNELTKVKYVTEGMRKPAFLSGEQKKAIVDLLFKTNRKVTVKQLKEDYFKKIECFDSVEISGVEDRFNASLGTYHDLLKIIKDKDFLDNEENEDILEDIVLTLTLFEDREMIEERLKTYAHLFDDKVMKQLKRRRYTGWGRLSRKLINGIRDKQSGKTILDFLKSDGFANRNFMQLIHDDSLTFKEDIQKAQVSGQGDSLHEHIANLAGSPAIKKGILQTVKVVDELVKVMGRHKPENIVIEMARENQTTQKGQKNSRERMKRIEEGIKELGSQILKEHPVENTQLQNEKLYLYYLQNGRDMYVDQELDINRLSDYDVDHIVPQSFLKDDSIDNKVLTRSDKARGKSDNVPSEEVVKKMKNYWRQLLNAKLITQRKFDNLTKAERGGLSELDKAGFIKRQLVETRQITKHVAQILDSRMNTKYDENDKLIREVKVITLKSKLVSDFRKDFQFYKVREINNYHHAHDAYLNAVVGTALIKKYPKLESEFVYGDYKVYDVRKMIAKSEQEIGKATAKYFFYSNIMNFFKTEITLANGEIRKRPLIETNGETGEIVWDKGRDFATVRKVLSMPQVNIVKKTEVQTGGFSKESILPKRNSDKLIARKKDWDPKKYGGFDSPTVAYSVLVVAKVEKGKSKKLKSVKELLGITIMERSSFEKNPIDFLEAKGYKEVKKDLIIKLPKYSLFELENGRKRMLASAGELQKGNELALPSKYVNFLYLASHYEKLKGSPEDNEQKQLFVEQHKHYLDEIIEQISEFSKRVILADANLDKVLSAYNKHRDKPIREQAENIIHLFTLTNLGAPAAFKYFDTTIDRKRYTSTKEVLDATLIHQSITGLYETRIDLSQLGGDGGPAPGGGEAAAKGGTVSLQDEHRLFDIPVTTSLPDVWLQDFPQAWAETGGLGRAKCQAPIIIDLKPTAVPVSIKQYPMSLEAHMGIRQHIIKFLELGVLRPCRSPWNTPLLPVKKPGTQDYRPVQDLREINKRTVDIHPTVPNPYNLLSTLKPDYSWYTVLDLKDAFFCLPLAPQSQELFAFEWKDPERGISGQLTWTRLPQGFKNSPTLFNEALHRDLTDFRTQHPEVTLLQYVDDLLLAAPTKKACTQGTRHLLQELGEKGYRASAKKAQICQTKVTYLGYILSEGKRWLTPGRIETVARIPPPRNPREVREFLGTAGFCRLWIPGFAELAAPLYALTKPSTPFTWQTEHQLAFEALKKALLSAPALGLPDTSKPFTLFLDERQGIAKGVLTQKLGPWKRPVAYLSKKLDPVAAGWPPCLRIMAATAMLVKDSAKLTLGQPLTVITPHTLEAIVRQPPDRWITNARLTHYQALLLDTDRVQFGPPVTLNPATLLPVPENQPSPHDCRQVLAETHGTREDLKDQELPDADHTWYTDGSSYLDSGTRRAGAAVVDGHNTIWAQSLPPGTSAQKAELIALTKALELSKGKKANIYTDSRYAFATAHTHGSIYERRGWLTSEGKEIKNKAEIIALLKALFLPQEVAIIHCPGHQKGQDPVAVGNRQADRVARQAAMAEVLTLATEPDNTSHITAGKRTADGSEFEKRTADGSEFESPKKKAKVE

SEQ ID NO: 1581 - protein, 2102 aa, synthetic construct
MPAAKRVKLDGGDKKYSIGLDIGTNSVGWAVITDEYKVPSKKFKVLGNTDRHSIKKNLIGALLFDSGETAEATRLKRTARRRYTRRKNRICYLQEIFSNEMAKVDDSFFHRLEESFLVEEDKKHERHPIFGNIVDEVAYHEKYPTIYHLRKKLVDSTDKADLRLIYLALAHMIKFRGHFLIEGDLNPDNSDVDKLFIQLVQTYNQLFEENPINASGVDAKAILSARLSKSRRLENLIAQLPGEKKNGLFGNLIALSLGLTPNFKSNFDLAEDAKLQLSKDTYDDDLDNLLAQIGDQYADLFLAAKNLSDAILLSDILRVNTEITKAPLSASMIKRYDEHHQDLTLLKALVRQQLPEKYKEIFFDQSKNGYAGYIDGGASQEEFYKFIKPILEKMDGTEELLVKLNREDLLRKQRTFDNGSIPHQIHLGELHAILRRQEDFYPFLKDNREKIEKILTFRIPYYVGPLARGNSRFAWMTRKSEETITPWNFEEVVDKGASAQSFIERMTNFDKNLPNEKVLPKHSLLYEYFTVYNELTKVKYVTEGMRKPAFLSGEQKKAIVDLLFKTNRKVTVKQLKEDYFKKIECFDSVEISGVEDRFNASLGTYHDLLKIIKDKDFLDNEENEDILEDIVLTLTLFEDREMIEERLKTYAHLFDDKVMKQLKRRRYTGWGRLSRKLINGIRDKQSGKTILDFLKSDGFANRNFMQLIHDDSLTFKEDIQKAQVSGQGDSLHEHIANLAGSPAIKKGILQTVKVVDELVKVMGRHKPENIVIEMARENQTTQKGQKNSRERMKRIEEGIKELGSQILKEHPVENTQLQNEKLYLYYLQNGRDMYVDQELDINRLSDYDVDHIVPQSFLKDDSIDNKVLTRSDKARGKSDNVPSEEVVKKMKNYWRQLLNAKLITQRKFDNLTKAERGGLSELDKAGFIKRQLVETRQITKHVAQILDSRMNTKYDENDKLIREVKVITLKSKLVSDFRKDFQFYKVREINNYHHAHDAYLNAVVGTALIKKYPKLESEFVYGDYKVYDVRKMIAKSEQEIGKATAKYFFYSNIMNFFKTEITLANGEIRKRPLIETNGETGEIVWDKGRDFATVRKVLSMPQVNIVKKTEVQTGGFSKESILPKRNSDKLIARKKDWDPKKYGGFDSPTVAYSVLVVAKVEKGKSKKLKSVKELLGITIMERSSFEKNPIDFLEAKGYKEVKKDLIIKLPKYSLFELENGRKRMLASAGELQKGNELALPSKYVNFLYLASHYEKLKGSPEDNEQKQLFVEQHKHYLDEIIEQISEFSKRVILADANLDKVLSAYNKHRDKPIREQAENIIHLFTLTNLGAPAAFKYFDTTIDRKRYTSTKEVLDATLIHQSITGLYETRIDLSQLGGDGGPAPEAAAKGGGGGTVSLQDEHRLFDIPVTTSLPDVWLQDFPQAWAETGGLGRAKCQAPIIIDLKPTAVPVSIKQYPMSLEAHMGIRQHIIKFLELGVLRPCRSPWNTPLLPVKKPGTQDYRPVQDLREINKRTVDIHPTVPNPYNLLSTLKPDYSWYTVLDLKDAFFCLPLAPQSQELFAFEWKDPERGISGQLTWTRLPQGFKNSPTLFNEALHRDLTDFRTQHPEVTLLQYVDDLLLAAPTKKACTQGTRHLLQELGEKGYRASAKKAQICQTKVTYLGYILSEGKRWLTPGRIETVARIPPPRNPREVREFLGTAGFCRLWIPGFAELAAPLYALTKPSTPFTWQTEHQLAFEALKKALLSAPALGLPDTSKPFTLFLDERQGIAKGVLTQKLGPWKRPVAYLSKKLDPVAAGWPPCLRIMAATAMLVKDSAKLTLGQPLTVITPHTLEAIVRQPPDRWITNARLTHYQALLLDTDRVQFGPPVTLNPATLLPVPENQPSPHDCRQVLAETHGTREDLKDQELPDADHTWYTDGSSYLDSGTRRAGAAVVDGHNTIWAQSLPPGTSAQKAELIALTKALELSKGKKANIYTDSRYAFATAHTHGSIYERRGWLTSEGKEIKNKAEIIALLKALFLPQEVAIIHCPGHQKGQDPVAVGNRQADRVARQAAMAEVLTLATEPDNTSHITAGKRTADGSEFEKRTADGSEFESPKKKAKVE

SEQ ID NO: 1582 - protein, 2100 aa, synthetic construct
MPAAKRVKLDGGDKKYSIGLDIGTNSVGWAVITDEYKVPSKKFKVLGNTDRHSIKKNLIGALLFDSGETAEATRLKRTARRRYTRRKNRICYLQEIFSNEMAKVDDSFFHRLEESFLVEEDKKHERHPIFGNIVDEVAYHEKYPTIYHLRKKLVDSTDKADLRLIYLALAHMIKFRGHFLIEGDLNPDNSDVDKLFIQLVQTYNQLFEENPINASGVDAKAILSARLSKSRRLENLIAQLPGEKKNGLFGNLIALSLGLTPNFKSNFDLAEDAKLQLSKDTYDDDLDNLLAQIGDQYADLFLAAKNLSDAILLSDILRVNTEITKAPLSASMIKRYDEHHQDLTLLKALVRQQLPEKYKEIFFDQSKNGYAGYIDGGASQEEFYKFIKPILEKMDGTEELLVKLNREDLLRKQRTFDNGSIPHQIHLGELHAILRRQEDFYPFLKDNREKIEKILTFRIPYYVGPLARGNSRFAWMTRKSEETITPWNFEEVVDKGASAQSFIERMTNFDKNLPNEKVLPKHSLLYEYFTVYNELTKVKYVTEGMRKPAFLSGEQKKAIVDLLFKTNRKVTVKQLKEDYFKKIECFDSVEISGVEDRFNASLGTYHDLLKIIKDKDFLDNEENEDILEDIVLTLTLFEDREMIEERLKTYAHLFDDKVMKQLKRRRYTGWGRLSRKLINGIRDKQSGKTILDFLKSDGFANRNFMQLIHDDSLTFKEDIQKAQVSGQGDSLHEHIANLAGSPAIKKGILQTVKVVDELVKVMGRHKPENIVIEMARENQTTQKGQKNSRERMKRIEEGIKELGSQILKEHPVENTQLQNEKLYLYYLQNGRDMYVDQELDINRLSDYDVDHIVPQSFLKDDSIDNKVLTRSDKARGKSDNVPSEEVVKKMKNYWRQLLNAKLITQRKFDNLTKAERGGLSELDKAGFIKRQLVETRQITKHVAQILDSRMNTKYDENDKLIREVKVITLKSKLVSDFRKDFQFYKVREINNYHHAHDAYLNAVVGTALIKKYPKLESEFVYGDYKVYDVRKMIAKSEQEIGKATAKYFFYSNIMNFFKTEITLANGEIRKRPLIETNGETGEIVWDKGRDFATVRKVLSMPQVNIVKKTEVQTGGFSKESILPKRNSDKLIARKKDWDPKKYGGFDSPTVAYSVLVVAKVEKGKSKKLKSVKELLGITIMERSSFEKNPIDFLEAKGYKEVKKDLIIKLPKYSLFELENGRKRMLASAGELQKGNELALPSKYVNFLYLASHYEKLKGSPEDNEQKQLFVEQHKHYLDEIIEQISEFSKRVILADANLDKVLSAYNKHRDKPIREQAENIIHLFTLTNLGAPAAFKYFDTTIDRKRYTSTKEVLDATLIHQSITGLYETRIDLSQLGGDGGGSSGSSGSSGGTVSLQDEHRLFDIPVTTSLPDVWLQDFPQAWAETGGLGRAKCQAPIIIDLKPTAVPVSIKQYPMSLEAHMGIRQHIIKFLELGVLRPCRSPWNTPLLPVKKPGTQDYRPVQDLREINKRTVDIHPTVPNPYNLLSTLKPDYSWYTVLDLKDAFFCLPLAPQSQELFAFEWKDPERGISGQLTWTRLPQGFKNSPTLFNEALHRDLTDFRTQHPEVTLLQYVDDLLLAAPTKKACTQGTRHLLQELGEKGYRASAKKAQICQTKVTYLGYILSEGKRWLTPGRIETVARIPPPRNPREVREFLGTAGFCRLWIPGFAELAAPLYALTKPSTPFTWQTEHQLAFEALKKALLSAPALGLPDTSKPFTLFLDERQGIAKGVLTQKLGPWKRPVAYLSKKLDPVAAGWPPCLRIMAATAMLVKDSAKLTLGQPLTVITPHTLEAIVRQPPDRWITNARLTHYQALLLDTDRVQFGPPVTLNPATLLPVPENQPSPHDCRQVLAETHGTREDLKDQELPDADHTWYTDGSSYLDSGTRRAGAAVVDGHNTIWAQSLPPGTSAQKAELIALTKALELSKGKKANIYTDSRYAFATAHTHGSIYERRGWLTSEGKEIKNKAEIIALLKALFLPQEVAIIHCPGHQKGQDPVAVGNRQADRVARQAAMAEVLTLATEPDNTSHITAGKRTADGSEFEKRTADGSEFESPKKKAKVE

SEQ ID NO: 1583 - protein, 2099 aa, synthetic construct
MPAAKRVKLDGGDKKYSIGLDIGTNSVGWAVITDEYKVPSKKFKVLGNTDRHSIKKNLIGALLFDSGETAEATRLKRTARRRYTRRKNRICYLQEIFSNEMAKVDDSFFHRLEESFLVEEDKKHERHPIFGNIVDEVAYHEKYPTIYHLRKKLVDSTDKADLRLIYLALAHMIKFRGHFLIEGDLNPDNSDVDKLFIQLVQTYNQLFEENPINASGVDAKAILSARLSKSRRLENLIAQLPGEKKNGLFGNLIALSLGLTPNFKSNFDLAEDAKLQLSKDTYDDDLDNLLAQIGDQYADLFLAAKNLSDAILLSDILRVNTEITKAPLSASMIKRYDEHHQDLTLLKALVRQQLPEKYKEIFFDQSKNGYAGYIDGGASQEEFYKFIKPILEKMDGTEELLVKLNREDLLRKQRTFDNGSIPHQIHLGELHAILRRQEDFYPFLKDNREKIEKILTFRIPYYVGPLARGNSRFAWMTRKSEETITPWNFEEVVDKGASAQSFIERMTNFDKNLPNEKVLPKHSLLYEYFTVYNELTKVKYVTEGMRKPAFLSGEQKKAIVDLLFKTNRKVTVKQLKEDYFKKIECFDSVEISGVEDRFNASLGTYHDLLKIIKDKDFLDNEENEDILEDIVLTLTLFEDREMIEERLKTYAHLFDDKVMKQLKRRRYTGWGRLSRKLINGIRDKQSGKTILDFLKSDGFANRNFMQLIHDDSLTFKEDIQKAQVSGQGDSLHEHIANLAGSPAIKKGILQTVKVVDELVKVMGRHKPENIVIEMARENQTTQKGQKNSRERMKRIEEGIKELGSQILKEHPVENTQLQNEKLYLYYLQNGRDMYVDQELDINRLSDYDVDHIVPQSFLKDDSIDNKVLTRSDKARGKSDNVPSEEVVKKMKNYWRQLLNAKLITQRKFDNLTKAERGGLSELDKAGFIKRQLVETRQITKHVAQILDSRMNTKYDENDKLIREVKVITLKSKLVSDFRKDFQFYKVREINNYHHAHDAYLNAVVGTALIKKYPKLESEFVYGDYKVYDVRKMIAKSEQEIGKATAKYFFYSNIMNFFKTEITLANGEIRKRPLIETNGETGEIVWDKGRDFATVRKVLSMPQVNIVKKTEVQTGGFSKESILPKRNSDKLIARKKDWDPKKYGGFDSPTVAYSVLVVAKVEKGKSKKLKSVKELLGITIMERSSFEKNPIDFLEAKGYKEVKKDLIIKLPKYSLFELENGRKRMLASAGELQKGNELALPSKYVNFLYLASHYEKLKGSPEDNEQKQLFVEQHKHYLDEIIEQISEFSKRVILADANLDKVLSAYNKHRDKPIREQAENIIHLFTLTNLGAPAAFKYFDTTIDRKRYTSTKEVLDATLIHQSITGLYETRIDLSQLGGDGGEAAAKGSSGGTVSLQDEHRLFDIPVTTSLPDVWLQDFPQAWAETGGLGRAKCQAPIIIDLKPTAVPVSIKQYPMSLEAHMGIRQHIIKFLELGVLRPCRSPWNTPLLPVKKPGTQDYRPVQDLREINKRTVDIHPTVPNPYNLLSTLKPDYSWYTVLDLKDAFFCLPLAPQSQELFAFEWKDPERGISGQLTWTRLPQGFKNSPTLFNEALHRDLTDFRTQHPEVTLLQYVDDLLLAAPTKKACTQGTRHLLQELGEKGYRASAKKAQICQTKVTYLGYILSEGKRWLTPGRIETVARIPPPRNPREVREFLGTAGFCRLWIPGFAELAAPLYALTKPSTPFTWQTEHQLAFEALKKALLSAPALGLPDTSKPFTLFLDERQGIAKGVLTQKLGPWKRPVAYLSKKLDPVAAGWPPCLRIMAATAMLVKDSAKLTLGQPLTVITPHTLEAIVRQPPDRWITNARLTHYQALLLDTDRVQFGPPVTLNPATLLPVPENQPSPHDCRQVLAETHGTREDLKDQELPDADHTWYTDGSSYLDSGTRRAGAAVVDGHNTIWAQSLPPGTSAQKAELIALTKALELSKGKKANIYTDSRYAFATAHTHGSIYERRGWLTSEGKEIKNKAEIIALLKALFLPQEVAIIHCPGHQKGQDPVAVGNRQADRVARQAAMAEVLTLATEPDNTSHITAGKRTADGSEFEKRTADGSEFESPKKKAKVE

SEQ ID NO: 1584 - protein, 2100 aa, synthetic construct
MPAAKRVKLDGGDKKYSIGLDIGTNSVGWAVITDEYKVPSKKFKVLGNTDRHSIKKNLIGALLFDSGETAEATRLKRTARRRYTRRKNRICYLQEIFSNEMAKVDDSFFHRLEESFLVEEDKKHERHPIFGNIVDEVAYHEKYPTIYHLRKKLVDSTDKADLRLIYLALAHMIKFRGHFLIEGDLNPDNSDVDKLFIQLVQTYNQLFEENPINASGVDAKAILSARLSKSRRLENLIAQLPGEKKNGLFGNLIALSLGLTPNFKSNFDLAEDAKLQLSKDTYDDDLDNLLAQIGDQYADLFLAAKNLSDAILLSDILRVNTEITKAPLSASMIKRYDEHHQDLTLLKALVRQQLPEKYKEIFFDQSKNGYAGYIDGGASQEEFYKFIKPILEKMDGTEELLVKLNREDLLRKQRTFDNGSIPHQIHLGELHAILRRQEDFYPFLKDNREKIEKILTFRIPYYVGPLARGNSRFAWMTRKSEETITPWNFEEVVDKGASAQSFIERMTNFDKNLPNEKVLPKHSLLYEYFTVYNELTKVKYVTEGMRKPAFLSGEQKKAIVDLLFKTNRKVTVKQLKEDYFKKIECFDSVEISGVEDRFNASLGTYHDLLKIIKDKDFLDNEENEDILEDIVLTLTLFEDREMIEERLKTYAHLFDDKVMKQLKRRRYTGWGRLSRKLINGIRDKQSGKTILDFLKSDGFANRNFMQLIHDDSLTFKEDIQKAQVSGQGDSLHEHIANLAGSPAIKKGILQTVKVVDELVKVMGRHKPENIVIEMARENQTTQKGQKNSRERMKRIEEGIKELGSQILKEHPVENTQLQNEKLYLYYLQNGRDMYVDQELDINRLSDYDVDHIVPQSFLKDDSIDNKVLTRSDKARGKSDNVPSEEVVKKMKNYWRQLLNAKLITQRKFDNLTKAERGGLSELDKAGFIKRQLVETRQITKHVAQILDSRMNTKYDENDKLIREVKVITLKSKLVSDFRKDFQFYKVREINNYHHAHDAYLNAVVGTALIKKYPKLESEFVYGDYKVYDVRKMIAKSEQEIGKATAKYFFYSNIMNFFKTEITLANGEIRKRPLIETNGETGEIVWDKGRDFATVRKVLSMPQVNIVKKTEVQTGGFSKESILPKRNSDKLIARKKDWDPKKYGGFDSPTVAYSVLVVAKVEKGKSKKLKSVKELLGITIMERSSFEKNPIDFLEAKGYKEVKKDLIIKLPKYSLFELENGRKRMLASAGELQKGNELALPSKYVNFLYLASHYEKLKGSPEDNEQKQLFVEQHKHYLDEIIEQISEFSKRVILADANLDKVLSAYNKHRDKPIREQAENIIHLFTLTNLGAPAAFKYFDTTIDRKRYTSTKEVLDATLIHQSITGLYETRIDLSQLGGDGGGSSGGSPAPGGTVSLQDEHRLFDIPVTTSLPDVWLQDFPQAWAETGGLGRAKCQAPIIIDLKPTAVPVSIKQYPMSLEAHMGIRQHIIKFLELGVLRPCRSPWNTPLLPVKKPGTQDYRPVQDLREINKRTVDIHPTVPNPYNLLSTLKPDYSWYTVLDLKDAFFCLPLAPQSQELFAFEWKDPERGISGQLTWTRLPQGFKNSPTLFNEALHRDLTDFRTQHPEVTLLQYVDDLLLAAPTKKACTQGTRHLLQELGEKGYRASAKKAQICQTKVTYLGYILSEGKRWLTPGRIETVARIPPPRNPREVREFLGTAGFCRLWIPGFAELAAPLYALTKPSTPFTWQTEHQLAFEALKKALLSAPALGLPDTSKPFTLFLDERQGIAKGVLTQKLGPWKRPVAYLSKKLDPVAAGWPPCLRIMAATAMLVKDSAKLTLGQPLTVITPHTLEAIVRQPPDRWITNARLTHYQALLLDTDRVQFGPPVTLNPATLLPVPENQPSPHDCRQVLAETHGTREDLKDQELPDADHTWYTDGSSYLDSGTRRAGAAVVDGHNTIWAQSLPPGTSAQKAELIALTKALELSKGKKANIYTDSRYAFATAHTHGSIYERRGWLTSEGKEIKNKAEIIALLKALFLPQEVAIIHCPGHQKGQDPVAVGNRQADRVARQAAMAEVLTLATEPDNTSHITAGKRTADGSEFEKRTADGSEFESPKKKAKVE

SEQ ID NO: 1585 - protein, 2102 aa, synthetic construct
MPAAKRVKLDGGDKKYSIGLDIGTNSVGWAVITDEYKVPSKKFKVLGNTDRHSIKKNLIGALLFDSGETAEATRLKRTARRRYTRRKNRICYLQEIFSNEMAKVDDSFFHRLEESFLVEEDKKHERHPIFGNIVDEVAYHEKYPTIYHLRKKLVDSTDKADLRLIYLALAHMIKFRGHFLIEGDLNPDNSDVDKLFIQLVQTYNQLFEENPINASGVDAKAILSARLSKSRRLENLIAQLPGEKKNGLFGNLIALSLGLTPNFKSNFDLAEDAKLQLSKDTYDDDLDNLLAQIGDQYADLFLAAKNLSDAILLSDILRVNTEITKAPLSASMIKRYDEHHQDLTLLKALVRQQLPEKYKEIFFDQSKNGYAGYIDGGASQEEFYKFIKPILEKMDGTEELLVKLNREDLLRKQRTFDNGSIPHQIHLGELHAILRRQEDFYPFLKDNREKIEKILTFRIPYYVGPLARGNSRFAWMTRKSEETITPWNFEEVVDKGASAQSFIERMTNFDKNLPNEKVLPKHSLLYEYFTVYNELTKVKYVTEGMRKPAFLSGEQKKAIVDLLFKTNRKVTVKQLKEDYFKKIECFDSVEISGVEDRFNASLGTYHDLLKIIKDKDFLDNEENEDILEDIVLTLTLFEDREMIEERLKTYAHLFDDKVMKQLKRRRYTGWGRLSRKLINGIRDKQSGKTILDFLKSDGFANRNFMQLIHDDSLTFKEDIQKAQVSGQGDSLHEHIANLAGSPAIKKGILQTVKVVDELVKVMGRHKPENIVIEMARENQTTQKGQKNSRERMKRIEEGIKELGSQILKEHPVENTQLQNEKLYLYYLQNGRDMYVDQELDINRLSDYDVDHIVPQSFLKDDSIDNKVLTRSDKARGKSDNVPSEEVVKKMKNYWRQLLNAKLITQRKFDNLTKAERGGLSELDKAGFIKRQLVETRQITKHVAQILDSRMNTKYDENDKLIREVKVITLKSKLVSDFRKDFQFYKVREINNYHHAHDAYLNAVVGTALIKKYPKLESEFVYGDYKVYDVRKMIAKSEQEIGKATAKYFFYSNIMNFFKTEITLANGEIRKRPLIETNGETGEIVWDKGRDFATVRKVLSMPQVNIVKKTEVQTGGFSKESILPKRNSDKLIARKKDWDPKKYGGFDSPTVAYSVLVVAKVEKGKSKKLKSVKELLGITIMERSSFEKNPIDFLEAKGYKEVKKDLIIKLPKYSLFELENGRKRMLASAGELQKGNELALPSKYVNFLYLASHYEKLKGSPEDNEQKQLFVEQHKHYLDEIIEQISEFSKRVILADANLDKVLSAYNKHRDKPIREQAENIIHLFTLTNLGAPAAFKYFDTTIDRKRYTSTKEVLDATLIHQSITGLYETRIDLSQLGGDGGGGGEAAAKGGSGGTVSLQDEHRLFDIPVTTSLPDVWLQDFPQAWAETGGLGRAKCQAPIIIDLKPTAVPVSIKQYPMSLEAHMGIRQHIIKFLELGVLRPCRSPWNTPLLPVKKPGTQDYRPVQDLREINKRTVDIHPTVPNPYNLLSTLKPDYSWYTVLDLKDAFFCLPLAPQSQELFAFEWKDPERGISGQLTWTRLPQGFKNSPTLFNEALHRDLTDFRTQHPEVTLLQYVDDLLLAAPTKKACTQGTRHLLQELGEKGYRASAKKAQICQTKVTYLGYILSEGKRWLTPGRIETVARIPPPRNPREVREFLGTAGFCRLWIPGFAELAAPLYALTKPSTPFTWQTEHQLAFEALKKALLSAPALGLPDTSKPFTLFLDERQGIAKGVLTQKLGPWKRPVAYLSKKLDPVAAGWPPCLRIMAATAMLVKDSAKLTLGQPLTVITPHTLEAIVRQPPDRWITNARLTHYQALLLDTDRVQFGPPVTLNPATLLPVPENQPSPHDCRQVLAETHGTREDLKDQELPDADHTWYTDGSSYLDSGTRRAGAAVVDGHNTIWAQSLPPGTSAQKAELIALTKALELSKGKKANIYTDSRYAFATAHTHGSIYERRGWLTSEGKEIKNKAEIIALLKALFLPQEVAIIHCPGHQKGQDPVAVGNRQADRVARQAAMAEVLTLATEPDNTSHITAGKRTADGSEFEKRTADGSEFESPKKKAKVE

SEQ ID NO: 1586 - protein, 2100 aa, synthetic construct
MPAAKRVKLDGGDKKYSIGLDIGTNSVGWAVITDEYKVPSKKFKVLGNTDRHSIKKNLIGALLFDSGETAEATRLKRTARRRYTRRKNRICYLQEIFSNEMAKVDDSFFHRLEESFLVEEDKKHERHPIFGNIVDEVAYHEKYPTIYHLRKKLVDSTDKADLRLIYLALAHMIKFRGHFLIEGDLNPDNSDVDKLFIQLVQTYNQLFEENPINASGVDAKAILSARLSKSRRLENLIAQLPGEKKNGLFGNLIALSLGLTPNFKSNFDLAEDAKLQLSKDTYDDDLDNLLAQIGDQYADLFLAAKNLSDAILLSDILRVNTEITKAPLSASMIKRYDEHHQDLTLLKALVRQQLPEKYKEIFFDQSKNGYAGYIDGGASQEEFYKFIKPILEKMDGTEELLVKLNREDLLRKQRTFDNGSIPHQIHLGELHAILRRQEDFYPFLKDNREKIEKILTFRIPYYVGPLARGNSRFAWMTRKSEETITPWNFEEVVDKGASAQSFIERMTNFDKNLPNEKVLPKHSLLYEYFTVYNELTKVKYVTEGMRKPAFLSGEQKKAIVDLLFKTNRKVTVKQLKEDYFKKIECFDSVEISGVEDRFNASLGTYHDLLKIIKDKDFLDNEENEDILEDIVLTLTLFEDREMIEERLKTYAHLFDDKVMKQLKRRRYTGWGRLSRKLINGIRDKQSGKTILDFLKSDGFANRNFMQLIHDDSLTFKEDIQKAQVSGQGDSLHEHIANLAGSPAIKKGILQTVKVVDELVKVMGRHKPENIVIEMARENQTTQKGQKNSRERMKRIEEGIKELGSQILKEHPVENTQLQNEKLYLYYLQNGRDMYVDQELDINRLSDYDVDHIVPQSFLKDDSIDNKVLTRSDKARGKSDNVPSEEVVKKMKNYWRQLLNAKLITQRKFDNLTKAERGGLSELDKAGFIKRQLVETRQITKHVAQILDSRMNTKYDENDKLIREVKVITLKSKLVSDFRKDFQFYKVREINNYHHAHDAYLNAVVGTALIKKYPKLESEFVYGDYKVYDVRKMIAKSEQEIGKATAKYFFYSNIMNFFKTEITLANGEIRKRPLIETNGETGEIVWDKGRDFATVRKVLSMPQVNIVKKTEVQTGGFSKESILPKRNSDKLIARKKDWDPKKYGGFDSPTVAYSVLVVAKVEKGKSKKLKSVKELLGITIMERSSFEKNPIDFLEAKGYKEVKKDLIIKLPKYSLFELENGRKRMLASAGELQKGNELALPSKYVNFLYLASHYEKLKGSPEDNEQKQLFVEQHKHYLDEIIEQISEFSKRVILADANLDKVLSAYNKHRDKPIREQAENIIHLFTLTNLGAPAAFKYFDTTIDRKRYTSTKEVLDATLIHQSITGLYETRIDLSQLGGDGGPAPGSSGGSGGTVSLQDEHRLFDIPVTTSLPDVWLQDFPQAWAETGGLGRAKCQAPIIIDLKPTAVPVSIKQYPMSLEAHMGIRQHIIKFLELGVLRPCRSPWNTPLLPVKKPGTQDYRPVQDLREINKRTVDIHPTVPNPYNLLSTLKPDYSWYTVLDLKDAFFCLPLAPQSQELFAFEWKDPERGISGQLTWTRLPQGFKNSPTLFNEALHRDLTDFRTQHPEVTLLQYVDDLLLAAPTKKACTQGTRHLLQELGEKGYRASAKKAQICQTKVTYLGYILSEGKRWLTPGRIETVARIPPPRNPREVREFLGTAGFCRLWIPGFAELAAPLYALTKPSTPFTWQTEHQLAFEALKKALLSAPALGLPDTSKPFTLFLDERQGIAKGVLTQKLGPWKRPVAYLSKKLDPVAAGWPPCLRIMAATAMLVKDSAKLTLGQPLTVITPHTLEAIVRQPPDRWITNARLTHYQALLLDTDRVQFGPPVTLNPATLLPVPENQPSPHDCRQVLAETHGTREDLKDQELPDADHTWYTDGSSYLDSGTRRAGAAVVDGHNTIWAQSLPPGTSAQKAELIALTKALELSKGKKANIYTDSRYAFATAHTHGSIYERRGWLTSEGKEIKNKAEIIALLKALFLPQEVAIIHCPGHQKGQDPVAVGNRQADRVARQAAMAEVLTLATEPDNTSHITAGKRTADGSEFEKRTADGSEFESPKKKAKVE

SEQ ID NO: 1587 - protein, 2101 aa, synthetic construct
MPAAKRVKLDGGDKKYSIGLDIGTNSVGWAVITDEYKVPSKKFKVLGNTDRHSIKKNLIGALLFDSGETAEATRLKRTARRRYTRRKNRICYLQEIFSNEMAKVDDSFFHRLEESFLVEEDKKHERHPIFGNIVDEVAYHEKYPTIYHLRKKLVDSTDKADLRLIYLALAHMIKFRGHFLIEGDLNPDNSDVDKLFIQLVQTYNQLFEENPINASGVDAKAILSARLSKSRRLENLIAQLPGEKKNGLFGNLIALSLGLTPNFKSNFDLAEDAKLQLSKDTYDDDLDNLLAQIGDQYADLFLAAKNLSDAILLSDILRVNTEITKAPLSASMIKRYDEHHQDLTLLKALVRQQLPEKYKEIFFDQSKNGYAGYIDGGASQEEFYKFIKPILEKMDGTEELLVKLNREDLLRKQRTFDNGSIPHQIHLGELHAILRRQEDFYPFLKDNREKIEKILTFRIPYYVGPLARGNSRFAWMTRKSEETITPWNFEEVVDKGASAQSFIERMTNFDKNLPNEKVLPKHSLLYEYFTVYNELTKVKYVTEGMRKPAFLSGEQKKAIVDLLFKTNRKVTVKQLKEDYFKKIECFDSVEISGVEDRFNASLGTYHDLLKIIKDKDFLDNEENEDILEDIVLTLTLFEDREMIEERLKTYAHLFDDKVMKQLKRRRYTGWGRLSRKLINGIRDKQSGKTILDFLKSDGFANRNFMQLIHDDSLTFKEDIQKAQVSGQGDSLHEHIANLAGSPAIKKGILQTVKVVDELVKVMGRHKPENIVIEMARENQTTQKGQKNSRERMKRIEEGIKELGSQILKEHPVENTQLQNEKLYLYYLQNGRDMYVDQELDINRLSDYDVDHIVPQSFLKDDSIDNKVLTRSDKARGKSDNVPSEEVVKKMKNYWRQLLNAKLITQRKFDNLTKAERGGLSELDKAGFIKRQLVETRQITKHVAQILDSRMNTKYDENDKLIREVKVITLKSKLVSDFRKDFQFYKVREINNYHHAHDAYLNAVVGTALIKKYPKLESEFVYGDYKVYDVRKMIAKSEQEIGKATAKYFFYSNIMNFFKTEITLANGEIRKRPLIETNGETGEIVWDKGRDFATVRKVLSMPQVNIVKKTEVQTGGFSKESILPKRNSDKLIARKKDWDPKKYGGFDSPTVAYSVLVVAKVEKGKSKKLKSVKELLGITIMERSSFEKNPIDFLEAKGYKEVKKDLIIKLPKYSLFELENGRKRMLASAGELQKGNELALPSKYVNFLYLASHYEKLKGSPEDNEQKQLFVEQHKHYLDEIIEQISEFSKRVILADANLDKVLSAYNKHRDKPIREQAENIIHLFTLTNLGAPAAFKYFDTTIDRKRYTSTKEVLDATLIHQSITGLYETRIDLSQLGGDGGEAAAKEAAAKGGTVSLQDEHRLFDIPVTTSLPDVWLQDFPQAWAETGGLGRAKCQAPIIIDLKPTAVPVSIKQYPMSLEAHMGIRQHIIKFLELGVLRPCRSPWNTPLLPVKKPGTQDYRPVQDLREINKRTVDIHPTVPNPYNLLSTLKPDYSWYTVLDLKDAFFCLPLAPQSQELFAFEWKDPERGISGQLTWTRLPQGFKNSPTLFNEALHRDLTDFRTQHPEVTLLQYVDDLLLAAPTKKACTQGTRHLLQELGEKGYRASAKKAQICQTKVTYLGYILSEGKRWLTPGRIETVARIPPPRNPREVREFLGTAGFCRLWIPGFAELAAPLYALTKPSTPFTWQTEHQLAFEALKKALLSAPALGLPDTSKPFTLFLDERQGIAKGVLTQKLGPWKRPVAYLSKKLDPVAAGWPPCLRIMAATAMLVKDSAKLTLGQPLTVITPHTLEAIVRQPPDRWITNARLTHYQALLLDTDRVQFGPPVTLNPATLLPVPENQPSPHDCRQVLAETHGTREDLKDQELPDADHTWYTDGSSYLDSGTRRAGAAVVDGHNTIWAQSLPPGTSAQKAELIALTKALELSKGKKANIYTDSRYAFATAHTHGSIYERRGWLTSEGKEIKNKAEIIALLKALFLPQEVAIIHCPGHQKGQDPVAVGNRQADRVARQAAMAEVLTLATEPDNTSHITAGKRTADGSEFEKRTADGSEFESPKKKAKVE

SEQ ID NO: 1588 - protein, 2109 aa, synthetic construct
MPAAKRVKLDGGDKKYSIGLDIGTNSVGWAVITDEYKVPSKKFKVLGNTDRHSIKKNLIGALLFDSGETAEATRLKRTARRRYTRRKNRICYLQEIFSNEMAKVDDSFFHRLEESFLVEEDKKHERHPIFGNIVDEVAYHEKYPTIYHLRKKLVDSTDKADLRLIYLALAHMIKFRGHFLIEGDLNPDNSDVDKLFIQLVQTYNQLFEENPINASGVDAKAILSARLSKSRRLENLIAQLPGEKKNGLFGNLIALSLGLTPNFKSNFDLAEDAKLQLSKDTYDDDLDNLLAQIGDQYADLFLAAKNLSDAILLSDILRVNTEITKAPLSASMIKRYDEHHQDLTLLKALVRQQLPEKYKEIFFDQSKNGYAGYIDGGASQEEFYKFIKPILEKMDGTEELLVKLNREDLLRKQRTFDNGSIPHQIHLGELHAILRRQEDFYPFLKDNREKIEKILTFRIPYYVGPLARGNSRFAWMTRKSEETITPWNFEEVVDKGASAQSFIERMTNFDKNLPNEKVLPKHSLLYEYFTVYNELTKVKYVTEGMRKPAFLSGEQKKAIVDLLFKTNRKVTVKQLKEDYFKKIECFDSVEISGVEDRFNASLGTYHDLLKIIKDKDFLDNEENEDILEDIVLTLTLFEDREMIEERLKTYAHLFDDKVMKQLKRRRYTGWGRLSRKLINGIRDKQSGKTILDFLKSDGFANRNFMQLIHDDSLTFKEDIQKAQVSGQGDSLHEHIANLAGSPAIKKGILQTVKVVDELVKVMGRHKPENIVIEMARENQTTQKGQKNSRERMKRIEEGIKELGSQILKEHPVENTQLQNEKLYLYYLQNGRDMYVDQELDINRLSDYDVDHIVPQSFLKDDSIDNKVLTRSDKARGKSDNVPSEEVVKKMKNYWRQLLNAKLITQRKFDNLTKAERGGLSELDKAGFIKRQLVETRQITKHVAQILDSRMNTKYDENDKLIREVKVITLKSKLVSDFRKDFQFYKVREINNYHHAHDAYLNAVVGTALIKKYPKLESEFVYGDYKVYDVRKMIAKSEQEIGKATAKYFFYSNIMNFFKTEITLANGEIRKRPLIETNGETGEIVWDKGRDFATVRKVLSMPQVNIVKKTEVQTGGFSKESILPKRNSDKLIARKKDWDPKKYGGFDSPTVAYSVLVVAKVEKGKSKKLKSVKELLGITIMERSSFEKNPIDFLEAKGYKEVKKDLIIKLPKYSLFELENGRKRMLASAGELQKGNELALPSKYVNFLYLASHYEKLKGSPEDNEQKQLFVEQHKHYLDEIIEQISEFSKRVILADANLDKVLSAYNKHRDKPIREQAENIIHLFTLTNLGAPAAFKYFDTTIDRKRYTSTKEVLDATLIHQSITGLYETRIDLSQLGGDGGGSSGSSGSSGSSGSSGSSGGTVSLQDEHRLFDIPVTTSLPDVWLQDFPQAWAETGGLGRAKCQAPIIIDLKPTAVPVSIKQYPMSLEAHMGIRQHIIKFLELGVLRPCRSPWNTPLLPVKKPGTQDYRPVQDLREINKRTVDIHPTVPNPYNLLSTLKPDYSWYTVLDLKDAFFCLPLAPQSQELFAFEWKDPERGISGQLTWTRLPQGFKNSPTLFNEALHRDLTDFRTQHPEVTLLQYVDDLLLAAPTKKACTQGTRHLLQELGEKGYRASAKKAQICQTKVTYLGYILSEGKRWLTPGRIETVARIPPPRNPREVREFLGTAGFCRLWIPGFAELAAPLYALTKPSTPFTWQTEHQLAFEALKKALLSAPALGLPDTSKPFTLFLDERQGIAKGVLTQKLGPWKRPVAYLSKKLDPVAAGWPPCLRIMAATAMLVKDSAKLTLGQPLTVITPHTLEAIVRQPPDRWITNARLTHYQALLLDTDRVQFGPPVTLNPATLLPVPENQPSPHDCRQVLAETHGTREDLKDQELPDADHTWYTDGSSYLDSGTRRAGAAVVDGHNTIWAQSLPPGTSAQKAELIALTKALELSKGKKANIYTDSRYAFATAHTHGSIYERRGWLTSEGKEIKNKAEIIALLKALFLPQEVAIIHCPGHQKGQDPVAVGNRQADRVARQAAMAEVLTLATEPDNTSHITAGKRTADGSEFEKRTADGSEFESPKKKAKVE

SEQ ID NO: 1589 - protein, 2102 aa, synthetic construct
MPAAKRVKLDGGDKKYSIGLDIGTNSVGWAVITDEYKVPSKKFKVLGNTDRHSIKKNLIGALLFDSGETAEATRLKRTARRRYTRRKNRICYLQEIFSNEMAKVDDSFFHRLEESFLVEEDKKHERHPIFGNIVDEVAYHEKYPTIYHLRKKLVDSTDKADLRLIYLALAHMIKFRGHFLIEGDLNPDNSDVDKLFIQLVQTYNQLFEENPINASGVDAKAILSARLSKSRRLENLIAQLPGEKKNGLFGNLIALSLGLTPNFKSNFDLAEDAKLQLSKDTYDDDLDNLLAQIGDQYADLFLAAKNLSDAILLSDILRVNTEITKAPLSASMIKRYDEHHQDLTLLKALVRQQLPEKYKEIFFDQSKNGYAGYIDGGASQEEFYKFIKPILEKMDGTEELLVKLNREDLLRKQRTFDNGSIPHQIHLGELHAILRRQEDFYPFLKDNREKIEKILTFRIPYYVGPLARGNSRFAWMTRKSEETITPWNFEEVVDKGASAQSFIERMTNFDKNLPNEKVLPKHSLLYEYFTVYNELTKVKYVTEGMRKPAFLSGEQKKAIVDLLFKTNRKVTVKQLKEDYFKKIECFDSVEISGVEDRFNASLGTYHDLLKIIKDKDFLDNEENEDILEDIVLTLTLFEDREMIEERLKTYAHLFDDKVMKQLKRRRYTGWGRLSRKLINGIRDKQSGKTILDFLKSDGFANRNFMQLIHDDSLTFKEDIQKAQVSGQGDSLHEHIANLAGSPAIKKGILQTVKVVDELVKVMGRHKPENIVIEMARENQTTQKGQKNSRERMKRIEEGIKELGSQILKEHPVENTQLQNEKLYLYYLQNGRDMYVDQELDINRLSDYDVDHIVPQSFLKDDSIDNKVLTRSDKARGKSDNVPSEEVVKKMKNYWRQLLNAKLITQRKFDNLTKAERGGLSELDKAGFIKRQLVETRQITKHVAQILDSRMNTKYDENDKLIREVKVITLKSKLVSDFRKDFQFYKVREINNYHHAHDAYLNAVVGTALIKKYPKLESEFVYGDYKVYDVRKMIAKSEQEIGKATAKYFFYSNIMNFFKTEITLANGEIRKRPLIETNGETGEIVWDKGRDFATVRKVLSMPQVNIVKKTEVQTGGFSKESILPKRNSDKLIARKKDWDPKKYGGFDSPTVAYSVLVVAKVEKGKSKKLKSVKELLGITIMERSSFEKNPIDFLEAKGYKEVKKDLIIKLPKYSLFELENGRKRMLASAGELQKGNELALPSKYVNFLYLASHYEKLKGSPEDNEQKQLFVEQHKHYLDEIIEQISEFSKRVILADANLDKVLSAYNKHRDKPIREQAENIIHLFTLTNLGAPAAFKYFDTTIDRKRYTSTKEVLDATLIHQSITGLYETRIDLSQLGGDGGGGGEAAAKPAPGGTVSLQDEHRLFDIPVTTSLPDVWLQDFPQAWAETGGLGRAKCQAPIIIDLKPTAVPVSIKQYPMSLEAHMGIRQHIIKFLELGVLRPCRSPWNTPLLPVKKPGTQDYRPVQDLREINKRTVDIHPTVPNPYNLLSTLKPDYSWYTVLDLKDAFFCLPLAPQSQELFAFEWKDPERGISGQLTWTRLPQGFKNSPTLFNEALHRDLTDFRTQHPEVTLLQYVDDLLLAAPTKKACTQGTRHLLQELGEKGYRASAKKAQICQTKVTYLGYILSEGKRWLTPGRIETVARIPPPRNPREVREFLGTAGFCRLWIPGFAELAAPLYALTKPSTPFTWQTEHQLAFEALKKALLSAPALGLPDTSKPFTLFLDERQGIAKGVLTQKLGPWKRPVAYLSKKLDPVAAGWPPCLRIMAATAMLVKDSAKLTLGQPLTVITPHTLEAIVRQPPDRWITNARLTHYQALLLDTDRVQFGPPVTLNPATLLPVPENQPSPHDCRQVLAETHGTREDLKDQELPDADHTWYTDGSSYLDSGTRRAGAAVVDGHNTIWAQSLPPGTSAQKAELIALTKALELSKGKKANIYTDSRYAFATAHTHGSIYERRGWLTSEGKEIKNKAEIIALLKALFLPQEVAIIHCPGHQKGQDPVAVGNRQADRVARQAAMAEVLTLATEPDNTSHITAGKRTADGSEFEKRTADGSEFESPKKKAKVE

SEQ ID NO: 1590 - protein, 2097 aa, synthetic construct
MPAAKRVKLDGGDKKYSIGLDIGTNSVGWAVITDEYKVPSKKFKVLGNTDRHSIKKNLIGALLFDSGETAEATRLKRTARRRYTRRKNRICYLQEIFSNEMAKVDDSFFHRLEESFLVEEDKKHERHPIFGNIVDEVAYHEKYPTIYHLRKKLVDSTDKADLRLIYLALAHMIKFRGHFLIEGDLNPDNSDVDKLFIQLVQTYNQLFEENPINASGVDAKAILSARLSKSRRLENLIAQLPGEKKNGLFGNLIALSLGLTPNFKSNFDLAEDAKLQLSKDTYDDDLDNLLAQIGDQYADLFLAAKNLSDAILLSDILRVNTEITKAPLSASMIKRYDEHHQDLTLLKALVRQQLPEKYKEIFFDQSKNGYAGYIDGGASQEEFYKFIKPILEKMDGTEELLVKLNREDLLRKQRTFDNGSIPHQIHLGELHAILRRQEDFYPFLKDNREKIEKILTFRIPYYVGPLARGNSRFAWMTRKSEETITPWNFEEVVDKGASAQSFIERMTNFDKNLPNEKVLPKHSLLYEYFTVYNELTKVKYVTEGMRKPAFLSGEQKKAIVDLLFKTNRKVTVKQLKEDYFKKIECFDSVEISGVEDRFNASLGTYHDLLKIIKDKDFLDNEENEDILEDIVLTLTLFEDREMIEERLKTYAHLFDDKVMKQLKRRRYTGWGRLSRKLINGIRDKQSGKTILDFLKSDGFANRNFMQLIHDDSLTFKEDIQKAQVSGQGDSLHEHIANLAGSPAIKKGILQTVKVVDELVKVMGRHKPENIVIEMARENQTTQKGQKNSRERMKRIEEGIKELGSQILKEHPVENTQLQNEKLYLYYLQNGRDMYVDQELDINRLSDYDVDHIVPQSFLKDDSIDNKVLTRSDKARGKSDNVPSEEVVKKMKNYWRQLLNAKLITQRKFDNLTKAERGGLSELDKAGFIKRQLVETRQITKHVAQILDSRMNTKYDENDKLIREVKVITLKSKLVSDFRKDFQFYKVREINNYHHAHDAYLNAVVGTALIKKYPKLESEFVYGDYKVYDVRKMIAKSEQEIGKATAKYFFYSNIMNFFKTEITLANGEIRKRPLIETNGETGEIVWDKGRDFATVRKVLSMPQVNIVKKTEVQTGGFSKESILPKRNSDKLIARKKDWDPKKYGGFDSPTVAYSVLVVAKVEKGKSKKLKSVKELLGITIMERSSFEKNPIDFLEAKGYKEVKKDLIIKLPKYSLFELENGRKRMLASAGELQKGNELALPSKYVNFLYLASHYEKLKGSPEDNEQKQLFVEQHKHYLDEIIEQISEFSKRVILADANLDKVLSAYNKHRDKPIREQAENIIHLFTLTNLGAPAAFKYFDTTIDRKRYTSTKEVLDATLIHQSITGLYETRIDLSQLGGDGGPAPGGGGGTVSLQDEHRLFDIPVTTSLPDVWLQDFPQAWAETGGLGRAKCQAPIIIDLKPTAVPVSIKQYPMSLEAHMGIRQHIIKFLELGVLRPCRSPWNTPLLPVKKPGTQDYRPVQDLREINKRTVDIHPTVPNPYNLLSTLKPDYSWYTVLDLKDAFFCLPLAPQSQELFAFEWKDPERGISGQLTWTRLPQGFKNSPTLFNEALHRDLTDFRTQHPEVTLLQYVDDLLLAAPTKKACTQGTRHLLQELGEKGYRASAKKAQICQTKVTYLGYILSEGKRWLTPGRIETVARIPPPRNPREVREFLGTAGFCRLWIPGFAELAAPLYALTKPSTPFTWQTEHQLAFEALKKALLSAPALGLPDTSKPFTLFLDERQGIAKGVLTQKLGPWKRPVAYLSKKLDPVAAGWPPCLRIMAATAMLVKDSAKLTLGQPLTVITPHTLEAIVRQPPDRWITNARLTHYQALLLDTDRVQFGPPVTLNPATLLPVPENQPSPHDCRQVLAETHGTREDLKDQELPDADHTWYTDGSSYLDSGTRRAGAAVVDGHNTIWAQSLPPGTSAQKAELIALTKALELSKGKKANIYTDSRYAFATAHTHGSIYERRGWLTSEGKEIKNKAEIIALLKALFLPQEVAIIHCPGHQKGQDPVAVGNRQADRVARQAAMAEVLTLATEPDNTSHITAGKRTADGSEFEKRTADGSEFESPKKKAKVE

SEQ ID NO: 1591 - protein, 2100 aa, synthetic construct
MPAAKRVKLDGGDKKYSIGLDIGTNSVGWAVITDEYKVPSKKFKVLGNTDRHSIKKNLIGALLFDSGETAEATRLKRTARRRYTRRKNRICYLQEIFSNEMAKVDDSFFHRLEESFLVEEDKKHERHPIFGNIVDEVAYHEKYPTIYHLRKKLVDSTDKADLRLIYLALAHMIKFRGHFLIEGDLNPDNSDVDKLFIQLVQTYNQLFEENPINASGVDAKAILSARLSKSRRLENLIAQLPGEKKNGLFGNLIALSLGLTPNFKSNFDLAEDAKLQLSKDTYDDDLDNLLAQIGDQYADLFLAAKNLSDAILLSDILRVNTEITKAPLSASMIKRYDEHHQDLTLLKALVRQQLPEKYKEIFFDQSKNGYAGYIDGGASQEEFYKFIKPILEKMDGTEELLVKLNREDLLRKQRTFDNGSIPHQIHLGELHAILRRQEDFYPFLKDNREKIEKILTFRIPYYVGPLARGNSRFAWMTRKSEETITPWNFEEVVDKGASAQSFIERMTNFDKNLPNEKVLPKHSLLYEYFTVYNELTKVKYVTEGMRKPAFLSGEQKKAIVDLLFKTNRKVTVKQLKEDYFKKIECFDSVEISGVEDRFNASLGTYHDLLKIIKDKDFLDNEENEDILEDIVLTLTLFEDREMIEERLKTYAHLFDDKVMKQLKRRRYTGWGRLSRKLINGIRDKQSGKTILDFLKSDGFANRNFMQLIHDDSLTFKEDIQKAQVSGQGDSLHEHIANLAGSPAIKKGILQTVKVVDELVKVMGRHKPENIVIEMARENQTTQKGQKNSRERMKRIEEGIKELGSQILKEHPVENTQLQNEKLYLYYLQNGRDMYVDQELDINRLSDYDVDHIVPQSFLKDDSIDNKVLTRSDKARGKSDNVPSEEVVKKMKNYWRQLLNAKLITQRKFDNLTKAERGGLSELDKAGFIKRQLVETRQITKHVAQILDSRMNTKYDENDKLIREVKVITLKSKLVSDFRKDFQFYKVREINNYHHAHDAYLNAVVGTALIKKYPKLESEFVYGDYKVYDVRKMIAKSEQEIGKATAKYFFYSNIMNFFKTEITLANGEIRKRPLIETNGETGEIVWDKGRDFATVRKVLSMPQVNIVKKTEVQTGGFSKESILPKRNSDKLIARKKDWDPKKYGGFDSPTVAYSVLVVAKVEKGKSKKLKSVKELLGITIMERSSFEKNPIDFLEAKGYKEVKKDLIIKLPKYSLFELENGRKRMLASAGELQKGNELALPSKYVNFLYLASHYEKLKGSPEDNEQKQLFVEQHKHYLDEIIEQISEFSKRVILADANLDKVLSAYNKHRDKPIREQAENIIHLFTLTNLGAPAAFKYFDTTIDRKRYTSTKEVLDATLIHQSITGLYETRIDLSQLGGDGGGGSPAPGSSGGTVSLQDEHRLFDIPVTTSLPDVWLQDFPQAWAETGGLGRAKCQAPIIIDLKPTAVPVSIKQYPMSLEAHMGIRQHIIKFLELGVLRPCRSPWNTPLLPVKKPGTQDYRPVQDLREINKRTVDIHPTVPNPYNLLSTLKPDYSWYTVLDLKDAFFCLPLAPQSQELFAFEWKDPERGISGQLTWTRLPQGFKNSPTLFNEALHRDLTDFRTQHPEVTLLQYVDDLLLAAPTKKACTQGTRHLLQELGEKGYRASAKKAQICQTKVTYLGYILSEGKRWLTPGRIETVARIPPPRNPREVREFLGTAGFCRLWIPGFAELAAPLYALTKPSTPFTWQTEHQLAFEALKKALLSAPALGLPDTSKPFTLFLDERQGIAKGVLTQKLGPWKRPVAYLSKKLDPVAAGWPPCLRIMAATAMLVKDSAKLTLGQPLTVITPHTLEAIVRQPPDRWITNARLTHYQALLLDTDRVQFGPPVTLNPATLLPVPENQPSPHDCRQVLAETHGTREDLKDQELPDADHTWYTDGSSYLDSGTRRAGAAVVDGHNTIWAQSLPPGTSAQKAELIALTKALELSKGKKANIYTDSRYAFATAHTHGSIYERRGWLTSEGKEIKNKAEIIALLKALFLPQEVAIIHCPGHQKGQDPVAVGNRQADRVARQAAMAEVLTLATEPDNTSHITAGKRTADGSEFEKRTADGSEFESPKKKAKVE

SEQ ID NO: 1592 - protein, 2097 aa, synthetic construct
MPAAKRVKLDGGDKKYSIGLDIGTNSVGWAVITDEYKVPSKKFKVLGNTDRHSIKKNLIGALLFDSGETAEATRLKRTARRRYTRRKNRICYLQEIFSNEMAKVDDSFFHRLEESFLVEEDKKHERHPIFGNIVDEVAYHEKYPTIYHLRKKLVDSTDKADLRLIYLALAHMIKFRGHFLIEGDLNPDNSDVDKLFIQLVQTYNQLFEENPINASGVDAKAILSARLSKSRRLENLIAQLPGEKKNGLFGNLIALSLGLTPNFKSNFDLAEDAKLQLSKDTYDDDLDNLLAQIGDQYADLFLAAKNLSDAILLSDILRVNTEITKAPLSASMIKRYDEHHQDLTLLKALVRQQLPEKYKEIFFDQSKNGYAGYIDGGASQEEFYKFIKPILEKMDGTEELLVKLNREDLLRKQRTFDNGSIPHQIHLGELHAILRRQEDFYPFLKDNREKIEKILTFRIPYYVGPLARGNSRFAWMTRKSEETITPWNFEEVVDKGASAQSFIERMTNFDKNLPNEKVLPKHSLLYEYFTVYNELTKVKYVTEGMRKPAFLSGEQKKAIVDLLFKTNRKVTVKQLKEDYFKKIECFDSVEISGVEDRFNASLGTYHDLLKIIKDKDFLDNEENEDILEDIVLTLTLFEDREMIEERLKTYAHLFDDKVMKQLKRRRYTGWGRLSRKLINGIRDKQSGKTILDFLKSDGFANRNFMQLIHDDSLTFKEDIQKAQVSGQGDSLHEHIANLAGSPAIKKGILQTVKVVDELVKVMGRHKPENIVIEMARENQTTQKGQKNSRERMKRIEEGIKELGSQILKEHPVENTQLQNEKLYLYYLQNGRDMYVDQELDINRLSDYDVDHIVPQSFLKDDSIDNKVLTRSDKARGKSDNVPSEEVVKKMKNYWRQLLNAKLITQRKFDNLTKAERGGLSELDKAGFIKRQLVETRQITKHVAQILDSRMNTKYDENDKLIREVKVITLKSKLVSDFRKDFQFYKVREINNYHHAHDAYLNAVVGTALIKKYPKLESEFVYGDYKVYDVRKMIAKSEQEIGKATAKYFFYSNIMNFFKTEITLANGEIRKRPLIETNGETGEIVWDKGRDFATVRKVLSMPQVNIVKKTEVQTGGFSKESILPKRNSDKLIARKKDWDPKKYGGFDSPTVAYSVLVVAKVEKGKSKKLKSVKELLGITIMERSSFEKNPIDFLEAKGYKEVKKDLIIKLPKYSLFELENGRKRMLASAGELQKGNELALPSKYVNFLYLASHYEKLKGSPEDNEQKQLFVEQHKHYLDEIIEQISEFSKRVILADANLDKVLSAYNKHRDKPIREQAENIIHLFTLTNLGAPAAFKYFDTTIDRKRYTSTKEVLDATLIHQSITGLYETRIDLSQLGGDGGGSSPAPGGTVSLQDEHRLFDIPVTTSLPDVWLQDFPQAWAETGGLGRAKCQAPIIIDLKPTAVPVSIKQYPMSLEAHMGIRQHIIKFLELGVLRPCRSPWNTPLLPVKKPGTQDYRPVQDLREINKRTVDIHPTVPNPYNLLSTLKPDYSWYTVLDLKDAFFCLPLAPQSQELFAFEWKDPERGISGQLTWTRLPQGFKNSPTLFNEALHRDLTDFRTQHPEVTLLQYVDDLLLAAPTKKACTQGTRHLLQELGEKGYRASAKKAQICQTKVTYLGYILSEGKRWLTPGRIETVARIPPPRNPREVREFLGTAGFCRLWIPGFAELAAPLYALTKPSTPFTWQTEHQLAFEALKKALLSAPALGLPDTSKPFTLFLDERQGIAKGVLTQKLGPWKRPVAYLSKKLDPVAAGWPPCLRIMAATAMLVKDSAKLTLGQPLTVITPHTLEAIVRQPPDRWITNARLTHYQALLLDTDRVQFGPPVTLNPATLLPVPENQPSPHDCRQVLAETHGTREDLKDQELPDADHTWYTDGSSYLDSGTRRAGAAVVDGHNTIWAQSLPPGTSAQKAELIALTKALELSKGKKANIYTDSRYAFATAHTHGSIYERRGWLTSEGKEIKNKAEIIALLKALFLPQEVAIIHCPGHQKGQDPVAVGNRQADRVARQAAMAEVLTLATEPDNTSHITAGKRTADGSEFEKRTADGSEFESPKKKAKVE

SEQ ID NO: 1593 - protein, 2102 aa, synthetic construct
MPAAKRVKLDGGDKKYSIGLDIGTNSVGWAVITDEYKVPSKKFKVLGNTDRHSIKKNLIGALLFDSGETAEATRLKRTARRRYTRRKNRICYLQEIFSNEMAKVDDSFFHRLEESFLVEEDKKHERHPIFGNIVDEVAYHEKYPTIYHLRKKLVDSTDKADLRLIYLALAHMIKFRGHFLIEGDLNPDNSDVDKLFIQLVQTYNQLFEENPINASGVDAKAILSARLSKSRRLENLIAQLPGEKKNGLFGNLIALSLGLTPNFKSNFDLAEDAKLQLSKDTYDDDLDNLLAQIGDQYADLFLAAKNLSDAILLSDILRVNTEITKAPLSASMIKRYDEHHQDLTLLKALVRQQLPEKYKEIFFDQSKNGYAGYIDGGASQEEFYKFIKPILEKMDGTEELLVKLNREDLLRKQRTFDNGSIPHQIHLGELHAILRRQEDFYPFLKDNREKIEKILTFRIPYYVGPLARGNSRFAWMTRKSEETITPWNFEEVVDKGASAQSFIERMTNFDKNLPNEKVLPKHSLLYEYFTVYNELTKVKYVTEGMRKPAFLSGEQKKAIVDLLFKTNRKVTVKQLKEDYFKKIECFDSVEISGVEDRFNASLGTYHDLLKIIKDKDFLDNEENEDILEDIVLTLTLFEDREMIEERLKTYAHLFDDKVMKQLKRRRYTGWGRLSRKLINGIRDKQSGKTILDFLKSDGFANRNFMQLIHDDSLTFKEDIQKAQVSGQGDSLHEHIANLAGSPAIKKGILQTVKVVDELVKVMGRHKPENIVIEMARENQTTQKGQKNSRERMKRIEEGIKELGSQILKEHPVENTQLQNEKLYLYYLQNGRDMYVDQELDINRLSDYDVDHIVPQSFLKDDSIDNKVLTRSDKARGKSDNVPSEEVVKKMKNYWRQLLNAKLITQRKFDNLTKAERGGLSELDKAGFIKRQLVETRQITKHVAQILDSRMNTKYDENDKLIREVKVITLKSKLVSDFRKDFQFYKVREINNYHHAHDAYLNAVVGTALIKKYPKLESEFVYGDYKVYDVRKMIAKSEQEIGKATAKYFFYSNIMNFFKTEITLANGEIRKRPLIETNGETGEIVWDKGRDFATVRKVLSMPQVNIVKKTEVQTGGFSKESILPKRNSDKLIARKKDWDPKKYGGFDSPTVAYSVLVVAKVEKGKSKKLKSVKELLGITIMERSSFEKNPIDFLEAKGYKEVKKDLIIKLPKYSLFELENGRKRMLASAGELQKGNELALPSKYVNFLYLASHYEKLKGSPEDNEQKQLFVEQHKHYLDEIIEQISEFSKRVILADANLDKVLSAYNKHRDKPIREQAENIIHLFTLTNLGAPAAFKYFDTTIDRKRYTSTKEVLDATLIHQSITGLYETRIDLSQLGGDGGEAAAKGGGGSSGGTVSLQDEHRLFDIPVTTSLPDVWLQDFPQAWAETGGLGRAKCQAPIIIDLKPTAVPVSIKQYPMSLEAHMGIRQHIIKFLELGVLRPCRSPWNTPLLPVKKPGTQDYRPVQDLREINKRTVDIHPTVPNPYNLLSTLKPDYSWYTVLDLKDAFFCLPLAPQSQELFAFEWKDPERGISGQLTWTRLPQGFKNSPTLFNEALHRDLTDFRTQHPEVTLLQYVDDLLLAAPTKKACTQGTRHLLQELGEKGYRASAKKAQICQTKVTYLGYILSEGKRWLTPGRIETVARIPPPRNPREVREFLGTAGFCRLWIPGFAELAAPLYALTKPSTPFTWQTEHQLAFEALKKALLSAPALGLPDTSKPFTLFLDERQGIAKGVLTQKLGPWKRPVAYLSKKLDPVAAGWPPCLRIMAATAMLVKDSAKLTLGQPLTVITPHTLEAIVRQPPDRWITNARLTHYQALLLDTDRVQFGPPVTLNPATLLPVPENQPSPHDCRQVLAETHGTREDLKDQELPDADHTWYTDGSSYLDSGTRRAGAAVVDGHNTIWAQSLPPGTSAQKAELIALTKALELSKGKKANIYTDSRYAFATAHTHGSIYERRGWLTSEGKEIKNKAEIIALLKALFLPQEVAIIHCPGHQKGQDPVAVGNRQADRVARQAAMAEVLTLATEPDNTSHITAGKRTADGSEFEKRTADGSEFESPKKKAKVE

SEQ ID NO: 1594 - protein, 2103 aa, synthetic construct
MPAAKRVKLDGGDKKYSIGLDIGTNSVGWAVITDEYKVPSKKFKVLGNTDRHSIKKNLIGALLFDSGETAEATRLKRTARRRYTRRKNRICYLQEIFSNEMAKVDDSFFHRLEESFLVEEDKKHERHPIFGNIVDEVAYHEKYPTIYHLRKKLVDSTDKADLRLIYLALAHMIKFRGHFLIEGDLNPDNSDVDKLFIQLVQTYNQLFEENPINASGVDAKAILSARLSKSRRLENLIAQLPGEKKNGLFGNLIALSLGLTPNFKSNFDLAEDAKLQLSKDTYDDDLDNLLAQIGDQYADLFLAAKNLSDAILLSDILRVNTEITKAPLSASMIKRYDEHHQDLTLLKALVRQQLPEKYKEIFFDQSKNGYAGYIDGGASQEEFYKFIKPILEKMDGTEELLVKLNREDLLRKQRTFDNGSIPHQIHLGELHAILRRQEDFYPFLKDNREKIEKILTFRIPYYVGPLARGNSRFAWMTRKSEETITPWNFEEVVDKGASAQSFIERMTNFDKNLPNEKVLPKHSLLYEYFTVYNELTKVKYVTEGMRKPAFLSGEQKKAIVDLLFKTNRKVTVKQLKEDYFKKIECFDSVEISGVEDRFNASLGTYHDLLKIIKDKDFLDNEENEDILEDIVLTLTLFEDREMIEERLKTYAHLFDDKVMKQLKRRRYTGWGRLSRKLINGIRDKQSGKTILDFLKSDGFANRNFMQLIHDDSLTFKEDIQKAQVSGQGDSLHEHIANLAGSPAIKKGILQTVKVVDELVKVMGRHKPENIVIEMARENQTTQKGQKNSRERMKRIEEGIKELGSQILKEHPVENTQLQNEKLYLYYLQNGRDMYVDQELDINRLSDYDVDHIVPQSFLKDDSIDNKVLTRSDKARGKSDNVPSEEVVKKMKNYWRQLLNAKLITQRKFDNLTKAERGGLSELDKAGFIKRQLVETRQITKHVAQILDSRMNTKYDENDKLIREVKVITLKSKLVSDFRKDFQFYKVREINNYHHAHDAYLNAVVGTALIKKYPKLESEFVYGDYKVYDVRKMIAKSEQEIGKATAKYFFYSNIMNFFKTEITLANGEIRKRPLIETNGETGEIVWDKGRDFATVRKVLSMPQVNIVKKTEVQTGGFSKESILPKRNSDKLIARKKDWDPKKYGGFDSPTVAYSVLVVAKVEKGKSKKLKSVKELLGITIMERSSFEKNPIDFLEAKGYKEVKKDLIIKLPKYSLFELENGRKRMLASAGELQKGNELALPSKYVNFLYLASHYEKLKGSPEDNEQKQLFVEQHKHYLDEIIEQISEFSKRVILADANLDKVLSAYNKHRDKPIREQAENIIHLFTLTNLGAPAAFKYFDTTIDRKRYTSTKEVLDATLIHQSITGLYETRIDLSQLGGDGGGSAGSAAGSGEFGGTVSLQDEHRLFDIPVTTSLPDVWLQDFPQAWAETGGLGRAKCQAPIIIDLKPTAVPVSIKQYPMSLEAHMGIRQHIIKFLELGVLRPCRSPWNTPLLPVKKPGTQDYRPVQDLREINKRTVDIHPTVPNPYNLLSTLKPDYSWYTVLDLKDAFFCLPLAPQSQELFAFEWKDPERGISGQLTWTRLPQGFKNSPTLFNEALHRDLTDFRTQHPEVTLLQYVDDLLLAAPTKKACTQGTRHLLQELGEKGYRASAKKAQICQTKVTYLGYILSEGKRWLTPGRIETVARIPPPRNPREVREFLGTAGFCRLWIPGFAELAAPLYALTKPSTPFTWQTEHQLAFEALKKALLSAPALGLPDTSKPFTLFLDERQGIAKGVLTQKLGPWKRPVAYLSKKLDPVAAGWPPCLRIMAATAMLVKDSAKLTLGQPLTVITPHTLEAIVRQPPDRWITNARLTHYQALLLDTDRVQFGPPVTLNPATLLPVPENQPSPHDCRQVLAETHGTREDLKDQELPDADHTWYTDGSSYLDSGTRRAGAAVVDGHNTIWAQSLPPGTSAQKAELIALTKALELSKGKKANIYTDSRYAFATAHTHGSIYERRGWLTSEGKEIKNKAEIIALLKALFLPQEVAIIHCPGHQKGQDPVAVGNRQADRVARQAAMAEVLTLATEPDNTSHITAGKRTADGSEFEKRTADGSEFESPKKKAKVE

SEQ ID NO: 1595 - protein, 2100 aa, synthetic construct
MPAAKRVKLDGGDKKYSIGLDIGTNSVGWAVITDEYKVPSKKFKVLGNTDRHSIKKNLIGALLFDSGETAEATRLKRTARRRYTRRKNRICYLQEIFSNEMAKVDDSFFHRLEESFLVEEDKKHERHPIFGNIVDEVAYHEKYPTIYHLRKKLVDSTDKADLRLIYLALAHMIKFRGHFLIEGDLNPDNSDVDKLFIQLVQTYNQLFEENPINASGVDAKAILSARLSKSRRLENLIAQLPGEKKNGLFGNLIALSLGLTPNFKSNFDLAEDAKLQLSKDTYDDDLDNLLAQIGDQYADLFLAAKNLSDAILLSDILRVNTEITKAPLSASMIKRYDEHHQDLTLLKALVRQQLPEKYKEIFFDQSKNGYAGYIDGGASQEEFYKFIKPILEKMDGTEELLVKLNREDLLRKQRTFDNGSIPHQIHLGELHAILRRQEDFYPFLKDNREKIEKILTFRIPYYVGPLARGNSRFAWMTRKSEETITPWNFEEVVDKGASAQSFIERMTNFDKNLPNEKVLPKHSLLYEYFTVYNELTKVKYVTEGMRKPAFLSGEQKKAIVDLLFKTNRKVTVKQLKEDYFKKIECFDSVEISGVEDRFNASLGTYHDLLKIIKDKDFLDNEENEDILEDIVLTLTLFEDREMIEERLKTYAHLFDDKVMKQLKRRRYTGWGRLSRKLINGIRDKQSGKTILDFLKSDGFANRNFMQLIHDDSLTFKEDIQKAQVSGQGDSLHEHIANLAGSPAIKKGILQTVKVVDELVKVMGRHKPENIVIEMARENQTTQKGQKNSRERMKRIEEGIKELGSQILKEHPVENTQLQNEKLYLYYLQNGRDMYVDQELDINRLSDYDVDHIVPQSFLKDDSIDNKVLTRSDKARGKSDNVPSEEVVKKMKNYWRQLLNAKLITQRKFDNLTKAERGGLSELDKAGFIKRQLVETRQITKHVAQILDSRMNTKYDENDKLIREVKVITLKSKLVSDFRKDFQFYKVREINNYHHAHDAYLNAVVGTALIKKYPKLESEFVYGDYKVYDVRKMIAKSEQEIGKATAKYFFYSNIMNFFKTEITLANGEIRKRPLIETNGETGEIVWDKGRDFATVRKVLSMPQVNIVKKTEVQTGGFSKESILPKRNSDKLIARKKDWDPKKYGGFDSPTVAYSVLVVAKVEKGKSKKLKSVKELLGITIMERSSFEKNPIDFLEAKGYKEVKKDLIIKLPKYSLFELENGRKRMLASAGELQKGNELALPSKYVNFLYLASHYEKLKGSPEDNEQKQLFVEQHKHYLDEIIEQISEFSKRVILADANLDKVLSAYNKHRDKPIREQAENIIHLFTLTNLGAPAAFKYFDTTIDRKRYTSTKEVLDATLIHQSITGLYETRIDLSQLGGDGGGGGPAPGGSGGTVSLQDEHRLFDIPVTTSLPDVWLQDFPQAWAETGGLGRAKCQAPIIIDLKPTAVPVSIKQYPMSLEAHMGIRQHIIKFLELGVLRPCRSPWNTPLLPVKKPGTQDYRPVQDLREINKRTVDIHPTVPNPYNLLSTLKPDYSWYTVLDLKDAFFCLPLAPQSQELFAFEWKDPERGISGQLTWTRLPQGFKNSPTLFNEALHRDLTDFRTQHPEVTLLQYVDDLLLAAPTKKACTQGTRHLLQELGEKGYRASAKKAQICQTKVTYLGYILSEGKRWLTPGRIETVARIPPPRNPREVREFLGTAGFCRLWIPGFAELAAPLYALTKPSTPFTWQTEHQLAFEALKKALLSAPALGLPDTSKPFTLFLDERQGIAKGVLTQKLGPWKRPVAYLSKKLDPVAAGWPPCLRIMAATAMLVKDSAKLTLGQPLTVITPHTLEAIVRQPPDRWITNARLTHYQALLLDTDRVQFGPPVTLNPATLLPVPENQPSPHDCRQVLAETHGTREDLKDQELPDADHTWYTDGSSYLDSGTRRAGAAVVDGHNTIWAQSLPPGTSAQKAELIALTKALELSKGKKANIYTDSRYAFATAHTHGSIYERRGWLTSEGKEIKNKAEIIALLKALFLPQEVAIIHCPGHQKGQDPVAVGNRQADRVARQAAMAEVLTLATEPDNTSHITAGKRTADGSEFEKRTADGSEFESPKKKAKVE

SEQ ID NO: 1596 - protein, 2102 aa, synthetic construct
MPAAKRVKLDGGDKKYSIGLDIGTNSVGWAVITDEYKVPSKKFKVLGNTDRHSIKKNLIGALLFDSGETAEATRLKRTARRRYTRRKNRICYLQEIFSNEMAKVDDSFFHRLEESFLVEEDKKHERHPIFGNIVDEVAYHEKYPTIYHLRKKLVDSTDKADLRLIYLALAHMIKFRGHFLIEGDLNPDNSDVDKLFIQLVQTYNQLFEENPINASGVDAKAILSARLSKSRRLENLIAQLPGEKKNGLFGNLIALSLGLTPNFKSNFDLAEDAKLQLSKDTYDDDLDNLLAQIGDQYADLFLAAKNLSDAILLSDILRVNTEITKAPLSASMIKRYDEHHQDLTLLKALVRQQLPEKYKEIFFDQSKNGYAGYIDGGASQEEFYKFIKPILEKMDGTEELLVKLNREDLLRKQRTFDNGSIPHQIHLGELHAILRRQEDFYPFLKDNREKIEKILTFRIPYYVGPLARGNSRFAWMTRKSEETITPWNFEEVVDKGASAQSFIERMTNFDKNLPNEKVLPKHSLLYEYFTVYNELTKVKYVTEGMRKPAFLSGEQKKAIVDLLFKTNRKVTVKQLKEDYFKKIECFDSVEISGVEDRFNASLGTYHDLLKIIKDKDFLDNEENEDILEDIVLTLTLFEDREMIEERLKTYAHLFDDKVMKQLKRRRYTGWGRLSRKLINGIRDKQSGKTILDFLKSDGFANRNFMQLIHDDSLTFKEDIQKAQVSGQGDSLHEHIANLAGSPAIKKGILQTVKVVDELVKVMGRHKPENIVIEMARENQTTQKGQKNSRERMKRIEEGIKELGSQILKEHPVENTQLQNEKLYLYYLQNGRDMYVDQELDINRLSDYDVDHIVPQSFLKDDSIDNKVLTRSDKARGKSDNVPSEEVVKKMKNYWRQLLNAKLITQRKFDNLTKAERGGLSELDKAGFIKRQLVETRQITKHVAQILDSRMNTKYDENDKLIREVKVITLKSKLVSDFRKDFQFYKVREINNYHHAHDAYLNAVVGTALIKKYPKLESEFVYGDYKVYDVRKMIAKSEQEIGKATAKYFFYSNIMNFFKTEITLANGEIRKRPLIETNGETGEIVWDKGRDFATVRKVLSMPQVNIVKKTEVQTGGFSKESILPKRNSDKLIARKKDWDPKKYGGFDSPTVAYSVLVVAKVEKGKSKKLKSVKELLGITIMERSSFEKNPIDFLEAKGYKEVKKDLIIKLPKYSLFELENGRKRMLASAGELQKGNELALPSKYVNFLYLASHYEKLKGSPEDNEQKQLFVEQHKHYLDEIIEQISEFSKRVILADANLDKVLSAYNKHRDKPIREQAENIIHLFTLTNLGAPAAFKYFDTTIDRKRYTSTKEVLDATLIHQSITGLYETRIDLSQLGGDGGGSSPAPEAAAKGGTVSLQDEHRLFDIPVTTSLPDVWLQDFPQAWAETGGLGRAKCQAPIIIDLKPTAVPVSIKQYPMSLEAHMGIRQHIIKFLELGVLRPCRSPWNTPLLPVKKPGTQDYRPVQDLREINKRTVDIHPTVPNPYNLLSTLKPDYSWYTVLDLKDAFFCLPLAPQSQELFAFEWKDPERGISGQLTWTRLPQGFKNSPTLFNEALHRDLTDFRTQHPEVTLLQYVDDLLLAAPTKKACTQGTRHLLQELGEKGYRASAKKAQICQTKVTYLGYILSEGKRWLTPGRIETVARIPPPRNPREVREFLGTAGFCRLWIPGFAELAAPLYALTKPSTPFTWQTEHQLAFEALKKALLSAPALGLPDTSKPFTLFLDERQGIAKGVLTQKLGPWKRPVAYLSKKLDPVAAGWPPCLRIMAATAMLVKDSAKLTLGQPLTVITPHTLEAIVRQPPDRWITNARLTHYQALLLDTDRVQFGPPVTLNPATLLPVPENQPSPHDCRQVLAETHGTREDLKDQELPDADHTWYTDGSSYLDSGTRRAGAAVVDGHNTIWAQSLPPGTSAQKAELIALTKALELSKGKKANIYTDSRYAFATAHTHGSIYERRGWLTSEGKEIKNKAEIIALLKALFLPQEVAIIHCPGHQKGQDPVAVGNRQADRVARQAAMAEVLTLATEPDNTSHITAGKRTADGSEFEKRTADGSEFESPKKKAKVE

SEQ ID NO: 1597 - protein, 2101 aa, synthetic construct
MPAAKRVKLDGGDKKYSIGLDIGTNSVGWAVITDEYKVPSKKFKVLGNTDRHSIKKNLIGALLFDSGETAEATRLKRTARRRYTRRKNRICYLQEIFSNEMAKVDDSFFHRLEESFLVEEDKKHERHPIFGNIVDEVAYHEKYPTIYHLRKKLVDSTDKADLRLIYLALAHMIKFRGHFLIEGDLNPDNSDVDKLFIQLVQTYNQLFEENPINASGVDAKAILSARLSKSRRLENLIAQLPGEKKNGLFGNLIALSLGLTPNFKSNFDLAEDAKLQLSKDTYDDDLDNLLAQIGDQYADLFLAAKNLSDAILLSDILRVNTEITKAPLSASMIKRYDEHHQDLTLLKALVRQQLPEKYKEIFFDQSKNGYAGYIDGGASQEEFYKFIKPILEKMDGTEELLVKLNREDLLRKQRTFDNGSIPHQIHLGELHAILRRQEDFYPFLKDNREKIEKILTFRIPYYVGPLARGNSRFAWMTRKSEETITPWNFEEVVDKGASAQSFIERMTNFDKNLPNEKVLPKHSLLYEYFTVYNELTKVKYVTEGMRKPAFLSGEQKKAIVDLLFKTNRKVTVKQLKEDYFKKIECFDSVEISGVEDRFNASLGTYHDLLKIIKDKDFLDNEENEDILEDIVLTLTLFEDREMIEERLKTYAHLFDDKVMKQLKRRRYTGWGRLSRKLINGIRDKQSGKTILDFLKSDGFANRNFMQLIHDDSLTFKEDIQKAQVSGQGDSLHEHIANLAGSPAIKKGILQTVKVVDELVKVMGRHKPENIVIEMARENQTTQKGQKNSRERMKRIEEGIKELGSQILKEHPVENTQLQNEKLYLYYLQNGRDMYVDQELDINRLSDYDVDHIVPQSFLKDDSIDNKVLTRSDKARGKSDNVPSEEVVKKMKNYWRQLLNAKLITQRKFDNLTKAERGGLSELDKAGFIKRQLVETRQITKHVAQILDSRMNTKYDENDKLIREVKVITLKSKLVSDFRKDFQFYKVREINNYHHAHDAYLNAVVGTALIKKYPKLESEFVYGDYKVYDVRKMIAKSEQEIGKATAKYFFYSNIMNFFKTEITLANGEIRKRPLIETNGETGEIVWDKGRDFATVRKVLSMPQVNIVKKTEVQTGGFSKESILPKRNSDKLIARKKDWDPKKYGGFDSPTVAYSVLVVAKVEKGKSKKLKSVKELLGITIMERSSFEKNPIDFLEAKGYKEVKKDLIIKLPKYSLFELENGRKRMLASAGELQKGNELALPSKYVNFLYLASHYEKLKGSPEDNEQKQLFVEQHKHYLDEIIEQISEFSKRVILADANLDKVLSAYNKHRDKPIREQAENIIHLFTLTNLGAPAAFKYFDTTIDRKRYTSTKEVLDATLIHQSITGLYETRIDLSQLGGDGGGGGGSGGGGSGGTVSLQDEHRLFDIPVTTSLPDVWLQDFPQAWAETGGLGRAKCQAPIIIDLKPTAVPVSIKQYPMSLEAHMGIRQHIIKFLELGVLRPCRSPWNTPLLPVKKPGTQDYRPVQDLREINKRTVDIHPTVPNPYNLLSTLKPDYSWYTVLDLKDAFFCLPLAPQSQELFAFEWKDPERGISGQLTWTRLPQGFKNSPTLFNEALHRDLTDFRTQHPEVTLLQYVDDLLLAAPTKKACTQGTRHLLQELGEKGYRASAKKAQICQTKVTYLGYILSEGKRWLTPGRIETVARIPPPRNPREVREFLGTAGFCRLWIPGFAELAAPLYALTKPSTPFTWQTEHQLAFEALKKALLSAPALGLPDTSKPFTLFLDERQGIAKGVLTQKLGPWKRPVAYLSKKLDPVAAGWPPCLRIMAATAMLVKDSAKLTLGQPLTVITPHTLEAIVRQPPDRWITNARLTHYQALLLDTDRVQFGPPVTLNPATLLPVPENQPSPHDCRQVLAETHGTREDLKDQELPDADHTWYTDGSSYLDSGTRRAGAAVVDGHNTIWAQSLPPGTSAQKAELIALTKALELSKGKKANIYTDSRYAFATAHTHGSIYERRGWLTSEGKEIKNKAEIIALLKALFLPQEVAIIHCPGHQKGQDPVAVGNRQADRVARQAAMAEVLTLATEPDNTSHITAGKRTADGSEFEKRTADGSEFESPKKKAKVE

SEQ ID NO: 1598 - protein, 2102 aa, synthetic construct
MPAAKRVKLDGGDKKYSIGLDIGTNSVGWAVITDEYKVPSKKFKVLGNTDRHSIKKNLIGALLFDSGETAEATRLKRTARRRYTRRKNRICYLQEIFSNEMAKVDDSFFHRLEESFLVEEDKKHERHPIFGNIVDEVAYHEKYPTIYHLRKKLVDSTDKADLRLIYLALAHMIKFRGHFLIEGDLNPDNSDVDKLFIQLVQTYNQLFEENPINASGVDAKAILSARLSKSRRLENLIAQLPGEKKNGLFGNLIALSLGLTPNFKSNFDLAEDAKLQLSKDTYDDDLDNLLAQIGDQYADLFLAAKNLSDAILLSDILRVNTEITKAPLSASMIKRYDEHHQDLTLLKALVRQQLPEKYKEIFFDQSKNGYAGYIDGGASQEEFYKFIKPILEKMDGTEELLVKLNREDLLRKQRTFDNGSIPHQIHLGELHAILRRQEDFYPFLKDNREKIEKILTFRIPYYVGPLARGNSRFAWMTRKSEETITPWNFEEVVDKGASAQSFIERMTNFDKNLPNEKVLPKHSLLYEYFTVYNELTKVKYVTEGMRKPAFLSGEQKKAIVDLLFKTNRKVTVKQLKEDYFKKIECFDSVEISGVEDRFNASLGTYHDLLKIIKDKDFLDNEENEDILEDIVLTLTLFEDREMIEERLKTYAHLFDDKVMKQLKRRRYTGWGRLSRKLINGIRDKQSGKTILDFLKSDGFANRNFMQLIHDDSLTFKEDIQKAQVSGQGDSLHEHIANLAGSPAIKKGILQTVKVVDELVKVMGRHKPENIVIEMARENQTTQKGQKNSRERMKRIEEGIKELGSQILKEHPVENTQLQNEKLYLYYLQNGRDMYVDQELDINRLSDYDVDHIVPQSFLKDDSIDNKVLTRSDKARGKSDNVPSEEVVKKMKNYWRQLLNAKLITQRKFDNLTKAERGGLSELDKAGFIKRQLVETRQITKHVAQILDSRMNTKYDENDKLIREVKVITLKSKLVSDFRKDFQFYKVREINNYHHAHDAYLNAVVGTALIKKYPKLESEFVYGDYKVYDVRKMIAKSEQEIGKATAKYFFYSNIMNFFKTEITLANGEIRKRPLIETNGETGEIVWDKGRDFATVRKVLSMPQVNIVKKTEVQTGGFSKESILPKRNSDKLIARKKDWDPKKYGGFDSPTVAYSVLVVAKVEKGKSKKLKSVKELLGITIMERSSFEKNPIDFLEAKGYKEVKKDLIIKLPKYSLFELENGRKRMLASAGELQKGNELALPSKYVNFLYLASHYEKLKGSPEDNEQKQLFVEQHKHYLDEIIEQISEFSKRVILADANLDKVLSAYNKHRDKPIREQAENIIHLFTLTNLGAPAAFKYFDTTIDRKRYTSTKEVLDATLIHQSITGLYETRIDLSQLGGDGGGGSPAPEAAAKGGTVSLQDEHRLFDIPVTTSLPDVWLQDFPQAWAETGGLGRAKCQAPIIIDLKPTAVPVSIKQYPMSLEAHMGIRQHIIKFLELGVLRPCRSPWNTPLLPVKKPGTQDYRPVQDLREINKRTVDIHPTVPNPYNLLSTLKPDYSWYTVLDLKDAFFCLPLAPQSQELFAFEWKDPERGISGQLTWTRLPQGFKNSPTLFNEALHRDLTDFRTQHPEVTLLQYVDDLLLAAPTKKACTQGTRHLLQELGEKGYRASAKKAQICQTKVTYLGYILSEGKRWLTPGRIETVARIPPPRNPREVREFLGTAGFCRLWIPGFAELAAPLYALTKPSTPFTWQTEHQLAFEALKKALLSAPALGLPDTSKPFTLFLDERQGIAKGVLTQKLGPWKRPVAYLSKKLDPVAAGWPPCLRIMAATAMLVKDSAKLTLGQPLTVITPHTLEAIVRQPPDRWITNARLTHYQALLLDTDRVQFGPPVTLNPATLLPVPENQPSPHDCRQVLAETHGTREDLKDQELPDADHTWYTDGSSYLDSGTRRAGAAVVDGHNTIWAQSLPPGTSAQKAELIALTKALELSKGKKANIYTDSRYAFATAHTHGSIYERRGWLTSEGKEIKNKAEIIALLKALFLPQEVAIIHCPGHQKGQDPVAVGNRQADRVARQAAMAEVLTLATEPDNTSHITAGKRTADGSEFEKRTADGSEFESPKKKAKVE

SEQ ID NO: 1599 - protein, 2100 aa, synthetic construct
MPAAKRVKLDGGDKKYSIGLDIGTNSVGWAVITDEYKVPSKKFKVLGNTDRHSIKKNLIGALLFDSGETAEATRLKRTARRRYTRRKNRICYLQEIFSNEMAKVDDSFFHRLEESFLVEEDKKHERHPIFGNIVDEVAYHEKYPTIYHLRKKLVDSTDKADLRLIYLALAHMIKFRGHFLIEGDLNPDNSDVDKLFIQLVQTYNQLFEENPINASGVDAKAILSARLSKSRRLENLIAQLPGEKKNGLFGNLIALSLGLTPNFKSNFDLAEDAKLQLSKDTYDDDLDNLLAQIGDQYADLFLAAKNLSDAILLSDILRVNTEITKAPLSASMIKRYDEHHQDLTLLKALVRQQLPEKYKEIFFDQSKNGYAGYIDGGASQEEFYKFIKPILEKMDGTEELLVKLNREDLLRKQRTFDNGSIPHQIHLGELHAILRRQEDFYPFLKDNREKIEKILTFRIPYYVGPLARGNSRFAWMTRKSEETITPWNFEEVVDKGASAQSFIERMTNFDKNLPNEKVLPKHSLLYEYFTVYNELTKVKYVTEGMRKPAFLSGEQKKAIVDLLFKTNRKVTVKQLKEDYFKKIECFDSVEISGVEDRFNASLGTYHDLLKIIKDKDFLDNEENEDILEDIVLTLTLFEDREMIEERLKTYAHLFDDKVMKQLKRRRYTGWGRLSRKLINGIRDKQSGKTILDFLKSDGFANRNFMQLIHDDSLTFKEDIQKAQVSGQGDSLHEHIANLAGSPAIKKGILQTVKVVDELVKVMGRHKPENIVIEMARENQTTQKGQKNSRERMKRIEEGIKELGSQILKEHPVENTQLQNEKLYLYYLQNGRDMYVDQELDINRLSDYDVDHIVPQSFLKDDSIDNKVLTRSDKARGKSDNVPSEEVVKKMKNYWRQLLNAKLITQRKFDNLTKAERGGLSELDKAGFIKRQLVETRQITKHVAQILDSRMNTKYDENDKLIREVKVITLKSKLVSDFRKDFQFYKVREINNYHHAHDAYLNAVVGTALIKKYPKLESEFVYGDYKVYDVRKMIAKSEQEIGKATAKYFFYSNIMNFFKTEITLANGEIRKRPLIETNGETGEIVWDKGRDFATVRKVLSMPQVNIVKKTEVQTGGFSKESILPKRNSDKLIARKKDWDPKKYGGFDSPTVAYSVLVVAKVEKGKSKKLKSVKELLGITIMERSSFEKNPIDFLEAKGYKEVKKDLIIKLPKYSLFELENGRKRMLASAGELQKGNELALPSKYVNFLYLASHYEKLKGSPEDNEQKQLFVEQHKHYLDEIIEQISEFSKRVILADANLDKVLSAYNKHRDKPIREQAENIIHLFTLTNLGAPAAFKYFDTTIDRKRYTSTKEVLDATLIHQSITGLYETRIDLSQLGGDGGPAPGGSGSSGGTVSLQDEHRLFDIPVTTSLPDVWLQDFPQAWAETGGLGRAKCQAPIIIDLKPTAVPVSIKQYPMSLEAHMGIRQHIIKFLELGVLRPCRSPWNTPLLPVKKPGTQDYRPVQDLREINKRTVDIHPTVPNPYNLLSTLKPDYSWYTVLDLKDAFFCLPLAPQSQELFAFEWKDPERGISGQLTWTRLPQGFKNSPTLFNEALHRDLTDFRTQHPEVTLLQYVDDLLLAAPTKKACTQGTRHLLQELGEKGYRASAKKAQICQTKVTYLGYILSEGKRWLTPGRIETVARIPPPRNPREVREFLGTAGFCRLWIPGFAELAAPLYALTKPSTPFTWQTEHQLAFEALKKALLSAPALGLPDTSKPFTLFLDERQGIAKGVLTQKLGPWKRPVAYLSKKLDPVAAGWPPCLRIMAATAMLVKDSAKLTLGQPLTVITPHTLEAIVRQPPDRWITNARLTHYQALLLDTDRVQFGPPVTLNPATLLPVPENQPSPHDCRQVLAETHGTREDLKDQELPDADHTWYTDGSSYLDSGTRRAGAAVVDGHNTIWAQSLPPGTSAQKAELIALTKALELSKGKKANIYTDSRYAFATAHTHGSIYERRGWLTSEGKEIKNKAEIIALLKALFLPQEVAIIHCPGHQKGQDPVAVGNRQADRVARQAAMAEVLTLATEPDNTSHITAGKRTADGSEFEKRTADGSEFESPKKKAKVE

SEQ ID NO: 1600 - protein, 2006 aa, synthetic construct
MPAAKRVKLDGGDKKYSIGLDIGTNSVGWAVITDEYKVPSKKFKVLGNTDRHSIKKNLIGALLFDSGETAEATRLKRTARRRYTRRKNRICYLQEIFSNEMAKVDDSFFHRLEESFLVEEDKKHERHPIFGNIVDEVAYHEKYPTIYHLRKKLVDSTDKADLRLIYLALAHMIKFRGHFLIEGDLNPDNSDVDKLFIQLVQTYNQLFEENPINASGVDAKAILSARLSKSRRLENLIAQLPGEKKNGLFGNLIALSLGLTPNFKSNFDLAEDAKLQLSKDTYDDDLDNLLAQIGDQYADLFLAAKNLSDAILLSDILRVNTEITKAPLSASMIKRYDEHHQDLTLLKALVRQQLPEKYKEIFFDQSKNGYAGYIDGGASQEEFYKFIKPILEKMDGTEELLVKLNREDLLRKQRTFDNGSIPHQIHLGELHAILRRQEDFYPFLKDNREKIEKILTFRIPYYVGPLARGNSRFAWMTRKSEETITPWNFEEVVDKGASAQSFIERMTNFDKNLPNEKVLPKHSLLYEYFTVYNELTKVKYVTEGMRKPAFLSGEQKKAIVDLLFKTNRKVTVKQLKEDYFKKIECFDSVEISGVEDRFNASLGTYHDLLKIIKDKDFLDNEENEDILEDIVLTLTLFEDREMIEERLKTYAHLFDDKVMKQLKRRRYTGWGRLSRKLINGIRDKQSGKTILDFLKSDGFANRNFMQLIHDDSLTFKEDIQKAQVSGQGDSLHEHIANLAGSPAIKKGILQTVKVVDELVKVMGRHKPENIVIEMARENQTTQKGQKNSRERMKRIEEGIKELGSQILKEHPVENTQLQNEKLYLYYLQNGRDMYVDQELDINRLSDYDVDHIVPQSFLKDDSIDNKVLTRSDKARGKSDNVPSEEVVKKMKNYWRQLLNAKLITQRKFDNLTKAERGGLSELDKAGFIKRQLVETRQITKHVAQILDSRMNTKYDENDKLIREVKVITLKSKLVSDFRKDFQFYKVREINNYHHAHDAYLNAVVGTALIKKYPKLESEFVYGDYKVYDVRKMIAKSEQEIGKATAKYFFYSNIMNFFKTEITLANGEIRKRPLIETNGETGEIVWDKGRDFATVRKVLSMPQVNIVKKTEVQTGGFSKESILPKRNSDKLIARKKDWDPKKYGGFDSPTVAYSVLVVAKVEKGKSKKLKSVKELLGITIMERSSFEKNPIDFLEAKGYKEVKKDLIIKLPKYSLFELENGRKRMLASAGELQKGNELALPSKYVNFLYLASHYEKLKGSPEDNEQKQLFVEQHKHYLDEIIEQISEFSKRVILADANLDKVLSAYNKHRDKPIREQAENIIHLFTLTNLGAPAAFKYFDTTIDRKRYTSTKEVLDATLIHQSITGLYETRIDLSQLGGDGGEAAAKGGGPAPGGPLGTSDSPVTHADPIDWKSEEPVWVDQWPLTQEKLSAAQQLVQEQLRLGHIEPSTSAWNSPIFVIKKKSGKWRLLQDLRKVNETMMHMGALQPGLPTPSPIPDKSYIIVIDLKDCFYTIPLAPQDCKRFAFSLPSVNFKEPMQRYQWRVLPQGMTNSPTLCQKFVATAIAPVRQRFPQLYLVHYMDDILLAHTDEHLLYQAFSILKQHLSLNGLVIADEKIQTHFPYNYLGFSLYPRVYNTQLVKLQTDHLKTLNDFQKLLGDINWIRPYLKLPTYTLQPLFDILKGDSDPASPRTLSLEGRTALQSIEEAIRQQQITYCDYQRSWGLYILPTPRAPTGVLYQDKPLRWIYLSATPTKHLLPYYELVAKIIAKGRHEAIQYFGMEPPFICVPYALEQQDWLFQFSDNWSIAFANYPGQITHHYPSDKLLQFASSHAFIFPKIVRRQPIPEATLIFTDGSSNGTAALIINHQTYYAQTSFSSAQVVELFAVHQALLTVPTSFNLFTDSSYVVGALQMIETVPIIGTTSPEVLNLFTLIQQVLHCRQHPCFFGHIRAHSTLPGALVQGNHTADVLTKQVFFQSAGKRTADGSEFEKRTADGSEFESPKKKAKVE

SEQ ID NO: 1601 - protein, 2006 aa, synthetic construct
MPAAKRVKLDGGDKKYSIGLDIGTNSVGWAVITDEYKVPSKKFKVLGNTDRHSIKKNLIGALLFDSGETAEATRLKRTARRRYTRRKNRICYLQEIFSNEMAKVDDSFFHRLEESFLVEEDKKHERHPIFGNIVDEVAYHEKYPTIYHLRKKLVDSTDKADLRLIYLALAHMIKFRGHFLIEGDLNPDNSDVDKLFIQLVQTYNQLFEENPINASGVDAKAILSARLSKSRRLENLIAQLPGEKKNGLFGNLIALSLGLTPNFKSNFDLAEDAKLQLSKDTYDDDLDNLLAQIGDQYADLFLAAKNLSDAILLSDILRVNTEITKAPLSASMIKRYDEHHQDLTLLKALVRQQLPEKYKEIFFDQSKNGYAGYIDGGASQEEFYKFIKPILEKMDGTEELLVKLNREDLLRKQRTFDNGSIPHQIHLGELHAILRRQEDFYPFLKDNREKIEKILTFRIPYYVGPLARGNSRFAWMTRKSEETITPWNFEEVVDKGASAQSFIERMTNFDKNLPNEKVLPKHSLLYEYFTVYNELTKVKYVTEGMRKPAFLSGEQKKAIVDLLFKTNRKVTVKQLKEDYFKKIECFDSVEISGVEDRFNASLGTYHDLLKIIKDKDFLDNEENEDILEDIVLTLTLFEDREMIEERLKTYAHLFDDKVMKQLKRRRYTGWGRLSRKLINGIRDKQSGKTILDFLKSDGFANRNFMQLIHDDSLTFKEDIQKAQVSGQGDSLHEHIANLAGSPAIKKGILQTVKVVDELVKVMGRHKPENIVIEMARENQTTQKGQKNSRERMKRIEEGIKELGSQILKEHPVENTQLQNEKLYLYYLQNGRDMYVDQELDINRLSDYDVDHIVPQSFLKDDSIDNKVLTRSDKARGKSDNVPSEEVVKKMKNYWRQLLNAKLITQRKFDNLTKAERGGLSELDKAGFIKRQLVETRQITKHVAQILDSRMNTKYDENDKLIREVKVITLKSKLVSDFRKDFQFYKVREINNYHHAHDAYLNAVVGTALIKKYPKLESEFVYGDYKVYDVRKMIAKSEQEIGKATAKYFFYSNIMNFFKTEITLANGEIRKRPLIETNGETGEIVWDKGRDFATVRKVLSMPQVNIVKKTEVQTGGFSKESILPKRNSDKLIARKKDWDPKKYGGFDSPTVAYSVLVVAKVEKGKSKKLKSVKELLGITIMERSSFEKNPIDFLEAKGYKEVKKDLIIKLPKYSLFELENGRKRMLASAGELQKGNELALPSKYVNFLYLASHYEKLKGSPEDNEQKQLFVEQHKHYLDEIIEQISEFSKRVILADANLDKVLSAYNKHRDKPIREQAENIIHLFTLTNLGAPAAFKYFDTTIDRKRYTSTKEVLDATLIHQSITGLYETRIDLSQLGGDGGGGSEAAAKGSSGGPLGTSDSPVTHADPIDWKSEEPVWVDQWPLTQEKLSAAQQLVQEQLRLGHIEPSTSAWNSPIFVIKKKSGKWRLLQDLRKVNETMMHMGALQPGLPTPSPIPDKSYIIVIDLKDCFYTIPLAPQDCKRFAFSLPSVNFKEPMQRYQWRVLPQGMTNSPTLCQKFVATAIAPVRQRFPQLYLVHYMDDILLAHTDEHLLYQAFSILKQHLSLNGLVIADEKIQTHFPYNYLGFSLYPRVYNTQLVKLQTDHLKTLNDFQKLLGDINWIRPYLKLPTYTLQPLFDILKGDSDPASPRTLSLEGRTALQSIEEAIRQQQITYCDYQRSWGLYILPTPRAPTGVLYQDKPLRWIYLSATPTKHLLPYYELVAKIIAKGRHEAIQYFGMEPPFICVPYALEQQDWLFQFSDNWSIAFANYPGQITHHYPSDKLLQFASSHAFIFPKIVRRQPIPEATLIFTDGSSNGTAALIINHQTYYAQTSFSSAQVVELFAVHQALLTVPTSFNLFTDSSYVVGALQMIETVPIIGTTSPEVLNLFTLIQQVLHCRQHPCFFGHIRAHSTLPGALVQGNHTADVLTKQVFFQSAGKRTADGSEFEKRTADGSEFESPKKKAKVE

SEQ ID NO: 1602 - protein, 2013 aa, synthetic construct
MPAAKRVKLDGGDKKYSIGLDIGTNSVGWAVITDEYKVPSKKFKVLGNTDRHSIKKNLIGALLFDSGETAEATRLKRTARRRYTRRKNRICYLQEIFSNEMAKVDDSFFHRLEESFLVEEDKKHERHPIFGNIVDEVAYHEKYPTIYHLRKKLVDSTDKADLRLIYLALAHMIKFRGHFLIEGDLNPDNSDVDKLFIQLVQTYNQLFEENPINASGVDAKAILSARLSKSRRLENLIAQLPGEKKNGLFGNLIALSLGLTPNFKSNFDLAEDAKLQLSKDTYDDDLDNLLAQIGDQYADLFLAAKNLSDAILLSDILRVNTEITKAPLSASMIKRYDEHHQDLTLLKALVRQQLPEKYKEIFFDQSKNGYAGYIDGGASQEEFYKFIKPILEKMDGTEELLVKLNREDLLRKQRTFDNGSIPHQIHLGELHAILRRQEDFYPFLKDNREKIEKILTFRIPYYVGPLARGNSRFAWMTRKSEETITPWNFEEVVDKGASAQSFIERMTNFDKNLPNEKVLPKHSLLYEYFTVYNELTKVKYVTEGMRKPAFLSGEQKKAIVDLLFKTNRKVTVKQLKEDYFKKIECFDSVEISGVEDRFNASLGTYHDLLKIIKDKDFLDNEENEDILEDIVLTLTLFEDREMIEERLKTYAHLFDDKVMKQLKRRRYTGWGRLSRKLINGIRDKQSGKTILDFLKSDGFANRNFMQLIHDDSLTFKEDIQKAQVSGQGDSLHEHIANLAGSPAIKKGILQTVKVVDELVKVMGRHKPENIVIEMARENQTTQKGQKNSRERMKRIEEGIKELGSQILKEHPVENTQLQNEKLYLYYLQNGRDMYVDQELDINRLSDYDVDHIVPQSFLKDDSIDNKVLTRSDKARGKSDNVPSEEVVKKMKNYWRQLLNAKLITQRKFDNLTKAERGGLSELDKAGFIKRQLVETRQITKHVAQILDSRMNTKYDENDKLIREVKVITLKSKLVSDFRKDFQFYKVREINNYHHAHDAYLNAVVGTALIKKYPKLESEFVYGDYKVYDVRKMIAKSEQEIGKATAKYFFYSNIMNFFKTEITLANGEIRKRPLIETNGETGEIVWDKGRDFATVRKVLSMPQVNIVKKTEVQTGGFSKESILPKRNSDKLIARKKDWDPKKYGGFDSPTVAYSVLVVAKVEKGKSKKLKSVKELLGITIMERSSFEKNPIDFLEAKGYKEVKKDLIIKLPKYSLFELENGRKRMLASAGELQKGNELALPSKYVNFLYLASHYEKLKGSPEDNEQKQLFVEQHKHYLDEIIEQISEFSKRVILADANLDKVLSAYNKHRDKPIREQAENIIHLFTLTNLGAPAAFKYFDTTIDRKRYTSTKEVLDATLIHQSITGLYETRIDLSQLGGDGGGSSGSSGSSGSSGSSGSSGGPLGTSDSPVTHADPIDWKSEEPVWVDQWPLTQEKLSAAQQLVQEQLRLGHIEPSTSAWNSPIFVIKKKSGKWRLLQDLRKVNETMMHMGALQPGLPTPSPIPDKSYIIVIDLKDCFYTIPLAPQDCKRFAFSLPSVNFKEPMQRYQWRVLPQGMTNSPTLCQKFVATAIAPVRQRFPQLYLVHYMDDILLAHTDEHLLYQAFSILKQHLSLNGLVIADEKIQTHFPYNYLGFSLYPRVYNTQLVKLQTDHLKTLNDFQKLLGDINWIRPYLKLPTYTLQPLFDILKGDSDPASPRTLSLEGRTALQSIEEAIRQQQITYCDYQRSWGLYILPTPRAPTGVLYQDKPLRWIYLSATPTKHLLPYYELVAKIIAKGRHEAIQYFGMEPPFICVPYALEQQDWLFQFSDNWSIAFANYPGQITHHYPSDKLLQFASSHAFIFPKIVRRQPIPEATLIFTDGSSNGTAALIINHQTYYAQTSFSSAQVVELFAVHQALLTVPTSFNLFTDSSYVVGALQMIETVPIIGTTSPEVLNLFTLIQQVLHCRQHPCFFGHIRAHSTLPGALVQGNHTADVLTKQVFFQSAGKRTADGSEFEKRTADGSEFESPKKKAKVE

SEQ ID NO: 1603 - protein, 2001 aa, synthetic construct
MPAAKRVKLDGGDKKYSIGLDIGTNSVGWAVITDEYKVPSKKFKVLGNTDRHSIKKNLIGALLFDSGETAEATRLKRTARRRYTRRKNRICYLQEIFSNEMAKVDDSFFHRLEESFLVEEDKKHERHPIFGNIVDEVAYHEKYPTIYHLRKKLVDSTDKADLRLIYLALAHMIKFRGHFLIEGDLNPDNSDVDKLFIQLVQTYNQLFEENPINASGVDAKAILSARLSKSRRLENLIAQLPGEKKNGLFGNLIALSLGLTPNFKSNFDLAEDAKLQLSKDTYDDDLDNLLAQIGDQYADLFLAAKNLSDAILLSDILRVNTEITKAPLSASMIKRYDEHHQDLTLLKALVRQQLPEKYKEIFFDQSKNGYAGYIDGGASQEEFYKFIKPILEKMDGTEELLVKLNREDLLRKQRTFDNGSIPHQIHLGELHAILRRQEDFYPFLKDNREKIEKILTFRIPYYVGPLARGNSRFAWMTRKSEETITPWNFEEVVDKGASAQSFIERMTNFDKNLPNEKVLPKHSLLYEYFTVYNELTKVKYVTEGMRKPAFLSGEQKKAIVDLLFKTNRKVTVKQLKEDYFKKIECFDSVEISGVEDRFNASLGTYHDLLKIIKDKDFLDNEENEDILEDIVLTLTLFEDREMIEERLKTYAHLFDDKVMKQLKRRRYTGWGRLSRKLINGIRDKQSGKTILDFLKSDGFANRNFMQLIHDDSLTFKEDIQKAQVSGQGDSLHEHIANLAGSPAIKKGILQTVKVVDELVKVMGRHKPENIVIEMARENQTTQKGQKNSRERMKRIEEGIKELGSQILKEHPVENTQLQNEKLYLYYLQNGRDMYVDQELDINRLSDYDVDHIVPQSFLKDDSIDNKVLTRSDKARGKSDNVPSEEVVKKMKNYWRQLLNAKLITQRKFDNLTKAERGGLSELDKAGFIKRQLVETRQITKHVAQILDSRMNTKYDENDKLIREVKVITLKSKLVSDFRKDFQFYKVREINNYHHAHDAYLNAVVGTALIKKYPKLESEFVYGDYKVYDVRKMIAKSEQEIGKATAKYFFYSNIMNFFKTEITLANGEIRKRPLIETNGETGEIVWDKGRDFATVRKVLSMPQVNIVKKTEVQTGGFSKESILPKRNSDKLIARKKDWDPKKYGGFDSPTVAYSVLVVAKVEKGKSKKLKSVKELLGITIMERSSFEKNPIDFLEAKGYKEVKKDLIIKLPKYSLFELENGRKRMLASAGELQKGNELALPSKYVNFLYLASHYEKLKGSPEDNEQKQLFVEQHKHYLDEIIEQISEFSKRVILADANLDKVLSAYNKHRDKPIREQAENIIHLFTLTNLGAPAAFKYFDTTIDRKRYTSTKEVLDATLIHQSITGLYETRIDLSQLGGDGGGSSGSSGGPLGTSDSPVTHADPIDWKSEEPVWVDQWPLTQEKLSAAQQLVQEQLRLGHIEPSTSAWNSPIFVIKKKSGKWRLLQDLRKVNETMMHMGALQPGLPTPSPIPDKSYIIVIDLKDCFYTIPLAPQDCKRFAFSLPSVNFKEPMQRYQWRVLPQGMTNSPTLCQKFVATAIAPVRQRFPQLYLVHYMDDILLAHTDEHLLYQAFSILKQHLSLNGLVIADEKIQTHFPYNYLGFSLYPRVYNTQLVKLQTDHLKTLNDFQKLLGDINWIRPYLKLPTYTLQPLFDILKGDSDPASPRTLSLEGRTALQSIEEAIRQQQITYCDYQRSWGLYILPTPRAPTGVLYQDKPLRWIYLSATPTKHLLPYYELVAKIIAKGRHEAIQYFGMEPPFICVPYALEQQDWLFQFSDNWSIAFANYPGQITHHYPSDKLLQFASSHAFIFPKIVRRQPIPEATLIFTDGSSNGTAALIINHQTYYAQTSFSSAQVVELFAVHQALLTVPTSFNLFTDSSYVVGALQMIETVPIIGTTSPEVLNLFTLIQQVLHCRQHPCFFGHIRAHSTLPGALVQGNHTADVLTKQVFFQSAGKRTADGSEFEKRTADGSEFESPKKKAKVE

SEQ ID NO: 1604 - protein, 2216 aa, synthetic construct
MPAAKRVKLDGGDKKYSIGLDIGTNSVGWAVITDEYKVPSKKFKVLGNTDRHSIKKNLIGALLFDSGETAEATRLKRTARRRYTRRKNRICYLQEIFSNEMAKVDDSFFHRLEESFLVEEDKKHERHPIFGNIVDEVAYHEKYPTIYHLRKKLVDSTDKADLRLIYLALAHMIKFRGHFLIEGDLNPDNSDVDKLFIQLVQTYNQLFEENPINASGVDAKAILSARLSKSRRLENLIAQLPGEKKNGLFGNLIALSLGLTPNFKSNFDLAEDAKLQLSKDTYDDDLDNLLAQIGDQYADLFLAAKNLSDAILLSDILRVNTEITKAPLSASMIKRYDEHHQDLTLLKALVRQQLPEKYKEIFFDQSKNGYAGYIDGGASQEEFYKFIKPILEKMDGTEELLVKLNREDLLRKQRTFDNGSIPHQIHLGELHAILRRQEDFYPFLKDNREKIEKILTFRIPYYVGPLARGNSRFAWMTRKSEETITPWNFEEVVDKGASAQSFIERMTNFDKNLPNEKVLPKHSLLYEYFTVYNELTKVKYVTEGMRKPAFLSGEQKKAIVDLLFKTNRKVTVKQLKEDYFKKIECFDSVEISGVEDRFNASLGTYHDLLKIIKDKDFLDNEENEDILEDIVLTLTLFEDREMIEERLKTYAHLFDDKVMKQLKRRRYTGWGRLSRKLINGIRDKQSGKTILDFLKSDGFANRNFMQLIHDDSLTFKEDIQKAQVSGQGDSLHEHIANLAGSPAIKKGILQTVKVVDELVKVMGRHKPENIVIEMARENQTTQKGQKNSRERMKRIEEGIKELGSQILKEHPVENTQLQNEKLYLYYLQNGRDMYVDQELDINRLSDYDVDHIVPQSFLKDDSIDNKVLTRSDKARGKSDNVPSEEVVKKMKNYWRQLLNAKLITQRKFDNLTKAERGGLSELDKAGFIKRQLVETRQITKHVAQILDSRMNTKYDENDKLIREVKVITLKSKLVSDFRKDFQFYKVREINNYHHAHDAYLNAVVGTALIKKYPKLESEFVYGDYKVYDVRKMIAKSEQEIGKATAKYFFYSNIMNFFKTEITLANGEIRKRPLIETNGETGEIVWDKGRDFATVRKVLSMPQVNIVKKTEVQTGGFSKESILPKRNSDKLIARKKDWDPKKYGGFDSPTVAYSVLVVAKVEKGKSKKLKSVKELLGITIMERSSFEKNPIDFLEAKGYKEVKKDLIIKLPKYSLFELENGRKRMLASAGELQKGNELALPSKYVNFLYLASHYEKLKGSPEDNEQKQLFVEQHKHYLDEIIEQISEFSKRVILADANLDKVLSAYNKHRDKPIREQAENIIHLFTLTNLGAPAAFKYFDTTIDRKRYTSTKEVLDATLIHQSITGLYETRIDLSQLGGDGGPAPGSSGGGGGTLGDQGSRGSDPLPEPRVTLTVEGIPTEFLVNTGAEHSVLTKPMGKMGSKRTVVAGATGSKVYPWTTKRLLKIGQKQVTHSFLVIPECPAPLLGRDLLTKLKAQIQFSTEGPQVTWEDRPAMCLVLNLEEEYRLHEKPVPPSIDPSWLQLFPMVWAEKAGMGLANQVPPVVVELKSDASPVAVRQYPMSKEAREGIRPHIQRFLDLGILVPCQSPWNTPLLPVKKPGTNDYRPVQDLREVNKRVQDIHPTVPNPYNLLSSLPPSHTWYSVLDLKDAFFCLKLHPNSQPLFAFEWRDPEKGNTGQLTWTRLPQGFKNSPTLFDEALHRDLASFRALNPQVVMLQYVDDLLVAAPTYRDCKEGTRRLLQELSKLGYRVSAKKAQLCREEVTYLGYLLKGGKRWLTPARKATVMKIPTPTTPRQVREFLGTAGFCRLWIPGFASLAAPLYPLTREKVPFTWTEAHQEAFGRIKEALLSAPALALPDLTKPFALYVDEKEGVARGVLTQTLGPWRRPVAYLSKKLDPVASGWPTCLKAIAAVALLLKDADKLTLGQNVLVIAPHNLESIVRQPPDRWMTNARMTHYQSLLLNERVSFAPPAILNPATLLPVESDDTPIHICSEILAEETGTRPDLRDQPLPGVPAWYTDGSSFIMDGRRQAGAAIVDNKRTVWASNLPEGTSAQKAELIALTQALRLAEGKSINIYTDSRYAFATAHVHGAIYKQRGLLTSAGKDIKNKEEILALLEAIHLPKRVAIIHCPGHQRGTDPVATGNRKADEAAKQAAQSTRILTETTKNAGKRTADGSEFEKRTADGSEFESPKKKAKVE

SEQ ID NO: 1605 - protein, 2218 aa, synthetic construct
MPAAKRVKLDGGDKKYSIGLDIGTNSVGWAVITDEYKVPSKKFKVLGNTDRHSIKKNLIGALLFDSGETAEATRLKRTARRRYTRRKNRICYLQEIFSNEMAKVDDSFFHRLEESFLVEEDKKHERHPIFGNIVDEVAYHEKYPTIYHLRKKLVDSTDKADLRLIYLALAHMIKFRGHFLIEGDLNPDNSDVDKLFIQLVQTYNQLFEENPINASGVDAKAILSARLSKSRRLENLIAQLPGEKKNGLFGNLIALSLGLTPNFKSNFDLAEDAKLQLSKDTYDDDLDNLLAQIGDQYADLFLAAKNLSDAILLSDILRVNTEITKAPLSASMIKRYDEHHQDLTLLKALVRQQLPEKYKEIFFDQSKNGYAGYIDGGASQEEFYKFIKPILEKMDGTEELLVKLNREDLLRKQRTFDNGSIPHQIHLGELHAILRRQEDFYPFLKDNREKIEKILTFRIPYYVGPLARGNSRFAWMTRKSEETITPWNFEEVVDKGASAQSFIERMTNFDKNLPNEKVLPKHSLLYEYFTVYNELTKVKYVTEGMRKPAFLSGEQKKAIVDLLFKTNRKVTVKQLKEDYFKKIECFDSVEISGVEDRFNASLGTYHDLLKIIKDKDFLDNEENEDILEDIVLTLTLFEDREMIEERLKTYAHLFDDKVMKQLKRRRYTGWGRLSRKLINGIRDKQSGKTILDFLKSDGFANRNFMQLIHDDSLTFKEDIQKAQVSGQGDSLHEHIANLAGSPAIKKGILQTVKVVDELVKVMGRHKPENIVIEMARENQTTQKGQKNSRERMKRIEEGIKELGSQILKEHPVENTQLQNEKLYLYYLQNGRDMYVDQELDINRLSDYDVDHIVPQSFLKDDSIDNKVLTRSDKARGKSDNVPSEEVVKKMKNYWRQLLNAKLITQRKFDNLTKAERGGLSELDKAGFIKRQLVETRQITKHVAQILDSRMNTKYDENDKLIREVKVITLKSKLVSDFRKDFQFYKVREINNYHHAHDAYLNAVVGTALIKKYPKLESEFVYGDYKVYDVRKMIAKSEQEIGKATAKYFFYSNIMNFFKTEITLANGEIRKRPLIETNGETGEIVWDKGRDFATVRKVLSMPQVNIVKKTEVQTGGFSKESILPKRNSDKLIARKKDWDPKKYGGFDSPTVAYSVLVVAKVEKGKSKKLKSVKELLGITIMERSSFEKNPIDFLEAKGYKEVKKDLIIKLPKYSLFELENGRKRMLASAGELQKGNELALPSKYVNFLYLASHYEKLKGSPEDNEQKQLFVEQHKHYLDEIIEQISEFSKRVILADANLDKVLSAYNKHRDKPIREQAENIIHLFTLTNLGAPAAFKYFDTTIDRKRYTSTKEVLDATLIHQSITGLYETRIDLSQLGGDGGPAPGGGEAAAKGGTLGDQGSRGSDPLPEPRVTLTVEGIPTEFLVNTGAEHSVLTKPMGKMGSKRTVVAGATGSKVYPWTTKRLLKIGQKQVTHSFLVIPECPAPLLGRDLLTKLKAQIQFSTEGPQVTWEDRPAMCLVLNLEEEYRLHEKPVPPSIDPSWLQLFPMVWAEKAGMGLANQVPPVVVELKSDASPVAVRQYPMSKEAREGIRPHIQRFLDLGILVPCQSPWNTPLLPVKKPGTNDYRPVQDLREVNKRVQDIHPTVPNPYNLLSSLPPSHTWYSVLDLKDAFFCLKLHPNSQPLFAFEWRDPEKGNTGQLTWTRLPQGFKNSPTLFDEALHRDLASFRALNPQVVMLQYVDDLLVAAPTYRDCKEGTRRLLQELSKLGYRVSAKKAQLCREEVTYLGYLLKGGKRWLTPARKATVMKIPTPTTPRQVREFLGTAGFCRLWIPGFASLAAPLYPLTREKVPFTWTEAHQEAFGRIKEALLSAPALALPDLTKPFALYVDEKEGVARGVLTQTLGPWRRPVAYLSKKLDPVASGWPTCLKAIAAVALLLKDADKLTLGQNVLVIAPHNLESIVRQPPDRWMTNARMTHYQSLLLNERVSFAPPAILNPATLLPVESDDTPIHICSEILAEETGTRPDLRDQPLPGVPAWYTDGSSFIMDGRRQAGAAIVDNKRTVWASNLPEGTSAQKAELIALTQALRLAEGKSINIYTDSRYAFATAHVHGAIYKQRGLLTSAGKDIKNKEEILALLEAIHLPKRVAIIHCPGHQRGTDPVATGNRKADEAAKQAAQSTRILTETTKNAGKRTADGSEFEKRTADGSEFESPKKKAKVE

SEQ ID NO: 1606 - protein, 2218 aa, synthetic construct
MPAAKRVKLDGGDKKYSIGLDIGTNSVGWAVITDEYKVPSKKFKVLGNTDRHSIKKNLIGALLFDSGETAEATRLKRTARRRYTRRKNRICYLQEIFSNEMAKVDDSFFHRLEESFLVEEDKKHERHPIFGNIVDEVAYHEKYPTIYHLRKKLVDSTDKADLRLIYLALAHMIKFRGHFLIEGDLNPDNSDVDKLFIQLVQTYNQLFEENPINASGVDAKAILSARLSKSRRLENLIAQLPGEKKNGLFGNLIALSLGLTPNFKSNFDLAEDAKLQLSKDTYDDDLDNLLAQIGDQYADLFLAAKNLSDAILLSDILRVNTEITKAPLSASMIKRYDEHHQDLTLLKALVRQQLPEKYKEIFFDQSKNGYAGYIDGGASQEEFYKFIKPILEKMDGTEELLVKLNREDLLRKQRTFDNGSIPHQIHLGELHAILRRQEDFYPFLKDNREKIEKILTFRIPYYVGPLARGNSRFAWMTRKSEETITPWNFEEVVDKGASAQSFIERMTNFDKNLPNEKVLPKHSLLYEYFTVYNELTKVKYVTEGMRKPAFLSGEQKKAIVDLLFKTNRKVTVKQLKEDYFKKIECFDSVEISGVEDRFNASLGTYHDLLKIIKDKDFLDNEENEDILEDIVLTLTLFEDREMIEERLKTYAHLFDDKVMKQLKRRRYTGWGRLSRKLINGIRDKQSGKTILDFLKSDGFANRNFMQLIHDDSLTFKEDIQKAQVSGQGDSLHEHIANLAGSPAIKKGILQTVKVVDELVKVMGRHKPENIVIEMARENQTTQKGQKNSRERMKRIEEGIKELGSQILKEHPVENTQLQNEKLYLYYLQNGRDMYVDQELDINRLSDYDVDHIVPQSFLKDDSIDNKVLTRSDKARGKSDNVPSEEVVKKMKNYWRQLLNAKLITQRKFDNLTKAERGGLSELDKAGFIKRQLVETRQITKHVAQILDSRMNTKYDENDKLIREVKVITLKSKLVSDFRKDFQFYKVREINNYHHAHDAYLNAVVGTALIKKYPKLESEFVYGDYKVYDVRKMIAKSEQEIGKATAKYFFYSNIMNFFKTEITLANGEIRKRPLIETNGETGEIVWDKGRDFATVRKVLSMPQVNIVKKTEVQTGGFSKESILPKRNSDKLIARKKDWDPKKYGGFDSPTVAYSVLVVAKVEKGKSKKLKSVKELLGITIMERSSFEKNPIDFLEAKGYKEVKKDLIIKLPKYSLFELENGRKRMLASAGELQKGNELALPSKYVNFLYLASHYEKLKGSPEDNEQKQLFVEQHKHYLDEIIEQISEFSKRVILADANLDKVLSAYNKHRDKPIREQAENIIHLFTLTNLGAPAAFKYFDTTIDRKRYTSTKEVLDATLIHQSITGLYETRIDLSQLGGDGGGGGGSSEAAAKGGTLGDQGSRGSDPLPEPRVTLTVEGIPTEFLVNTGAEHSVLTKPMGKMGSKRTVVAGATGSKVYPWTTKRLLKIGQKQVTHSFLVIPECPAPLLGRDLLTKLKAQIQFSTEGPQVTWEDRPAMCLVLNLEEEYRLHEKPVPPSIDPSWLQLFPMVWAEKAGMGLANQVPPVVVELKSDASPVAVRQYPMSKEAREGIRPHIQRFLDLGILVPCQSPWNTPLLPVKKPGTNDYRPVQDLREVNKRVQDIHPTVPNPYNLLSSLPPSHTWYSVLDLKDAFFCLKLHPNSQPLFAFEWRDPEKGNTGQLTWTRLPQGFKNSPTLFDEALHRDLASFRALNPQVVMLQYVDDLLVAAPTYRDCKEGTRRLLQELSKLGYRVSAKKAQLCREEVTYLGYLLKGGKRWLTPARKATVMKIPTPTTPRQVREFLGTAGFCRLWIPGFASLAAPLYPLTREKVPFTWTEAHQEAFGRIKEALLSAPALALPDLTKPFALYVDEKEGVARGVLTQTLGPWRRPVAYLSKKLDPVASGWPTCLKAIAAVALLLKDADKLTLGQNVLVIAPHNLESIVRQPPDRWMTNARMTHYQSLLLNERVSFAPPAILNPATLLPVESDDTPIHICSEILAEETGTRPDLRDQPLPGVPAWYTDGSSFIMDGRRQAGAAIVDNKRTVWASNLPEGTSAQKAELIALTQALRLAEGKSINIYTDSRYAFATAHVHGAIYKQRGLLTSAGKDIKNKEEILALLEAIHLPKRVAIIHCPGHQRGTDPVATGNRKADEAAKQAAQSTRILTETTKNAGKRTADGSEFEKRTADGSEFESPKKKAKVE

SEQ ID NO: 1607 - protein, 2213 aa, synthetic construct
MPAAKRVKLDGGDKKYSIGLDIGTNSVGWAVITDEYKVPSKKFKVLGNTDRHSIKKNLIGALLFDSGETAEATRLKRTARRRYTRRKNRICYLQEIFSNEMAKVDDSFFHRLEESFLVEEDKKHERHPIFGNIVDEVAYHEKYPTIYHLRKKLVDSTDKADLRLIYLALAHMIKFRGHFLIEGDLNPDNSDVDKLFIQLVQTYNQLFEENPINASGVDAKAILSARLSKSRRLENLIAQLPGEKKNGLFGNLIALSLGLTPNFKSNFDLAEDAKLQLSKDTYDDDLDNLLAQIGDQYADLFLAAKNLSDAILLSDILRVNTEITKAPLSASMIKRYDEHHQDLTLLKALVRQQLPEKYKEIFFDQSKNGYAGYIDGGASQEEFYKFIKPILEKMDGTEELLVKLNREDLLRKQRTFDNGSIPHQIHLGELHAILRRQEDFYPFLKDNREKIEKILTFRIPYYVGPLARGNSRFAWMTRKSEETITPWNFEEVVDKGASAQSFIERMTNFDKNLPNEKVLPKHSLLYEYFTVYNELTKVKYVTEGMRKPAFLSGEQKKAIVDLLFKTNRKVTVKQLKEDYFKKIECFDSVEISGVEDRFNASLGTYHDLLKIIKDKDFLDNEENEDILEDIVLTLTLFEDREMIEERLKTYAHLFDDKVMKQLKRRRYTGWGRLSRKLINGIRDKQSGKTILDFLKSDGFANRNFMQLIHDDSLTFKEDIQKAQVSGQGDSLHEHIANLAGSPAIKKGILQTVKVVDELVKVMGRHKPENIVIEMARENQTTQKGQKNSRERMKRIEEGIKELGSQILKEHPVENTQLQNEKLYLYYLQNGRDMYVDQELDINRLSDYDVDHIVPQSFLKDDSIDNKVLTRSDKARGKSDNVPSEEVVKKMKNYWRQLLNAKLITQRKFDNLTKAERGGLSELDKAGFIKRQLVETRQITKHVAQILDSRMNTKYDENDKLIREVKVITLKSKLVSDFRKDFQFYKVREINNYHHAHDAYLNAVVGTALIKKYPKLESEFVYGDYKVYDVRKMIAKSEQEIGKATAKYFFYSNIMNFFKTEITLANGEIRKRPLIETNGETGEIVWDKGRDFATVRKVLSMPQVNIVKKTEVQTGGFSKESILPKRNSDKLIARKKDWDPKKYGGFDSPTVAYSVLVVAKVEKGKSKKLKSVKELLGITIMERSSFEKNPIDFLEAKGYKEVKKDLIIKLPKYSLFELENGRKRMLASAGELQKGNELALPSKYVNFLYLASHYEKLKGSPEDNEQKQLFVEQHKHYLDEIIEQISEFSKRVILADANLDKVLSAYNKHRDKPIREQAENIIHLFTLTNLGAPAAFKYFDTTIDRKRYTSTKEVLDATLIHQSITGLYETRIDLSQLGGDGGGGSPAPGGTLGDQGSRGSDPLPEPRVTLTVEGIPTEFLVNTGAEHSVLTKPMGKMGSKRTVVAGATGSKVYPWTTKRLLKIGQKQVTHSFLVIPECPAPLLGRDLLTKLKAQIQFSTEGPQVTWEDRPAMCLVLNLEEEYRLHEKPVPPSIDPSWLQLFPMVWAEKAGMGLANQVPPVVVELKSDASPVAVRQYPMSKEAREGIRPHIQRFLDLGILVPCQSPWNTPLLPVKKPGTNDYRPVQDLREVNKRVQDIHPTVPNPYNLLSSLPPSHTWYSVLDLKDAFFCLKLHPNSQPLFAFEWRDPEKGNTGQLTWTRLPQGFKNSPTLFDEALHRDLASFRALNPQVVMLQYVDDLLVAAPTYRDCKEGTRRLLQELSKLGYRVSAKKAQLCREEVTYLGYLLKGGKRWLTPARKATVMKIPTPTTPRQVREFLGTAGFCRLWIPGFASLAAPLYPLTREKVPFTWTEAHQEAFGRIKEALLSAPALALPDLTKPFALYVDEKEGVARGVLTQTLGPWRRPVAYLSKKLDPVASGWPTCLKAIAAVALLLKDADKLTLGQNVLVIAPHNLESIVRQPPDRWMTNARMTHYQSLLLNERVSFAPPAILNPATLLPVESDDTPIHICSEILAEETGTRPDLRDQPLPGVPAWYTDGSSFIMDGRRQAGAAIVDNKRTVWASNLPEGTSAQKAELIALTQALRLAEGKSINIYTDSRYAFATAHVHGAIYKQRGLLTSAGKDIKNKEEILALLEAIHLPKRVAIIHCPGHQRGTDPVATGNRKADEAAKQAAQSTRILTETTKNAGKRTADGSEFEKRTADGSEFESPKKKAKVE

SEQ ID NO: 1608 - protein, 2216 aa, synthetic construct
MPAAKRVKLDGGDKKYSIGLDIGTNSVGWAVITDEYKVPSKKFKVLGNTDRHSIKKNLIGALLFDSGETAEATRLKRTARRRYTRRKNRICYLQEIFSNEMAKVDDSFFHRLEESFLVEEDKKHERHPIFGNIVDEVAYHEKYPTIYHLRKKLVDSTDKADLRLIYLALAHMIKFRGHFLIEGDLNPDNSDVDKLFIQLVQTYNQLFEENPINASGVDAKAILSARLSKSRRLENLIAQLPGEKKNGLFGNLIALSLGLTPNFKSNFDLAEDAKLQLSKDTYDDDLDNLLAQIGDQYADLFLAAKNLSDAILLSDILRVNTEITKAPLSASMIKRYDEHHQDLTLLKALVRQQLPEKYKEIFFDQSKNGYAGYIDGGASQEEFYKFIKPILEKMDGTEELLVKLNREDLLRKQRTFDNGSIPHQIHLGELHAILRRQEDFYPFLKDNREKIEKILTFRIPYYVGPLARGNSRFAWMTRKSEETITPWNFEEVVDKGASAQSFIERMTNFDKNLPNEKVLPKHSLLYEYFTVYNELTKVKYVTEGMRKPAFLSGEQKKAIVDLLFKTNRKVTVKQLKEDYFKKIECFDSVEISGVEDRFNASLGTYHDLLKIIKDKDFLDNEENEDILEDIVLTLTLFEDREMIEERLKTYAHLFDDKVMKQLKRRRYTGWGRLSRKLINGIRDKQSGKTILDFLKSDGFANRNFMQLIHDDSLTFKEDIQKAQVSGQGDSLHEHIANLAGSPAIKKGILQTVKVVDELVKVMGRHKPENIVIEMARENQTTQKGQKNSRERMKRIEEGIKELGSQILKEHPVENTQLQNEKLYLYYLQNGRDMYVDQELDINRLSDYDVDHIVPQSFLKDDSIDNKVLTRSDKARGKSDNVPSEEVVKKMKNYWRQLLNAKLITQRKFDNLTKAERGGLSELDKAGFIKRQLVETRQITKHVAQILDSRMNTKYDENDKLIREVKVITLKSKLVSDFRKDFQFYKVREINNYHHAHDAYLNAVVGTALIKKYPKLESEFVYGDYKVYDVRKMIAKSEQEIGKATAKYFFYSNIMNFFKTEITLANGEIRKRPLIETNGETGEIVWDKGRDFATVRKVLSMPQVNIVKKTEVQTGGFSKESILPKRNSDKLIARKKDWDPKKYGGFDSPTVAYSVLVVAKVEKGKSKKLKSVKELLGITIMERSSFEKNPIDFLEAKGYKEVKKDLIIKLPKYSLFELENGRKRMLASAGELQKGNELALPSKYVNFLYLASHYEKLKGSPEDNEQKQLFVEQHKHYLDEIIEQISEFSKRVILADANLDKVLSAYNKHRDKPIREQAENIIHLFTLTNLGAPAAFKYFDTTIDRKRYTSTKEVLDATLIHQSITGLYETRIDLSQLGGDGGGGSGGGGSSGGTLGDQGSRGSDPLPEPRVTLTVEGIPTEFLVNTGAEHSVLTKPMGKMGSKRTVVAGATGSKVYPWTTKRLLKIGQKQVTHSFLVIPECPAPLLGRDLLTKLKAQIQFSTEGPQVTWEDRPAMCLVLNLEEEYRLHEKPVPPSIDPSWLQLFPMVWAEKAGMGLANQVPPVVVELKSDASPVAVRQYPMSKEAREGIRPHIQRFLDLGILVPCQSPWNTPLLPVKKPGTNDYRPVQDLREVNKRVQDIHPTVPNPYNLLSSLPPSHTWYSVLDLKDAFFCLKLHPNSQPLFAFEWRDPEKGNTGQLTWTRLPQGFKNSPTLFDEALHRDLASFRALNPQVVMLQYVDDLLVAAPTYRDCKEGTRRLLQELSKLGYRVSAKKAQLCREEVTYLGYLLKGGKRWLTPARKATVMKIPTPTTPRQVREFLGTAGFCRLWIPGFASLAAPLYPLTREKVPFTWTEAHQEAFGRIKEALLSAPALALPDLTKPFALYVDEKEGVARGVLTQTLGPWRRPVAYLSKKLDPVASGWPTCLKAIAAVALLLKDADKLTLGQNVLVIAPHNLESIVRQPPDRWMTNARMTHYQSLLLNERVSFAPPAILNPATLLPVESDDTPIHICSEILAEETGTRPDLRDQPLPGVPAWYTDGSSFIMDGRRQAGAAIVDNKRTVWASNLPEGTSAQKAELIALTQALRLAEGKSINIYTDSRYAFATAHVHGAIYKQRGLLTSAGKDIKNKEEILALLEAIHLPKRVAIIHCPGHQRGTDPVATGNRKADEAAKQAAQSTRILTETTKNAGKRTADGSEFEKRTADGSEFESPKKKAKVE

SEQ ID NO: 1609 - protein, 2220 aa, synthetic construct
MPAAKRVKLDGGDKKYSIGLDIGTNSVGWAVITDEYKVPSKKFKVLGNTDRHSIKKNLIGALLFDSGETAEATRLKRTARRRYTRRKNRICYLQEIFSNEMAKVDDSFFHRLEESFLVEEDKKHERHPIFGNIVDEVAYHEKYPTIYHLRKKLVDSTDKADLRLIYLALAHMIKFRGHFLIEGDLNPDNSDVDKLFIQLVQTYNQLFEENPINASGVDAKAILSARLSKSRRLENLIAQLPGEKKNGLFGNLIALSLGLTPNFKSNFDLAEDAKLQLSKDTYDDDLDNLLAQIGDQYADLFLAAKNLSDAILLSDILRVNTEITKAPLSASMIKRYDEHHQDLTLLKALVRQQLPEKYKEIFFDQSKNGYAGYIDGGASQEEFYKFIKPILEKMDGTEELLVKLNREDLLRKQRTFDNGSIPHQIHLGELHAILRRQEDFYPFLKDNREKIEKILTFRIPYYVGPLARGNSRFAWMTRKSEETITPWNFEEVVDKGASAQSFIERMTNFDKNLPNEKVLPKHSLLYEYFTVYNELTKVKYVTEGMRKPAFLSGEQKKAIVDLLFKTNRKVTVKQLKEDYFKKIECFDSVEISGVEDRFNASLGTYHDLLKIIKDKDFLDNEENEDILEDIVLTLTLFEDREMIEERLKTYAHLFDDKVMKQLKRRRYTGWGRLSRKLINGIRDKQSGKTILDFLKSDGFANRNFMQLIHDDSLTFKEDIQKAQVSGQGDSLHEHIANLAGSPAIKKGILQTVKVVDELVKVMGRHKPENIVIEMARENQTTQKGQKNSRERMKRIEEGIKELGSQILKEHPVENTQLQNEKLYLYYLQNGRDMYVDQELDINRLSDYDVDHIVPQSFLKDDSIDNKVLTRSDKARGKSDNVPSEEVVKKMKNYWRQLLNAKLITQRKFDNLTKAERGGLSELDKAGFIKRQLVETRQITKHVAQILDSRMNTKYDENDKLIREVKVITLKSKLVSDFRKDFQFYKVREINNYHHAHDAYLNAVVGTALIKKYPKLESEFVYGDYKVYDVRKMIAKSEQEIGKATAKYFFYSNIMNFFKTEITLANGEIRKRPLIETNGETGEIVWDKGRDFATVRKVLSMPQVNIVKKTEVQTGGFSKESILPKRNSDKLIARKKDWDPKKYGGFDSPTVAYSVLVVAKVEKGKSKKLKSVKELLGITIMERSSFEKNPIDFLEAKGYKEVKKDLIIKLPKYSLFELENGRKRMLASAGELQKGNELALPSKYVNFLYLASHYEKLKGSPEDNEQKQLFVEQHKHYLDEIIEQISEFSKRVILADANLDKVLSAYNKHRDKPIREQAENIIHLFTLTNLGAPAAFKYFDTTIDRKRYTSTKEVLDATLIHQSITGLYETRIDLSQLGGDGGPAPAPAPAPAPAPGGTLGDQGSRGSDPLPEPRVTLTVEGIPTEFLVNTGAEHSVLTKPMGKMGSKRTVVAGATGSKVYPWTTKRLLKIGQKQVTHSFLVIPECPAPLLGRDLLTKLKAQIQFSTEGPQVTWEDRPAMCLVLNLEEEYRLHEKPVPPSIDPSWLQLFPMVWAEKAGMGLANQVPPVVVELKSDASPVAVRQYPMSKEAREGIRPHIQRFLDLGILVPCQSPWNTPLLPVKKPGTNDYRPVQDLREVNKRVQDIHPTVPNPYNLLSSLPPSHTWYSVLDLKDAFFCLKLHPNSQPLFAFEWRDPEKGNTGQLTWTRLPQGFKNSPTLFDEALHRDLASFRALNPQVVMLQYVDDLLVAAPTYRDCKEGTRRLLQELSKLGYRVSAKKAQLCREEVTYLGYLLKGGKRWLTPARKATVMKIPTPTTPRQVREFLGTAGFCRLWIPGFASLAAPLYPLTREKVPFTWTEAHQEAFGRIKEALLSAPALALPDLTKPFALYVDEKEGVARGVLTQTLGPWRRPVAYLSKKLDPVASGWPTCLKAIAAVALLLKDADKLTLGQNVLVIAPHNLESIVRQPPDRWMTNARMTHYQSLLLNERVSFAPPAILNPATLLPVESDDTPIHICSEILAEETGTRPDLRDQPLPGVPAWYTDGSSFIMDGRRQAGAAIVDNKRTVWASNLPEGTSAQKAELIALTQALRLAEGKSINIYTDSRYAFATAHVHGAIYKQRGLLTSAGKDIKNKEEILALLEAIHLPKRVAIIHCPGHQRGTDPVATGNRKADEAAKQAAQSTRILTETTKNAGKRTADGSEFEKRTADGSEFESPKKKAKVE

SEQ ID NO: 1610 - protein, 2127 aa, synthetic construct
MPAAKRVKLDGGDKKYSIGLDIGTNSVGWAVITDEYKVPSKKFKVLGNTDRHSIKKNLIGALLFDSGETAEATRLKRTARRRYTRRKNRICYLQEIFSNEMAKVDDSFFHRLEESFLVEEDKKHERHPIFGNIVDEVAYHEKYPTIYHLRKKLVDSTDKADLRLIYLALAHMIKFRGHFLIEGDLNPDNSDVDKLFIQLVQTYNQLFEENPINASGVDAKAILSARLSKSRRLENLIAQLPGEKKNGLFGNLIALSLGLTPNFKSNFDLAEDAKLQLSKDTYDDDLDNLLAQIGDQYADLFLAAKNLSDAILLSDILRVNTEITKAPLSASMIKRYDEHHQDLTLLKALVRQQLPEKYKEIFFDQSKNGYAGYIDGGASQEEFYKFIKPILEKMDGTEELLVKLNREDLLRKQRTFDNGSIPHQIHLGELHAILRRQEDFYPFLKDNREKIEKILTFRIPYYVGPLARGNSRFAWMTRKSEETITPWNFEEVVDKGASAQSFIERMTNFDKNLPNEKVLPKHSLLYEYFTVYNELTKVKYVTEGMRKPAFLSGEQKKAIVDLLFKTNRKVTVKQLKEDYFKKIECFDSVEISGVEDRFNASLGTYHDLLKIIKDKDFLDNEENEDILEDIVLTLTLFEDREMIEERLKTYAHLFDDKVMKQLKRRRYTGWGRLSRKLINGIRDKQSGKTILDFLKSDGFANRNFMQLIHDDSLTFKEDIQKAQVSGQGDSLHEHIANLAGSPAIKKGILQTVKVVDELVKVMGRHKPENIVIEMARENQTTQKGQKNSRERMKRIEEGIKELGSQILKEHPVENTQLQNEKLYLYYLQNGRDMYVDQELDINRLSDYDVDHIVPQSFLKDDSIDNKVLTRSDKARGKSDNVPSEEVVKKMKNYWRQLLNAKLITQRKFDNLTKAERGGLSELDKAGFIKRQLVETRQITKHVAQILDSRMNTKYDENDKLIREVKVITLKSKLVSDFRKDFQFYKVREINNYHHAHDAYLNAVVGTALIKKYPKLESEFVYGDYKVYDVRKMIAKSEQEIGKATAKYFFYSNIMNFFKTEITLANGEIRKRPLIETNGETGEIVWDKGRDFATVRKVLSMPQVNIVKKTEVQTGGFSKESILPKRNSDKLIARKKDWDPKKYGGFDSPTVAYSVLVVAKVEKGKSKKLKSVKELLGITIMERSSFEKNPIDFLEAKGYKEVKKDLIIKLPKYSLFELENGRKRMLASAGELQKGNELALPSKYVNFLYLASHYEKLKGSPEDNEQKQLFVEQHKHYLDEIIEQISEFSKRVILADANLDKVLSAYNKHRDKPIREQAENIIHLFTLTNLGAPAAFKYFDTTIDRKRYTSTKEVLDATLIHQSITGLYETRIDLSQLGGDGGEAAAKGGSPAPGGLLGRDLLTKLKAQIQFSTEGPQVTWEDRPAMCLVLNLEEEYRLHEKPVPPSIDPSWLQLFPMVWAEKAGMGLANQVPPVVVELKSDASPVAVRQYPMSKEAREGIRPHIQRFLDLGILVPCQSPWNTPLLPVKKPGTNDYRPVQDLREVNKRVQDIHPTVPNPYNLLSSLPPSHTWYSVLDLKDAFFCLKLHPNSQPLFAFEWRDPEKGNTGQLTWTRLPQGFKNSPTLFDEALHRDLASFRALNPQVVMLQYVDDLLVAAPTYRDCKEGTRRLLQELSKLGYRVSAKKAQLCREEVTYLGYLLKGGKRWLTPARKATVMKIPTPTTPRQVREFLGTAGFCRLWIPGFASLAAPLYPLTREKVPFTWTEAHQEAFGRIKEALLSAPALALPDLTKPFALYVDEKEGVARGVLTQTLGPWRRPVAYLSKKLDPVASGWPTCLKAIAAVALLLKDADKLTLGQNVLVIAPHNLESIVRQPPDRWMTNARMTHYQSLLLNERVSFAPPAILNPATLLPVESDDTPIHICSEILAEETGTRPDLRDQPLPGVPAWYTDGSSFIMDGRRQAGAAIVDNKRTVWASNLPEGTSAQKAELIALTQALRLAEGKSINIYTDSRYAFATAHVHGAIYKQRGLLTSAGKDIKNKEEILALLEAIHLPKRVAIIHCPGHQRGTDPVATGNRKADEAAKQAAQSTRILTETTKNAGKRTADGSEFEKRTADGSEFESPKKKAKVE

SEQ ID NO: 1611 - protein, 2125 aa, synthetic construct
MPAAKRVKLDGGDKKYSIGLDIGTNSVGWAVITDEYKVPSKKFKVLGNTDRHSIKKNLIGALLFDSGETAEATRLKRTARRRYTRRKNRICYLQEIFSNEMAKVDDSFFHRLEESFLVEEDKKHERHPIFGNIVDEVAYHEKYPTIYHLRKKLVDSTDKADLRLIYLALAHMIKFRGHFLIEGDLNPDNSDVDKLFIQLVQTYNQLFEENPINASGVDAKAILSARLSKSRRLENLIAQLPGEKKNGLFGNLIALSLGLTPNFKSNFDLAEDAKLQLSKDTYDDDLDNLLAQIGDQYADLFLAAKNLSDAILLSDILRVNTEITKAPLSASMIKRYDEHHQDLTLLKALVRQQLPEKYKEIFFDQSKNGYAGYIDGGASQEEFYKFIKPILEKMDGTEELLVKLNREDLLRKQRTFDNGSIPHQIHLGELHAILRRQEDFYPFLKDNREKIEKILTFRIPYYVGPLARGNSRFAWMTRKSEETITPWNFEEVVDKGASAQSFIERMTNFDKNLPNEKVLPKHSLLYEYFTVYNELTKVKYVTEGMRKPAFLSGEQKKAIVDLLFKTNRKVTVKQLKEDYFKKIECFDSVEISGVEDRFNASLGTYHDLLKIIKDKDFLDNEENEDILEDIVLTLTLFEDREMIEERLKTYAHLFDDKVMKQLKRRRYTGWGRLSRKLINGIRDKQSGKTILDFLKSDGFANRNFMQLIHDDSLTFKEDIQKAQVSGQGDSLHEHIANLAGSPAIKKGILQTVKVVDELVKVMGRHKPENIVIEMARENQTTQKGQKNSRERMKRIEEGIKELGSQILKEHPVENTQLQNEKLYLYYLQNGRDMYVDQELDINRLSDYDVDHIVPQSFLKDDSIDNKVLTRSDKARGKSDNVPSEEVVKKMKNYWRQLLNAKLITQRKFDNLTKAERGGLSELDKAGFIKRQLVETRQITKHVAQILDSRMNTKYDENDKLIREVKVITLKSKLVSDFRKDFQFYKVREINNYHHAHDAYLNAVVGTALIKKYPKLESEFVYGDYKVYDVRKMIAKSEQEIGKATAKYFFYSNIMNFFKTEITLANGEIRKRPLIETNGETGEIVWDKGRDFATVRKVLSMPQVNIVKKTEVQTGGFSKESILPKRNSDKLIARKKDWDPKKYGGFDSPTVAYSVLVVAKVEKGKSKKLKSVKELLGITIMERSSFEKNPIDFLEAKGYKEVKKDLIIKLPKYSLFELENGRKRMLASAGELQKGNELALPSKYVNFLYLASHYEKLKGSPEDNEQKQLFVEQHKHYLDEIIEQISEFSKRVILADANLDKVLSAYNKHRDKPIREQAENIIHLFTLTNLGAPAAFKYFDTTIDRKRYTSTKEVLDATLIHQSITGLYETRIDLSQLGGDGGGGGGGSGSSGGLLGRDLLTKLKAQIQFSTEGPQVTWEDRPAMCLVLNLEEEYRLHEKPVPPSIDPSWLQLFPMVWAEKAGMGLANQVPPVVVELKSDASPVAVRQYPMSKEAREGIRPHIQRFLDLGILVPCQSPWNTPLLPVKKPGTNDYRPVQDLREVNKRVQDIHPTVPNPYNLLSSLPPSHTWYSVLDLKDAFFCLKLHPNSQPLFAFEWRDPEKGNTGQLTWTRLPQGFKNSPTLFDEALHRDLASFRALNPQVVMLQYVDDLLVAAPTYRDCKEGTRRLLQELSKLGYRVSAKKAQLCREEVTYLGYLLKGGKRWLTPARKATVMKIPTPTTPRQVREFLGTAGFCRLWIPGFASLAAPLYPLTREKVPFTWTEAHQEAFGRIKEALLSAPALALPDLTKPFALYVDEKEGVARGVLTQTLGPWRRPVAYLSKKLDPVASGWPTCLKAIAAVALLLKDADKLTLGQNVLVIAPHNLESIVRQPPDRWMTNARMTHYQSLLLNERVSFAPPAILNPATLLPVESDDTPIHICSEILAEETGTRPDLRDQPLPGVPAWYTDGSSFIMDGRRQAGAAIVDNKRTVWASNLPEGTSAQKAELIALTQALRLAEGKSINIYTDSRYAFATAHVHGAIYKQRGLLTSAGKDIKNKEEILALLEAIHLPKRVAIIHCPGHQRGTDPVATGNRKADEAAKQAAQSTRILTETTKNAGKRTADGSEFEKRTADGSEFESPKKKAKVE

SEQ ID NO: 1612 - protein, 2127 aa, synthetic construct
MPAAKRVKLDGGDKKYSIGLDIGTNSVGWAVITDEYKVPSKKFKVLGNTDRHSIKKNLIGALLFDSGETAEATRLKRTARRRYTRRKNRICYLQEIFSNEMAKVDDSFFHRLEESFLVEEDKKHERHPIFGNIVDEVAYHEKYPTIYHLRKKLVDSTDKADLRLIYLALAHMIKFRGHFLIEGDLNPDNSDVDKLFIQLVQTYNQLFEENPINASGVDAKAILSARLSKSRRLENLIAQLPGEKKNGLFGNLIALSLGLTPNFKSNFDLAEDAKLQLSKDTYDDDLDNLLAQIGDQYADLFLAAKNLSDAILLSDILRVNTEITKAPLSASMIKRYDEHHQDLTLLKALVRQQLPEKYKEIFFDQSKNGYAGYIDGGASQEEFYKFIKPILEKMDGTEELLVKLNREDLLRKQRTFDNGSIPHQIHLGELHAILRRQEDFYPFLKDNREKIEKILTFRIPYYVGPLARGNSRFAWMTRKSEETITPWNFEEVVDKGASAQSFIERMTNFDKNLPNEKVLPKHSLLYEYFTVYNELTKVKYVTEGMRKPAFLSGEQKKAIVDLLFKTNRKVTVKQLKEDYFKKIECFDSVEISGVEDRFNASLGTYHDLLKIIKDKDFLDNEENEDILEDIVLTLTLFEDREMIEERLKTYAHLFDDKVMKQLKRRRYTGWGRLSRKLINGIRDKQSGKTILDFLKSDGFANRNFMQLIHDDSLTFKEDIQKAQVSGQGDSLHEHIANLAGSPAIKKGILQTVKVVDELVKVMGRHKPENIVIEMARENQTTQKGQKNSRERMKRIEEGIKELGSQILKEHPVENTQLQNEKLYLYYLQNGRDMYVDQELDINRLSDYDVDHIVPQSFLKDDSIDNKVLTRSDKARGKSDNVPSEEVVKKMKNYWRQLLNAKLITQRKFDNLTKAERGGLSELDKAGFIKRQLVETRQITKHVAQILDSRMNTKYDENDKLIREVKVITLKSKLVSDFRKDFQFYKVREINNYHHAHDAYLNAVVGTALIKKYPKLESEFVYGDYKVYDVRKMIAKSEQEIGKATAKYFFYSNIMNFFKTEITLANGEIRKRPLIETNGETGEIVWDKGRDFATVRKVLSMPQVNIVKKTEVQTGGFSKESILPKRNSDKLIARKKDWDPKKYGGFDSPTVAYSVLVVAKVEKGKSKKLKSVKELLGITIMERSSFEKNPIDFLEAKGYKEVKKDLIIKLPKYSLFELENGRKRMLASAGELQKGNELALPSKYVNFLYLASHYEKLKGSPEDNEQKQLFVEQHKHYLDEIIEQISEFSKRVILADANLDKVLSAYNKHRDKPIREQAENIIHLFTLTNLGAPAAFKYFDTTIDRKRYTSTKEVLDATLIHQSITGLYETRIDLSQLGGDGGEAAAKGGGPAPGGLLGRDLLTKLKAQIQFSTEGPQVTWEDRPAMCLVLNLEEEYRLHEKPVPPSIDPSWLQLFPMVWAEKAGMGLANQVPPVVVELKSDASPVAVRQYPMSKEAREGIRPHIQRFLDLGILVPCQSPWNTPLLPVKKPGTNDYRPVQDLREVNKRVQDIHPTVPNPYNLLSSLPPSHTWYSVLDLKDAFFCLKLHPNSQPLFAFEWRDPEKGNTGQLTWTRLPQGFKNSPTLFDEALHRDLASFRALNPQVVMLQYVDDLLVAAPTYRDCKEGTRRLLQELSKLGYRVSAKKAQLCREEVTYLGYLLKGGKRWLTPARKATVMKIPTPTTPRQVREFLGTAGFCRLWIPGFASLAAPLYPLTREKVPFTWTEAHQEAFGRIKEALLSAPALALPDLTKPFALYVDEKEGVARGVLTQTLGPWRRPVAYLSKKLDPVASGWPTCLKAIAAVALLLKDADKLTLGQNVLVIAPHNLESIVRQPPDRWMTNARMTHYQSLLLNERVSFAPPAILNPATLLPVESDDTPIHICSEILAEETGTRPDLRDQPLPGVPAWYTDGSSFIMDGRRQAGAAIVDNKRTVWASNLPEGTSAQKAELIALTQALRLAEGKSINIYTDSRYAFATAHVHGAIYKQRGLLTSAGKDIKNKEEILALLEAIHLPKRVAIIHCPGHQRGTDPVATGNRKADEAAKQAAQSTRILTETTKNAGKRTADGSEFEKRTADGSEFESPKKKAKVE

SEQ ID NO: 1613 - protein, 2127 aa, synthetic construct
MPAAKRVKLDGGDKKYSIGLDIGTNSVGWAVITDEYKVPSKKFKVLGNTDRHSIKKNLIGALLFDSGETAEATRLKRTARRRYTRRKNRICYLQEIFSNEMAKVDDSFFHRLEESFLVEEDKKHERHPIFGNIVDEVAYHEKYPTIYHLRKKLVDSTDKADLRLIYLALAHMIKFRGHFLIEGDLNPDNSDVDKLFIQLVQTYNQLFEENPINASGVDAKAILSARLSKSRRLENLIAQLPGEKKNGLFGNLIALSLGLTPNFKSNFDLAEDAKLQLSKDTYDDDLDNLLAQIGDQYADLFLAAKNLSDAILLSDILRVNTEITKAPLSASMIKRYDEHHQDLTLLKALVRQQLPEKYKEIFFDQSKNGYAGYIDGGASQEEFYKFIKPILEKMDGTEELLVKLNREDLLRKQRTFDNGSIPHQIHLGELHAILRRQEDFYPFLKDNREKIEKILTFRIPYYVGPLARGNSRFAWMTRKSEETITPWNFEEVVDKGASAQSFIERMTNFDKNLPNEKVLPKHSLLYEYFTVYNELTKVKYVTEGMRKPAFLSGEQKKAIVDLLFKTNRKVTVKQLKEDYFKKIECFDSVEISGVEDRFNASLGTYHDLLKIIKDKDFLDNEENEDILEDIVLTLTLFEDREMIEERLKTYAHLFDDKVMKQLKRRRYTGWGRLSRKLINGIRDKQSGKTILDFLKSDGFANRNFMQLIHDDSLTFKEDIQKAQVSGQGDSLHEHIANLAGSPAIKKGILQTVKVVDELVKVMGRHKPENIVIEMARENQTTQKGQKNSRERMKRIEEGIKELGSQILKEHPVENTQLQNEKLYLYYLQNGRDMYVDQELDINRLSDYDVDHIVPQSFLKDDSIDNKVLTRSDKARGKSDNVPSEEVVKKMKNYWRQLLNAKLITQRKFDNLTKAERGGLSELDKAGFIKRQLVETRQITKHVAQILDSRMNTKYDENDKLIREVKVITLKSKLVSDFRKDFQFYKVREINNYHHAHDAYLNAVVGTALIKKYPKLESEFVYGDYKVYDVRKMIAKSEQEIGKATAKYFFYSNIMNFFKTEITLANGEIRKRPLIETNGETGEIVWDKGRDFATVRKVLSMPQVNIVKKTEVQTGGFSKESILPKRNSDKLIARKKDWDPKKYGGFDSPTVAYSVLVVAKVEKGKSKKLKSVKELLGITIMERSSFEKNPIDFLEAKGYKEVKKDLIIKLPKYSLFELENGRKRMLASAGELQKGNELALPSKYVNFLYLASHYEKLKGSPEDNEQKQLFVEQHKHYLDEIIEQISEFSKRVILADANLDKVLSAYNKHRDKPIREQAENIIHLFTLTNLGAPAAFKYFDTTIDRKRYTSTKEVLDATLIHQSITGLYETRIDLSQLGGDGGEAAAKPAPGSSGGLLGRDLLTKLKAQIQFSTEGPQVTWEDRPAMCLVLNLEEEYRLHEKPVPPSIDPSWLQLFPMVWAEKAGMGLANQVPPVVVELKSDASPVAVRQYPMSKEAREGIRPHIQRFLDLGILVPCQSPWNTPLLPVKKPGTNDYRPVQDLREVNKRVQDIHPTVPNPYNLLSSLPPSHTWYSVLDLKDAFFCLKLHPNSQPLFAFEWRDPEKGNTGQLTWTRLPQGFKNSPTLFDEALHRDLASFRALNPQVVMLQYVDDLLVAAPTYRDCKEGTRRLLQELSKLGYRVSAKKAQLCREEVTYLGYLLKGGKRWLTPARKATVMKIPTPTTPRQVREFLGTAGFCRLWIPGFASLAAPLYPLTREKVPFTWTEAHQEAFGRIKEALLSAPALALPDLTKPFALYVDEKEGVARGVLTQTLGPWRRPVAYLSKKLDPVASGWPTCLKAIAAVALLLKDADKLTLGQNVLVIAPHNLESIVRQPPDRWMTNARMTHYQSLLLNERVSFAPPAILNPATLLPVESDDTPIHICSEILAEETGTRPDLRDQPLPGVPAWYTDGSSFIMDGRRQAGAAIVDNKRTVWASNLPEGTSAQKAELIALTQALRLAEGKSINIYTDSRYAFATAHVHGAIYKQRGLLTSAGKDIKNKEEILALLEAIHLPKRVAIIHCPGHQRGTDPVATGNRKADEAAKQAAQSTRILTETTKNAGKRTADGSEFEKRTADGSEFESPKKKAKVE

SEQ ID NO: 1614 - protein, 2127 aa, synthetic construct
MPAAKRVKLDGGDKKYSIGLDIGTNSVGWAVITDEYKVPSKKFKVLGNTDRHSIKKNLIGALLFDSGETAEATRLKRTARRRYTRRKNRICYLQEIFSNEMAKVDDSFFHRLEESFLVEEDKKHERHPIFGNIVDEVAYHEKYPTIYHLRKKLVDSTDKADLRLIYLALAHMIKFRGHFLIEGDLNPDNSDVDKLFIQLVQTYNQLFEENPINASGVDAKAILSARLSKSRRLENLIAQLPGEKKNGLFGNLIALSLGLTPNFKSNFDLAEDAKLQLSKDTYDDDLDNLLAQIGDQYADLFLAAKNLSDAILLSDILRVNTEITKAPLSASMIKRYDEHHQDLTLLKALVRQQLPEKYKEIFFDQSKNGYAGYIDGGASQEEFYKFIKPILEKMDGTEELLVKLNREDLLRKQRTFDNGSIPHQIHLGELHAILRRQEDFYPFLKDNREKIEKILTFRIPYYVGPLARGNSRFAWMTRKSEETITPWNFEEVVDKGASAQSFIERMTNFDKNLPNEKVLPKHSLLYEYFTVYNELTKVKYVTEGMRKPAFLSGEQKKAIVDLLFKTNRKVTVKQLKEDYFKKIECFDSVEISGVEDRFNASLGTYHDLLKIIKDKDFLDNEENEDILEDIVLTLTLFEDREMIEERLKTYAHLFDDKVMKQLKRRRYTGWGRLSRKLINGIRDKQSGKTILDFLKSDGFANRNFMQLIHDDSLTFKEDIQKAQVSGQGDSLHEHIANLAGSPAIKKGILQTVKVVDELVKVMGRHKPENIVIEMARENQTTQKGQKNSRERMKRIEEGIKELGSQILKEHPVENTQLQNEKLYLYYLQNGRDMYVDQELDINRLSDYDVDHIVPQSFLKDDSIDNKVLTRSDKARGKSDNVPSEEVVKKMKNYWRQLLNAKLITQRKFDNLTKAERGGLSELDKAGFIKRQLVETRQITKHVAQILDSRMNTKYDENDKLIREVKVITLKSKLVSDFRKDFQFYKVREINNYHHAHDAYLNAVVGTALIKKYPKLESEFVYGDYKVYDVRKMIAKSEQEIGKATAKYFFYSNIMNFFKTEITLANGEIRKRPLIETNGETGEIVWDKGRDFATVRKVLSMPQVNIVKKTEVQTGGFSKESILPKRNSDKLIARKKDWDPKKYGGFDSPTVAYSVLVVAKVEKGKSKKLKSVKELLGITIMERSSFEKNPIDFLEAKGYKEVKKDLIIKLPKYSLFELENGRKRMLASAGELQKGNELALPSKYVNFLYLASHYEKLKGSPEDNEQKQLFVEQHKHYLDEIIEQISEFSKRVILADANLDKVLSAYNKHRDKPIREQAENIIHLFTLTNLGAPAAFKYFDTTIDRKRYTSTKEVLDATLIHQSITGLYETRIDLSQLGGDGGPAPGGSEAAAKGGLLGRDLLTKLKAQIQFSTEGPQVTWEDRPAMCLVLNLEEEYRLHEKPVPPSIDPSWLQLFPMVWAEKAGMGLANQVPPVVVELKSDASPVAVRQYPMSKEAREGIRPHIQRFLDLGILVPCQSPWNTPLLPVKKPGTNDYRPVQDLREVNKRVQDIHPTVPNPYNLLSSLPPSHTWYSVLDLKDAFFCLKLHPNSQPLFAFEWRDPEKGNTGQLTWTRLPQGFKNSPTLFDEALHRDLASFRALNPQVVMLQYVDDLLVAAPTYRDCKEGTRRLLQELSKLGYRVSAKKAQLCREEVTYLGYLLKGGKRWLTPARKATVMKIPTPTTPRQVREFLGTAGFCRLWIPGFASLAAPLYPLTREKVPFTWTEAHQEAFGRIKEALLSAPALALPDLTKPFALYVDEKEGVARGVLTQTLGPWRRPVAYLSKKLDPVASGWPTCLKAIAAVALLLKDADKLTLGQNVLVIAPHNLESIVRQPPDRWMTNARMTHYQSLLLNERVSFAPPAILNPATLLPVESDDTPIHICSEILAEETGTRPDLRDQPLPGVPAWYTDGSSFIMDGRRQAGAAIVDNKRTVWASNLPEGTSAQKAELIALTQALRLAEGKSINIYTDSRYAFATAHVHGAIYKQRGLLTSAGKDIKNKEEILALLEAIHLPKRVAIIHCPGHQRGTDPVATGNRKADEAAKQAAQSTRILTETTKNAGKRTADGSEFEKRTADGSEFESPKKKAKVE

SEQ ID NO: 1615 - protein, 2134 aa, synthetic construct
MPAAKRVKLDGGDKKYSIGLDIGTNSVGWAVITDEYKVPSKKFKVLGNTDRHSIKKNLIGALLFDSGETAEATRLKRTARRRYTRRKNRICYLQEIFSNEMAKVDDSFFHRLEESFLVEEDKKHERHPIFGNIVDEVAYHEKYPTIYHLRKKLVDSTDKADLRLIYLALAHMIKFRGHFLIEGDLNPDNSDVDKLFIQLVQTYNQLFEENPINASGVDAKAILSARLSKSRRLENLIAQLPGEKKNGLFGNLIALSLGLTPNFKSNFDLAEDAKLQLSKDTYDDDLDNLLAQIGDQYADLFLAAKNLSDAILLSDILRVNTEITKAPLSASMIKRYDEHHQDLTLLKALVRQQLPEKYKEIFFDQSKNGYAGYIDGGASQEEFYKFIKPILEKMDGTEELLVKLNREDLLRKQRTFDNGSIPHQIHLGELHAILRRQEDFYPFLKDNREKIEKILTFRIPYYVGPLARGNSRFAWMTRKSEETITPWNFEEVVDKGASAQSFIERMTNFDKNLPNEKVLPKHSLLYEYFTVYNELTKVKYVTEGMRKPAFLSGEQKKAIVDLLFKTNRKVTVKQLKEDYFKKIECFDSVEISGVEDRFNASLGTYHDLLKIIKDKDFLDNEENEDILEDIVLTLTLFEDREMIEERLKTYAHLFDDKVMKQLKRRRYTGWGRLSRKLINGIRDKQSGKTILDFLKSDGFANRNFMQLIHDDSLTFKEDIQKAQVSGQGDSLHEHIANLAGSPAIKKGILQTVKVVDELVKVMGRHKPENIVIEMARENQTTQKGQKNSRERMKRIEEGIKELGSQILKEHPVENTQLQNEKLYLYYLQNGRDMYVDQELDINRLSDYDVDHIVPQSFLKDDSIDNKVLTRSDKARGKSDNVPSEEVVKKMKNYWRQLLNAKLITQRKFDNLTKAERGGLSELDKAGFIKRQLVETRQITKHVAQILDSRMNTKYDENDKLIREVKVITLKSKLVSDFRKDFQFYKVREINNYHHAHDAYLNAVVGTALIKKYPKLESEFVYGDYKVYDVRKMIAKSEQEIGKATAKYFFYSNIMNFFKTEITLANGEIRKRPLIETNGETGEIVWDKGRDFATVRKVLSMPQVNIVKKTEVQTGGFSKESILPKRNSDKLIARKKDWDPKKYGGFDSPTVAYSVLVVAKVEKGKSKKLKSVKELLGITIMERSSFEKNPIDFLEAKGYKEVKKDLIIKLPKYSLFELENGRKRMLASAGELQKGNELALPSKYVNFLYLASHYEKLKGSPEDNEQKQLFVEQHKHYLDEIIEQISEFSKRVILADANLDKVLSAYNKHRDKPIREQAENIIHLFTLTNLGAPAAFKYFDTTIDRKRYTSTKEVLDATLIHQSITGLYETRIDLSQLGGDGGGSSGSSGSSGSSGSSGSSGGLLGRDLLTKLKAQIQFSTEGPQVTWEDRPAMCLVLNLEEEYRLHEKPVPPSIDPSWLQLFPMVWAEKAGMGLANQVPPVVVELKSDASPVAVRQYPMSKEAREGIRPHIQRFLDLGILVPCQSPWNTPLLPVKKPGTNDYRPVQDLREVNKRVQDIHPTVPNPYNLLSSLPPSHTWYSVLDLKDAFFCLKLHPNSQPLFAFEWRDPEKGNTGQLTWTRLPQGFKNSPTLFDEALHRDLASFRALNPQVVMLQYVDDLLVAAPTYRDCKEGTRRLLQELSKLGYRVSAKKAQLCREEVTYLGYLLKGGKRWLTPARKATVMKIPTPTTPRQVREFLGTAGFCRLWIPGFASLAAPLYPLTREKVPFTWTEAHQEAFGRIKEALLSAPALALPDLTKPFALYVDEKEGVARGVLTQTLGPWRRPVAYLSKKLDPVASGWPTCLKAIAAVALLLKDADKLTLGQNVLVIAPHNLESIVRQPPDRWMTNARMTHYQSLLLNERVSFAPPAILNPATLLPVESDDTPIHICSEILAEETGTRPDLRDQPLPGVPAWYTDGSSFIMDGRRQAGAAIVDNKRTVWASNLPEGTSAQKAELIALTQALRLAEGKSINIYTDSRYAFATAHVHGAIYKQRGLLTSAGKDIKNKEEILALLEAIHLPKRVAIIHCPGHQRGTDPVATGNRKADEAAKQAAQSTRILTETTKNAGKRTADGSEFEKRTADGSEFESPKKKAKVE

SEQ ID NO: 1616 - protein, 2123 aa, synthetic construct
MPAAKRVKLDGGDKKYSIGLDIGTNSVGWAVITDEYKVPSKKFKVLGNTDRHSIKKNLIGALLFDSGETAEATRLKRTARRRYTRRKNRICYLQEIFSNEMAKVDDSFFHRLEESFLVEEDKKHERHPIFGNIVDEVAYHEKYPTIYHLRKKLVDSTDKADLRLIYLALAHMIKFRGHFLIEGDLNPDNSDVDKLFIQLVQTYNQLFEENPINASGVDAKAILSARLSKSRRLENLIAQLPGEKKNGLFGNLIALSLGLTPNFKSNFDLAEDAKLQLSKDTYDDDLDNLLAQIGDQYADLFLAAKNLSDAILLSDILRVNTEITKAPLSASMIKRYDEHHQDLTLLKALVRQQLPEKYKEIFFDQSKNGYAGYIDGGASQEEFYKFIKPILEKMDGTEELLVKLNREDLLRKQRTFDNGSIPHQIHLGELHAILRRQEDFYPFLKDNREKIEKILTFRIPYYVGPLARGNSRFAWMTRKSEETITPWNFEEVVDKGASAQSFIERMTNFDKNLPNEKVLPKHSLLYEYFTVYNELTKVKYVTEGMRKPAFLSGEQKKAIVDLLFKTNRKVTVKQLKEDYFKKIECFDSVEISGVEDRFNASLGTYHDLLKIIKDKDFLDNEENEDILEDIVLTLTLFEDREMIEERLKTYAHLFDDKVMKQLKRRRYTGWGRLSRKLINGIRDKQSGKTILDFLKSDGFANRNFMQLIHDDSLTFKEDIQKAQVSGQGDSLHEHIANLAGSPAIKKGILQTVKVVDELVKVMGRHKPENIVIEMARENQTTQKGQKNSRERMKRIEEGIKELGSQILKEHPVENTQLQNEKLYLYYLQNGRDMYVDQELDINRLSDYDVDHIVPQSFLKDDSIDNKVLTRSDKARGKSDNVPSEEVVKKMKNYWRQLLNAKLITQRKFDNLTKAERGGLSELDKAGFIKRQLVETRQITKHVAQILDSRMNTKYDENDKLIREVKVITLKSKLVSDFRKDFQFYKVREINNYHHAHDAYLNAVVGTALIKKYPKLESEFVYGDYKVYDVRKMIAKSEQEIGKATAKYFFYSNIMNFFKTEITLANGEIRKRPLIETNGETGEIVWDKGRDFATVRKVLSMPQVNIVKKTEVQTGGFSKESILPKRNSDKLIARKKDWDPKKYGGFDSPTVAYSVLVVAKVEKGKSKKLKSVKELLGITIMERSSFEKNPIDFLEAKGYKEVKKDLIIKLPKYSLFELENGRKRMLASAGELQKGNELALPSKYVNFLYLASHYEKLKGSPEDNEQKQLFVEQHKHYLDEIIEQISEFSKRVILADANLDKVLSAYNKHRDKPIREQAENIIHLFTLTNLGAPAAFKYFDTTIDRKRYTSTKEVLDATLIHQSITGLYETRIDLSQLGGDGGPAPAPAPGGLLGRDLLTKLKAQIQFSTEGPQVTWEDRPAMCLVLNLEEEYRLHEKPVPPSIDPSWLQLFPMVWAEKAGMGLANQVPPVVVELKSDASPVAVRQYPMSKEAREGIRPHIQRFLDLGILVPCQSPWNTPLLPVKKPGTNDYRPVQDLREVNKRVQDIHPTVPNPYNLLSSLPPSHTWYSVLDLKDAFFCLKLHPNSQPLFAFEWRDPEKGNTGQLTWTRLPQGFKNSPTLFNEALHRDLASFRALNPQVVMLQYVDDLLVAAPTYRDCKEGTRRLLQELSKLGYRVSAKKAQLCREEVTYLGYLLKGGKRWLTPARKATVMKIPTPTTPRQVREFLGTAGFCRLWIPGFASLAAPLYPLTRPKVPFTWTEAHQEAFGRIKEALLSAPALALPDLTKPFALYVDEKEGVARGVLTQTLGPWRRPVAYLSKKLDPVASGWPTCLKAIAAVALLLKDADKLTLGQNVLVIAPHNLESIVRQPPDRWMTNARMTHYQSLLLNERVSFAPPAILNPATLLPVESDDTPIHICSEILAEETGTRPDLRDQPLPGVPAWYTDGSSFIMDGRRQAGAAIVDNKRTVWASNLPEGTSAQKAELIALTQALRLAEGKSINIYTDSRYAFATAHVHGAIYKQRGWLTSAGKDIKNKEEILALLEAIHLPKRVAIIHCPGHQRGTDPVATGNRKADEAAKQAAQSTRILTETTKNAGKRTADGSEFEKRTADGSEFESPKKKAKVE

SEQ ID NO: 1617 - protein, 2131 aa, synthetic construct
MPAAKRVKLDGGDKKYSIGLDIGTNSVGWAVITDEYKVPSKKFKVLGNTDRHSIKKNLIGALLFDSGETAEATRLKRTARRRYTRRKNRICYLQEIFSNEMAKVDDSFFHRLEESFLVEEDKKHERHPIFGNIVDEVAYHEKYPTIYHLRKKLVDSTDKADLRLIYLALAHMIKFRGHFLIEGDLNPDNSDVDKLFIQLVQTYNQLFEENPINASGVDAKAILSARLSKSRRLENLIAQLPGEKKNGLFGNLIALSLGLTPNFKSNFDLAEDAKLQLSKDTYDDDLDNLLAQIGDQYADLFLAAKNLSDAILLSDILRVNTEITKAPLSASMIKRYDEHHQDLTLLKALVRQQLPEKYKEIFFDQSKNGYAGYIDGGASQEEFYKFIKPILEKMDGTEELLVKLNREDLLRKQRTFDNGSIPHQIHLGELHAILRRQEDFYPFLKDNREKIEKILTFRIPYYVGPLARGNSRFAWMTRKSEETITPWNFEEVVDKGASAQSFIERMTNFDKNLPNEKVLPKHSLLYEYFTVYNELTKVKYVTEGMRKPAFLSGEQKKAIVDLLFKTNRKVTVKQLKEDYFKKIECFDSVEISGVEDRFNASLGTYHDLLKIIKDKDFLDNEENEDILEDIVLTLTLFEDREMIEERLKTYAHLFDDKVMKQLKRRRYTGWGRLSRKLINGIRDKQSGKTILDFLKSDGFANRNFMQLIHDDSLTFKEDIQKAQVSGQGDSLHEHIANLAGSPAIKKGILQTVKVVDELVKVMGRHKPENIVIEMARENQTTQKGQKNSRERMKRIEEGIKELGSQILKEHPVENTQLQNEKLYLYYLQNGRDMYVDQELDINRLSDYDVDHIVPQSFLKDDSIDNKVLTRSDKARGKSDNVPSEEVVKKMKNYWRQLLNAKLITQRKFDNLTKAERGGLSELDKAGFIKRQLVETRQITKHVAQILDSRMNTKYDENDKLIREVKVITLKSKLVSDFRKDFQFYKVREINNYHHAHDAYLNAVVGTALIKKYPKLESEFVYGDYKVYDVRKMIAKSEQEIGKATAKYFFYSNIMNFFKTEITLANGEIRKRPLIETNGETGEIVWDKGRDFATVRKVLSMPQVNIVKKTEVQTGGFSKESILPKRNSDKLIARKKDWDPKKYGGFDSPTVAYSVLVVAKVEKGKSKKLKSVKELLGITIMERSSFEKNPIDFLEAKGYKEVKKDLIIKLPKYSLFELENGRKRMLASAGELQKGNELALPSKYVNFLYLASHYEKLKGSPEDNEQKQLFVEQHKHYLDEIIEQISEFSKRVILADANLDKVLSAYNKHRDKPIREQAENIIHLFTLTNLGAPAAFKYFDTTIDRKRYTSTKEVLDATLIHQSITGLYETRIDLSQLGGDGGGSSGSSGSSGSSGSSGGLLGRDLLTKLKAQIQFSTEGPQVTWEDRPAMCLVLNLEEEYRLHEKPVPPSIDPSWLQLFPMVWAEKAGMGLANQVPPVVVELKSDASPVAVRQYPMSKEAREGIRPHIQRFLDLGILVPCQSPWNTPLLPVKKPGTNDYRPVQDLREVNKRVQDIHPTVPNPYNLLSSLPPSHTWYSVLDLKDAFFCLKLHPNSQPLFAFEWRDPEKGNTGQLTWTRLPQGFKNSPTLFNEALHRDLASFRALNPQVVMLQYVDDLLVAAPTYRDCKEGTRRLLQELSKLGYRVSAKKAQLCREEVTYLGYLLKGGKRWLTPARKATVMKIPTPTTPRQVREFLGTAGFCRLWIPGFASLAAPLYPLTRPKVPFTWTEAHQEAFGRIKEALLSAPALALPDLTKPFALYVDEKEGVARGVLTQTLGPWRRPVAYLSKKLDPVASGWPTCLKAIAAVALLLKDADKLTLGQNVLVIAPHNLESIVRQPPDRWMTNARMTHYQSLLLNERVSFAPPAILNPATLLPVESDDTPIHICSEILAEETGTRPDLRDQPLPGVPAWYTDGSSFIMDGRRQAGAAIVDNKRTVWASNLPEGTSAQKAELIALTQALRLAEGKSINIYTDSRYAFATAHVHGAIYKQRGWLTSAGKDIKNKEEILALLEAIHLPKRVAIIHCPGHQRGTDPVATGNRKADEAAKQAAQSTRILTETTKNAGKRTADGSEFEKRTADGSEFESPKKKAKVE

SEQ ID NO: 1618 - protein, 2127 aa, synthetic construct
MPAAKRVKLDGGDKKYSIGLDIGTNSVGWAVITDEYKVPSKKFKVLGNTDRHSIKKNLIGALLFDSGETAEATRLKRTARRRYTRRKNRICYLQEIFSNEMAKVDDSFFHRLEESFLVEEDKKHERHPIFGNIVDEVAYHEKYPTIYHLRKKLVDSTDKADLRLIYLALAHMIKFRGHFLIEGDLNPDNSDVDKLFIQLVQTYNQLFEENPINASGVDAKAILSARLSKSRRLENLIAQLPGEKKNGLFGNLIALSLGLTPNFKSNFDLAEDAKLQLSKDTYDDDLDNLLAQIGDQYADLFLAAKNLSDAILLSDILRVNTEITKAPLSASMIKRYDEHHQDLTLLKALVRQQLPEKYKEIFFDQSKNGYAGYIDGGASQEEFYKFIKPILEKMDGTEELLVKLNREDLLRKQRTFDNGSIPHQIHLGELHAILRRQEDFYPFLKDNREKIEKILTFRIPYYVGPLARGNSRFAWMTRKSEETITPWNFEEVVDKGASAQSFIERMTNFDKNLPNEKVLPKHSLLYEYFTVYNELTKVKYVTEGMRKPAFLSGEQKKAIVDLLFKTNRKVTVKQLKEDYFKKIECFDSVEISGVEDRFNASLGTYHDLLKIIKDKDFLDNEENEDILEDIVLTLTLFEDREMIEERLKTYAHLFDDKVMKQLKRRRYTGWGRLSRKLINGIRDKQSGKTILDFLKSDGFANRNFMQLIHDDSLTFKEDIQKAQVSGQGDSLHEHIANLAGSPAIKKGILQTVKVVDELVKVMGRHKPENIVIEMARENQTTQKGQKNSRERMKRIEEGIKELGSQILKEHPVENTQLQNEKLYLYYLQNGRDMYVDQELDINRLSDYDVDHIVPQSFLKDDSIDNKVLTRSDKARGKSDNVPSEEVVKKMKNYWRQLLNAKLITQRKFDNLTKAERGGLSELDKAGFIKRQLVETRQITKHVAQILDSRMNTKYDENDKLIREVKVITLKSKLVSDFRKDFQFYKVREINNYHHAHDAYLNAVVGTALIKKYPKLESEFVYGDYKVYDVRKMIAKSEQEIGKATAKYFFYSNIMNFFKTEITLANGEIRKRPLIETNGETGEIVWDKGRDFATVRKVLSMPQVNIVKKTEVQTGGFSKESILPKRNSDKLIARKKDWDPKKYGGFDSPTVAYSVLVVAKVEKGKSKKLKSVKELLGITIMERSSFEKNPIDFLEAKGYKEVKKDLIIKLPKYSLFELENGRKRMLASAGELQKGNELALPSKYVNFLYLASHYEKLKGSPEDNEQKQLFVEQHKHYLDEIIEQISEFSKRVILADANLDKVLSAYNKHRDKPIREQAENIIHLFTLTNLGAPAAFKYFDTTIDRKRYTSTKEVLDATLIHQSITGLYETRIDLSQLGGDGGEAAAKPAPGSSGGLLGRDLLTKLKAQIQFSTEGPQVTWEDRPAMCLVLNLEEEYRLHEKPVPPSIDPSWLQLFPMVWAEKAGMGLANQVPPVVVELKSDASPVAVRQYPMSKEAREGIRPHIQRFLDLGILVPCQSPWNTPLLPVKKPGTNDYRPVQDLREVNKRVQDIHPTVPNPYNLLSSLPPSHTWYSVLDLKDAFFCLKLHPNSQPLFAFEWRDPEKGNTGQLTWTRLPQGFKNSPTLFNEALHRDLASFRALNPQVVMLQYVDDLLVAAPTYRDCKEGTRRLLQELSKLGYRVSAKKAQLCREEVTYLGYLLKGGKRWLTPARKATVMKIPTPTTPRQVREFLGTAGFCRLWIPGFASLAAPLYPLTRPKVPFTWTEAHQEAFGRIKEALLSAPALALPDLTKPFALYVDEKEGVARGVLTQTLGPWRRPVAYLSKKLDPVASGWPTCLKAIAAVALLLKDADKLTLGQNVLVIAPHNLESIVRQPPDRWMTNARMTHYQSLLLNERVSFAPPAILNPATLLPVESDDTPIHICSEILAEETGTRPDLRDQPLPGVPAWYTDGSSFIMDGRRQAGAAIVDNKRTVWASNLPEGTSAQKAELIALTQALRLAEGKSINIYTDSRYAFATAHVHGAIYKQRGWLTSAGKDIKNKEEILALLEAIHLPKRVAIIHCPGHQRGTDPVATGNRKADEAAKQAAQSTRILTETTKNAGKRTADGSEFEKRTADGSEFESPKKKAKVE

SEQ ID NO: 1619 - protein, 2127 aa, synthetic construct
MPAAKRVKLDGGDKKYSIGLDIGTNSVGWAVITDEYKVPSKKFKVLGNTDRHSIKKNLIGALLFDSGETAEATRLKRTARRRYTRRKNRICYLQEIFSNEMAKVDDSFFHRLEESFLVEEDKKHERHPIFGNIVDEVAYHEKYPTIYHLRKKLVDSTDKADLRLIYLALAHMIKFRGHFLIEGDLNPDNSDVDKLFIQLVQTYNQLFEENPINASGVDAKAILSARLSKSRRLENLIAQLPGEKKNGLFGNLIALSLGLTPNFKSNFDLAEDAKLQLSKDTYDDDLDNLLAQIGDQYADLFLAAKNLSDAILLSDILRVNTEITKAPLSASMIKRYDEHHQDLTLLKALVRQQLPEKYKEIFFDQSKNGYAGYIDGGASQEEFYKFIKPILEKMDGTEELLVKLNREDLLRKQRTFDNGSIPHQIHLGELHAILRRQEDFYPFLKDNREKIEKILTFRIPYYVGPLARGNSRFAWMTRKSEETITPWNFEEVVDKGASAQSFIERMTNFDKNLPNEKVLPKHSLLYEYFTVYNELTKVKYVTEGMRKPAFLSGEQKKAIVDLLFKTNRKVTVKQLKEDYFKKIECFDSVEISGVEDRFNASLGTYHDLLKIIKDKDFLDNEENEDILEDIVLTLTLFEDREMIEERLKTYAHLFDDKVMKQLKRRRYTGWGRLSRKLINGIRDKQSGKTILDFLKSDGFANRNFMQLIHDDSLTFKEDIQKAQVSGQGDSLHEHIANLAGSPAIKKGILQTVKVVDELVKVMGRHKPENIVIEMARENQTTQKGQKNSRERMKRIEEGIKELGSQILKEHPVENTQLQNEKLYLYYLQNGRDMYVDQELDINRLSDYDVDHIVPQSFLKDDSIDNKVLTRSDKARGKSDNVPSEEVVKKMKNYWRQLLNAKLITQRKFDNLTKAERGGLSELDKAGFIKRQLVETRQITKHVAQILDSRMNTKYDENDKLIREVKVITLKSKLVSDFRKDFQFYKVREINNYHHAHDAYLNAVVGTALIKKYPKLESEFVYGDYKVYDVRKMIAKSEQEIGKATAKYFFYSNIMNFFKTEITLANGEIRKRPLIETNGETGEIVWDKGRDFATVRKVLSMPQVNIVKKTEVQTGGFSKESILPKRNSDKLIARKKDWDPKKYGGFDSPTVAYSVLVVAKVEKGKSKKLKSVKELLGITIMERSSFEKNPIDFLEAKGYKEVKKDLIIKLPKYSLFELENGRKRMLASAGELQKGNELALPSKYVNFLYLASHYEKLKGSPEDNEQKQLFVEQHKHYLDEIIEQISEFSKRVILADANLDKVLSAYNKHRDKPIREQAENIIHLFTLTNLGAPAAFKYFDTTIDRKRYTSTKEVLDATLIHQSITGLYETRIDLSQLGGDGGPAPAPAPAPAPGGLLGRDLLTKLKAQIQFSTEGPQVTWEDRPAMCLVLNLEEEYRLHEKPVPPSIDPSWLQLFPMVWAEKAGMGLANQVPPVVVELKSDASPVAVRQYPMSKEAREGIRPHIQRFLDLGILVPCQSPWNTPLLPVKKPGTNDYRPVQDLREVNKRVQDIHPTVPNPYNLLSSLPPSHTWYSVLDLKDAFFCLKLHPNSQPLFAFEWRDPEKGNTGQLTWTRLPQGFKNSPTLFNEALHRDLASFRALNPQVVMLQYVDDLLVAAPTYRDCKEGTRRLLQELSKLGYRVSAKKAQLCREEVTYLGYLLKGGKRWLTPARKATVMKIPTPTTPRQVREFLGTAGFCRLWIPGFASLAAPLYPLTRPKVPFTWTEAHQEAFGRIKEALLSAPALALPDLTKPFALYVDEKEGVARGVLTQTLGPWRRPVAYLSKKLDPVASGWPTCLKAIAAVALLLKDADKLTLGQNVLVIAPHNLESIVRQPPDRWMTNARMTHYQSLLLNERVSFAPPAILNPATLLPVESDDTPIHICSEILAEETGTRPDLRDQPLPGVPAWYTDGSSFIMDGRRQAGAAIVDNKRTVWASNLPEGTSAQKAELIALTQALRLAEGKSINIYTDSRYAFATAHVHGAIYKQRGWLTSAGKDIKNKEEILALLEAIHLPKRVAIIHCPGHQRGTDPVATGNRKADEAAKQAAQSTRILTETTKNAGKRTADGSEFEKRTADGSEFESPKKKAKVE

SEQ ID NO: 1620 - protein, 2127 aa, synthetic construct
MPAAKRVKLDGGDKKYSIGLDIGTNSVGWAVITDEYKVPSKKFKVLGNTDRHSIKKNLIGALLFDSGETAEATRLKRTARRRYTRRKNRICYLQEIFSNEMAKVDDSFFHRLEESFLVEEDKKHERHPIFGNIVDEVAYHEKYPTIYHLRKKLVDSTDKADLRLIYLALAHMIKFRGHFLIEGDLNPDNSDVDKLFIQLVQTYNQLFEENPINASGVDAKAILSARLSKSRRLENLIAQLPGEKKNGLFGNLIALSLGLTPNFKSNFDLAEDAKLQLSKDTYDDDLDNLLAQIGDQYADLFLAAKNLSDAILLSDILRVNTEITKAPLSASMIKRYDEHHQDLTLLKALVRQQLPEKYKEIFFDQSKNGYAGYIDGGASQEEFYKFIKPILEKMDGTEELLVKLNREDLLRKQRTFDNGSIPHQIHLGELHAILRRQEDFYPFLKDNREKIEKILTFRIPYYVGPLARGNSRFAWMTRKSEETITPWNFEEVVDKGASAQSFIERMTNFDKNLPNEKVLPKHSLLYEYFTVYNELTKVKYVTEGMRKPAFLSGEQKKAIVDLLFKTNRKVTVKQLKEDYFKKIECFDSVEISGVEDRFNASLGTYHDLLKIIKDKDFLDNEENEDILEDIVLTLTLFEDREMIEERLKTYAHLFDDKVMKQLKRRRYTGWGRLSRKLINGIRDKQSGKTILDFLKSDGFANRNFMQLIHDDSLTFKEDIQKAQVSGQGDSLHEHIANLAGSPAIKKGILQTVKVVDELVKVMGRHKPENIVIEMARENQTTQKGQKNSRERMKRIEEGIKELGSQILKEHPVENTQLQNEKLYLYYLQNGRDMYVDQELDINRLSDYDVDHIVPQSFLKDDSIDNKVLTRSDKARGKSDNVPSEEVVKKMKNYWRQLLNAKLITQRKFDNLTKAERGGLSELDKAGFIKRQLVETRQITKHVAQILDSRMNTKYDENDKLIREVKVITLKSKLVSDFRKDFQFYKVREINNYHHAHDAYLNAVVGTALIKKYPKLESEFVYGDYKVYDVRKMIAKSEQEIGKATAKYFFYSNIMNFFKTEITLANGEIRKRPLIETNGETGEIVWDKGRDFATVRKVLSMPQVNIVKKTEVQTGGFSKESILPKRNSDKLIARKKDWDPKKYGGFDSPTVAYSVLVVAKVEKGKSKKLKSVKELLGITIMERSSFEKNPIDFLEAKGYKEVKKDLIIKLPKYSLFELENGRKRMLASAGELQKGNELALPSKYVNFLYLASHYEKLKGSPEDNEQKQLFVEQHKHYLDEIIEQISEFSKRVILADANLDKVLSAYNKHRDKPIREQAENIIHLFTLTNLGAPAAFKYFDTTIDRKRYTSTKEVLDATLIHQSITGLYETRIDLSQLGGDGGGGSPAPEAAAKGGLLGRDLLTKLKAQIQFSTEGPQVTWEDRPAMCLVLNLEEEYRLHEKPVPPSIDPSWLQLFPMVWAEKAGMGLANQVPPVVVELKSDASPVAVRQYPMSKEAREGIRPHIQRFLDLGILVPCQSPWNTPLLPVKKPGTNDYRPVQDLREVNKRVQDIHPTVPNPYNLLSSLPPSHTWYSVLDLKDAFFCLKLHPNSQPLFAFEWRDPEKGNTGQLTWTRLPQGFKNSPTLFNEALHRDLASFRALNPQVVMLQYVDDLLVAAPTYRDCKEGTRRLLQELSKLGYRVSAKKAQLCREEVTYLGYLLKGGKRWLTPARKATVMKIPTPTTPRQVREFLGTAGFCRLWIPGFASLAAPLYPLTRPKVPFTWTEAHQEAFGRIKEALLSAPALALPDLTKPFALYVDEKEGVARGVLTQTLGPWRRPVAYLSKKLDPVASGWPTCLKAIAAVALLLKDADKLTLGQNVLVIAPHNLESIVRQPPDRWMTNARMTHYQSLLLNERVSFAPPAILNPATLLPVESDDTPIHICSEILAEETGTRPDLRDQPLPGVPAWYTDGSSFIMDGRRQAGAAIVDNKRTVWASNLPEGTSAQKAELIALTQALRLAEGKSINIYTDSRYAFATAHVHGAIYKQRGWLTSAGKDIKNKEEILALLEAIHLPKRVAIIHCPGHQRGTDPVATGNRKADEAAKQAAQSTRILTETTKNAGKRTADGSEFEKRTADGSEFESPKKKAKVE

SEQ ID NO: 1621 - protein, 2146 aa, synthetic construct
MPAAKRVKLDGGDKKYSIGLDIGTNSVGWAVITDEYKVPSKKFKVLGNTDRHSIKKNLIGALLFDSGETAEATRLKRTARRRYTRRKNRICYLQEIFSNEMAKVDDSFFHRLEESFLVEEDKKHERHPIFGNIVDEVAYHEKYPTIYHLRKKLVDSTDKADLRLIYLALAHMIKFRGHFLIEGDLNPDNSDVDKLFIQLVQTYNQLFEENPINASGVDAKAILSARLSKSRRLENLIAQLPGEKKNGLFGNLIALSLGLTPNFKSNFDLAEDAKLQLSKDTYDDDLDNLLAQIGDQYADLFLAAKNLSDAILLSDILRVNTEITKAPLSASMIKRYDEHHQDLTLLKALVRQQLPEKYKEIFFDQSKNGYAGYIDGGASQEEFYKFIKPILEKMDGTEELLVKLNREDLLRKQRTFDNGSIPHQIHLGELHAILRRQEDFYPFLKDNREKIEKILTFRIPYYVGPLARGNSRFAWMTRKSEETITPWNFEEVVDKGASAQSFIERMTNFDKNLPNEKVLPKHSLLYEYFTVYNELTKVKYVTEGMRKPAFLSGEQKKAIVDLLFKTNRKVTVKQLKEDYFKKIECFDSVEISGVEDRFNASLGTYHDLLKIIKDKDFLDNEENEDILEDIVLTLTLFEDREMIEERLKTYAHLFDDKVMKQLKRRRYTGWGRLSRKLINGIRDKQSGKTILDFLKSDGFANRNFMQLIHDDSLTFKEDIQKAQVSGQGDSLHEHIANLAGSPAIKKGILQTVKVVDELVKVMGRHKPENIVIEMARENQTTQKGQKNSRERMKRIEEGIKELGSQILKEHPVENTQLQNEKLYLYYLQNGRDMYVDQELDINRLSDYDVDHIVPQSFLKDDSIDNKVLTRSDKARGKSDNVPSEEVVKKMKNYWRQLLNAKLITQRKFDNLTKAERGGLSELDKAGFIKRQLVETRQITKHVAQILDSRMNTKYDENDKLIREVKVITLKSKLVSDFRKDFQFYKVREINNYHHAHDAYLNAVVGTALIKKYPKLESEFVYGDYKVYDVRKMIAKSEQEIGKATAKYFFYSNIMNFFKTEITLANGEIRKRPLIETNGETGEIVWDKGRDFATVRKVLSMPQVNIVKKTEVQTGGFSKESILPKRNSDKLIARKKDWDPKKYGGFDSPTVAYSVLVVAKVEKGKSKKLKSVKELLGITIMERSSFEKNPIDFLEAKGYKEVKKDLIIKLPKYSLFELENGRKRMLASAGELQKGNELALPSKYVNFLYLASHYEKLKGSPEDNEQKQLFVEQHKHYLDEIIEQISEFSKRVILADANLDKVLSAYNKHRDKPIREQAENIIHLFTLTNLGAPAAFKYFDTTIDRKRYTSTKEVLDATLIHQSITGLYETRIDLSQLGGDGGEAAAKEAAAKEAAAKEAAAKEAAAKEAAAKGGLLGRDLLTKLKAQIQFSTEGPQVTWEDRPAMCLVLNLEEEYRLHEKPVPPSIDPSWLQLFPMVWAEKAGMGLANQVPPVVVELKSDASPVAVRQYPMSKEAREGIRPHIQRFLDLGILVPCQSPWNTPLLPVKKPGTNDYRPVQDLREVNKRVQDIHPTVPNPYNLLSSLPPSHTWYSVLDLKDAFFCLKLHPNSQPLFAFEWRDPEKGNTGQLTWTRLPQGFKNSPTLFNEALHRDLASFRALNPQVVMLQYVDDLLVAAPTYRDCKEGTRRLLQELSKLGYRVSAKKAQLCREEVTYLGYLLKGGKRWLTPARKATVMKIPTPTTPRQVREFLGTAGFCRLWIPGFASLAAPLYPLTRPKVPFTWTEAHQEAFGRIKEALLSAPALALPDLTKPFALYVDEKEGVARGVLTQTLGPWRRPVAYLSKKLDPVASGWPTCLKAIAAVALLLKDADKLTLGQNVLVIAPHNLESIVRQPPDRWMTNARMTHYQSLLLNERVSFAPPAILNPATLLPVESDDTPIHICSEILAEETGTRPDLRDQPLPGVPAWYTDGSSFIMDGRRQAGAAIVDNKRTVWASNLPEGTSAQKAELIALTQALRLAEGKSINIYTDSRYAFATAHVHGAIYKQRGWLTSAGKDIKNKEEILALLEAIHLPKRVAIIHCPGHQRGTDPVATGNRKADEAAKQAAQSTRILTETTKNAGKRTADGSEFEKRTADGSEFESPKKKAKVE

SEQ ID NO: 1622 - protein, 2162 aa, synthetic construct
MPAAKRVKLDGGDKKYSIGLDIGTNSVGWAVITDEYKVPSKKFKVLGNTDRHSIKKNLIGALLFDSGETAEATRLKRTARRRYTRRKNRICYLQEIFSNEMAKVDDSFFHRLEESFLVEEDKKHERHPIFGNIVDEVAYHEKYPTIYHLRKKLVDSTDKADLRLIYLALAHMIKFRGHFLIEGDLNPDNSDVDKLFIQLVQTYNQLFEENPINASGVDAKAILSARLSKSRRLENLIAQLPGEKKNGLFGNLIALSLGLTPNFKSNFDLAEDAKLQLSKDTYDDDLDNLLAQIGDQYADLFLAAKNLSDAILLSDILRVNTEITKAPLSASMIKRYDEHHQDLTLLKALVRQQLPEKYKEIFFDQSKNGYAGYIDGGASQEEFYKFIKPILEKMDGTEELLVKLNREDLLRKQRTFDNGSIPHQIHLGELHAILRRQEDFYPFLKDNREKIEKILTFRIPYYVGPLARGNSRFAWMTRKSEETITPWNFEEVVDKGASAQSFIERMTNFDKNLPNEKVLPKHSLLYEYFTVYNELTKVKYVTEGMRKPAFLSGEQKKAIVDLLFKTNRKVTVKQLKEDYFKKIECFDSVEISGVEDRFNASLGTYHDLLKIIKDKDFLDNEENEDILEDIVLTLTLFEDREMIEERLKTYAHLFDDKVMKQLKRRRYTGWGRLSRKLINGIRDKQSGKTILDFLKSDGFANRNFMQLIHDDSLTFKEDIQKAQVSGQGDSLHEHIANLAGSPAIKKGILQTVKVVDELVKVMGRHKPENIVIEMARENQTTQKGQKNSRERMKRIEEGIKELGSQILKEHPVENTQLQNEKLYLYYLQNGRDMYVDQELDINRLSDYDVDHIVPQSFLKDDSIDNKVLTRSDKARGKSDNVPSEEVVKKMKNYWRQLLNAKLITQRKFDNLTKAERGGLSELDKAGFIKRQLVETRQITKHVAQILDSRMNTKYDENDKLIREVKVITLKSKLVSDFRKDFQFYKVREINNYHHAHDAYLNAVVGTALIKKYPKLESEFVYGDYKVYDVRKMIAKSEQEIGKATAKYFFYSNIMNFFKTEITLANGEIRKRPLIETNGETGEIVWDKGRDFATVRKVLSMPQVNIVKKTEVQTGGFSKESILPKRNSDKLIARKKDWDPKKYGGFDSPTVAYSVLVVAKVEKGKSKKLKSVKELLGITIMERSSFEKNPIDFLEAKGYKEVKKDLIIKLPKYSLFELENGRKRMLASAGELQKGNELALPSKYVNFLYLASHYEKLKGSPEDNEQKQLFVEQHKHYLDEIIEQISEFSKRVILADANLDKVLSAYNKHRDKPIREQAENIIHLFTLTNLGAPAAFKYFDTTIDRKRYTSTKEVLDATLIHQSITGLYETRIDLSQLGGDGGAEAAAKEAAAKEAAAKEAAAKALEAEAAAKEAAAKEAAAKEAAAKAGGLLGRDLLTKLKAQIQFSTEGPQVTWEDRPAMCLVLNLEEEYRLHEKPVPPSIDPSWLQLFPMVWAEKAGMGLANQVPPVVVELKSDASPVAVRQYPMSKEAREGIRPHIQRFLDLGILVPCQSPWNTPLLPVKKPGTNDYRPVQDLREVNKRVQDIHPTVPNPYNLLSSLPPSHTWYSVLDLKDAFFCLKLHPNSQPLFAFEWRDPEKGNTGQLTWTRLPQGFKNSPTLFNEALHRDLASFRALNPQVVMLQYVDDLLVAAPTYRDCKEGTRRLLQELSKLGYRVSAKKAQLCREEVTYLGYLLKGGKRWLTPARKATVMKIPTPTTPRQVREFLGTAGFCRLWIPGFASLAAPLYPLTRPKVPFTWTEAHQEAFGRIKEALLSAPALALPDLTKPFALYVDEKEGVARGVLTQTLGPWRRPVAYLSKKLDPVASGWPTCLKAIAAVALLLKDADKLTLGQNVLVIAPHNLESIVRQPPDRWMTNARMTHYQSLLLNERVSFAPPAILNPATLLPVESDDTPIHICSEILAEETGTRPDLRDQPLPGVPAWYTDGSSFIMDGRRQAGAAIVDNKRTVWASNLPEGTSAQKAELIALTQALRLAEGKSINIYTDSRYAFATAHVHGAIYKQRGWLTSAGKDIKNKEEILALLEAIHLPKRVAIIHCPGHQRGTDPVATGNRKADEAAKQAAQSTRILTETTKNAGKRTADGSEFEKRTADGSEFESPKKKAKVE

SEQ ID NO: 1623 - protein, 2127 aa, synthetic construct
MPAAKRVKLDGGDKKYSIGLDIGTNSVGWAVITDEYKVPSKKFKVLGNTDRHSIKKNLIGALLFDSGETAEATRLKRTARRRYTRRKNRICYLQEIFSNEMAKVDDSFFHRLEESFLVEEDKKHERHPIFGNIVDEVAYHEKYPTIYHLRKKLVDSTDKADLRLIYLALAHMIKFRGHFLIEGDLNPDNSDVDKLFIQLVQTYNQLFEENPINASGVDAKAILSARLSKSRRLENLIAQLPGEKKNGLFGNLIALSLGLTPNFKSNFDLAEDAKLQLSKDTYDDDLDNLLAQIGDQYADLFLAAKNLSDAILLSDILRVNTEITKAPLSASMIKRYDEHHQDLTLLKALVRQQLPEKYKEIFFDQSKNGYAGYIDGGASQEEFYKFIKPILEKMDGTEELLVKLNREDLLRKQRTFDNGSIPHQIHLGELHAILRRQEDFYPFLKDNREKIEKILTFRIPYYVGPLARGNSRFAWMTRKSEETITPWNFEEVVDKGASAQSFIERMTNFDKNLPNEKVLPKHSLLYEYFTVYNELTKVKYVTEGMRKPAFLSGEQKKAIVDLLFKTNRKVTVKQLKEDYFKKIECFDSVEISGVEDRFNASLGTYHDLLKIIKDKDFLDNEENEDILEDIVLTLTLFEDREMIEERLKTYAHLFDDKVMKQLKRRRYTGWGRLSRKLINGIRDKQSGKTILDFLKSDGFANRNFMQLIHDDSLTFKEDIQKAQVSGQGDSLHEHIANLAGSPAIKKGILQTVKVVDELVKVMGRHKPENIVIEMARENQTTQKGQKNSRERMKRIEEGIKELGSQILKEHPVENTQLQNEKLYLYYLQNGRDMYVDQELDINRLSDYDVDHIVPQSFLKDDSIDNKVLTRSDKARGKSDNVPSEEVVKKMKNYWRQLLNAKLITQRKFDNLTKAERGGLSELDKAGFIKRQLVETRQITKHVAQILDSRMNTKYDENDKLIREVKVITLKSKLVSDFRKDFQFYKVREINNYHHAHDAYLNAVVGTALIKKYPKLESEFVYGDYKVYDVRKMIAKSEQEIGKATAKYFFYSNIMNFFKTEITLANGEIRKRPLIETNGETGEIVWDKGRDFATVRKVLSMPQVNIVKKTEVQTGGFSKESILPKRNSDKLIARKKDWDPKKYGGFDSPTVAYSVLVVAKVEKGKSKKLKSVKELLGITIMERSSFEKNPIDFLEAKGYKEVKKDLIIKLPKYSLFELENGRKRMLASAGELQKGNELALPSKYVNFLYLASHYEKLKGSPEDNEQKQLFVEQHKHYLDEIIEQISEFSKRVILADANLDKVLSAYNKHRDKPIREQAENIIHLFTLTNLGAPAAFKYFDTTIDRKRYTSTKEVLDATLIHQSITGLYETRIDLSQLGGDGGGSSEAAAKGGSGGLLGRDLLTKLKAQIQFSTEGPQVTWEDRPAMCLVLNLEEEYRLHEKPVPPSIDPSWLQLFPMVWAEKAGMGLANQVPPVVVELKSDASPVAVRQYPMSKEAREGIRPHIQRFLDLGILVPCQSPWNTPLLPVKKPGTNDYRPVQDLREVNKRVQDIHPTVPNPYNLLSSLPPSHTWYSVLDLKDAFFCLKLHPNSQPLFAFEWRDPEKGNTGQLTWTRLPQGFKNSPTLFNEALHRDLASFRALNPQVVMLQYVDDLLVAAPTYRDCKEGTRRLLQELSKLGYRVSAKKAQLCREEVTYLGYLLKGGKRWLTPARKATVMKIPTPTTPRQVREFLGTAGFCRLWIPGFASLAAPLYPLTRPKVPFTWTEAHQEAFGRIKEALLSAPALALPDLTKPFALYVDEKEGVARGVLTQTLGPWRRPVAYLSKKLDPVASGWPTCLKAIAAVALLLKDADKLTLGQNVLVIAPHNLESIVRQPPDRWMTNARMTHYQSLLLNERVSFAPPAILNPATLLPVESDDTPIHICSEILAEETGTRPDLRDQPLPGVPAWYTDGSSFIMDGRRQAGAAIVDNKRTVWASNLPEGTSAQKAELIALTQALRLAEGKSINIYTDSRYAFATAHVHGAIYKQRGWLTSAGKDIKNKEEILALLEAIHLPKRVAIIHCPGHQRGTDPVATGNRKADEAAKQAAQSTRILTETTKNAGKRTADGSEFEKRTADGSEFESPKKKAKVE

SEQ ID NO: 1624 - protein, 2127 aa, synthetic construct
MPAAKRVKLDGGDKKYSIGLDIGTNSVGWAVITDEYKVPSKKFKVLGNTDRHSIKKNLIGALLFDSGETAEATRLKRTARRRYTRRKNRICYLQEIFSNEMAKVDDSFFHRLEESFLVEEDKKHERHPIFGNIVDEVAYHEKYPTIYHLRKKLVDSTDKADLRLIYLALAHMIKFRGHFLIEGDLNPDNSDVDKLFIQLVQTYNQLFEENPINASGVDAKAILSARLSKSRRLENLIAQLPGEKKNGLFGNLIALSLGLTPNFKSNFDLAEDAKLQLSKDTYDDDLDNLLAQIGDQYADLFLAAKNLSDAILLSDILRVNTEITKAPLSASMIKRYDEHHQDLTLLKALVRQQLPEKYKEIFFDQSKNGYAGYIDGGASQEEFYKFIKPILEKMDGTEELLVKLNREDLLRKQRTFDNGSIPHQIHLGELHAILRRQEDFYPFLKDNREKIEKILTFRIPYYVGPLARGNSRFAWMTRKSEETITPWNFEEVVDKGASAQSFIERMTNFDKNLPNEKVLPKHSLLYEYFTVYNELTKVKYVTEGMRKPAFLSGEQKKAIVDLLFKTNRKVTVKQLKEDYFKKIECFDSVEISGVEDRFNASLGTYHDLLKIIKDKDFLDNEENEDILEDIVLTLTLFEDREMIEERLKTYAHLFDDKVMKQLKRRRYTGWGRLSRKLINGIRDKQSGKTILDFLKSDGFANRNFMQLIHDDSLTFKEDIQKAQVSGQGDSLHEHIANLAGSPAIKKGILQTVKVVDELVKVMGRHKPENIVIEMARENQTTQKGQKNSRERMKRIEEGIKELGSQILKEHPVENTQLQNEKLYLYYLQNGRDMYVDQELDINRLSDYDVDHIVPQSFLKDDSIDNKVLTRSDKARGKSDNVPSEEVVKKMKNYWRQLLNAKLITQRKFDNLTKAERGGLSELDKAGFIKRQLVETRQITKHVAQILDSRMNTKYDENDKLIREVKVITLKSKLVSDFRKDFQFYKVREINNYHHAHDAYLNAVVGTALIKKYPKLESEFVYGDYKVYDVRKMIAKSEQEIGKATAKYFFYSNIMNFFKTEITLANGEIRKRPLIETNGETGEIVWDKGRDFATVRKVLSMPQVNIVKKTEVQTGGFSKESILPKRNSDKLIARKKDWDPKKYGGFDSPTVAYSVLVVAKVEKGKSKKLKSVKELLGITIMERSSFEKNPIDFLEAKGYKEVKKDLIIKLPKYSLFELENGRKRMLASAGELQKGNELALPSKYVNFLYLASHYEKLKGSPEDNEQKQLFVEQHKHYLDEIIEQISEFSKRVILADANLDKVLSAYNKHRDKPIREQAENIIHLFTLTNLGAPAAFKYFDTTIDRKRYTSTKEVLDATLIHQSITGLYETRIDLSQLGGDGGEAAAKGSSPAPGGLLGRDLLTKLKAQIQFSTEGPQVTWEDRPAMCLVLNLEEEYRLHEKPVPPSIDPSWLQLFPMVWAEKAGMGLANQVPPVVVELKSDASPVAVRQYPMSKEAREGIRPHIQRFLDLGILVPCQSPWNTPLLPVKKPGTNDYRPVQDLREVNKRVQDIHPTVPNPYNLLSSLPPSHTWYSVLDLKDAFFCLKLHPNSQPLFAFEWRDPEKGNTGQLTWTRLPQGFKNSPTLFNEALHRDLASFRALNPQVVMLQYVDDLLVAAPTYRDCKEGTRRLLQELSKLGYRVSAKKAQLCREEVTYLGYLLKGGKRWLTPARKATVMKIPTPTTPRQVREFLGTAGFCRLWIPGFASLAAPLYPLTRPKVPFTWTEAHQEAFGRIKEALLSAPALALPDLTKPFALYVDEKEGVARGVLTQTLGPWRRPVAYLSKKLDPVASGWPTCLKAIAAVALLLKDADKLTLGQNVLVIAPHNLESIVRQPPDRWMTNARMTHYQSLLLNERVSFAPPAILNPATLLPVESDDTPIHICSEILAEETGTRPDLRDQPLPGVPAWYTDGSSFIMDGRRQAGAAIVDNKRTVWASNLPEGTSAQKAELIALTQALRLAEGKSINIYTDSRYAFATAHVHGAIYKQRGWLTSAGKDIKNKEEILALLEAIHLPKRVAIIHCPGHQRGTDPVATGNRKADEAAKQAAQSTRILTETTKNAGKRTADGSEFEKRTADGSEFESPKKKAKVE

SEQ ID NO: 1625 - protein, 2122 aa, synthetic construct
MPAAKRVKLDGGDKKYSIGLDIGTNSVGWAVITDEYKVPSKKFKVLGNTDRHSIKKNLIGALLFDSGETAEATRLKRTARRRYTRRKNRICYLQEIFSNEMAKVDDSFFHRLEESFLVEEDKKHERHPIFGNIVDEVAYHEKYPTIYHLRKKLVDSTDKADLRLIYLALAHMIKFRGHFLIEGDLNPDNSDVDKLFIQLVQTYNQLFEENPINASGVDAKAILSARLSKSRRLENLIAQLPGEKKNGLFGNLIALSLGLTPNFKSNFDLAEDAKLQLSKDTYDDDLDNLLAQIGDQYADLFLAAKNLSDAILLSDILRVNTEITKAPLSASMIKRYDEHHQDLTLLKALVRQQLPEKYKEIFFDQSKNGYAGYIDGGASQEEFYKFIKPILEKMDGTEELLVKLNREDLLRKQRTFDNGSIPHQIHLGELHAILRRQEDFYPFLKDNREKIEKILTFRIPYYVGPLARGNSRFAWMTRKSEETITPWNFEEVVDKGASAQSFIERMTNFDKNLPNEKVLPKHSLLYEYFTVYNELTKVKYVTEGMRKPAFLSGEQKKAIVDLLFKTNRKVTVKQLKEDYFKKIECFDSVEISGVEDRFNASLGTYHDLLKIIKDKDFLDNEENEDILEDIVLTLTLFEDREMIEERLKTYAHLFDDKVMKQLKRRRYTGWGRLSRKLINGIRDKQSGKTILDFLKSDGFANRNFMQLIHDDSLTFKEDIQKAQVSGQGDSLHEHIANLAGSPAIKKGILQTVKVVDELVKVMGRHKPENIVIEMARENQTTQKGQKNSRERMKRIEEGIKELGSQILKEHPVENTQLQNEKLYLYYLQNGRDMYVDQELDINRLSDYDVDHIVPQSFLKDDSIDNKVLTRSDKARGKSDNVPSEEVVKKMKNYWRQLLNAKLITQRKFDNLTKAERGGLSELDKAGFIKRQLVETRQITKHVAQILDSRMNTKYDENDKLIREVKVITLKSKLVSDFRKDFQFYKVREINNYHHAHDAYLNAVVGTALIKKYPKLESEFVYGDYKVYDVRKMIAKSEQEIGKATAKYFFYSNIMNFFKTEITLANGEIRKRPLIETNGETGEIVWDKGRDFATVRKVLSMPQVNIVKKTEVQTGGFSKESILPKRNSDKLIARKKDWDPKKYGGFDSPTVAYSVLVVAKVEKGKSKKLKSVKELLGITIMERSSFEKNPIDFLEAKGYKEVKKDLIIKLPKYSLFELENGRKRMLASAGELQKGNELALPSKYVNFLYLASHYEKLKGSPEDNEQKQLFVEQHKHYLDEIIEQISEFSKRVILADANLDKVLSAYNKHRDKPIREQAENIIHLFTLTNLGAPAAFKYFDTTIDRKRYTSTKEVLDATLIHQSITGLYETRIDLSQLGGDGGGSSGSSGGLLGRDLLTKLKAQIQFSTEGPQVTWEDRPAMCLVLNLEEEYRLHEKPVPPSIDPSWLQLFPMVWAEKAGMGLANQVPPVVVELKSDASPVAVRQYPMSKEAREGIRPHIQRFLDLGILVPCQSPWNTPLLPVKKPGTNDYRPVQDLREVNKRVQDIHPTVPNPYNLLSSLPPSHTWYSVLDLKDAFFCLKLHPNSQPLFAFEWRDPEKGNTGQLTWTRLPQGFKNSPTLFNEALHRDLASFRALNPQVVMLQYVDDLLVAAPTYRDCKEGTRRLLQELSKLGYRVSAKKAQLCREEVTYLGYLLKGGKRWLTPARKATVMKIPTPTTPRQVREFLGTAGFCRLWIPGFASLAAPLYPLTRPKVPFTWTEAHQEAFGRIKEALLSAPALALPDLTKPFALYVDEKEGVARGVLTQTLGPWRRPVAYLSKKLDPVASGWPTCLKAIAAVALLLKDADKLTLGQNVLVIAPHNLESIVRQPPDRWMTNARMTHYQSLLLNERVSFAPPAILNPATLLPVESDDTPIHICSEILAEETGTRPDLRDQPLPGVPAWYTDGSSFIMDGRRQAGAAIVDNKRTVWASNLPEGTSAQKAELIALTQALRLAEGKSINIYTDSRYAFATAHVHGAIYKQRGWLTSAGKDIKNKEEILALLEAIHLPKRVAIIHCPGHQRGTDPVATGNRKADEAAKQAAQSTRILTETTKNAGKRTADGSEFEKRTADGSEFESPKKKAKVE

SEQ ID NO: 1626 - protein, 2122 aa, synthetic construct
MPAAKRVKLDGGDKKYSIGLDIGTNSVGWAVITDEYKVPSKKFKVLGNTDRHSIKKNLIGALLFDSGETAEATRLKRTARRRYTRRKNRICYLQEIFSNEMAKVDDSFFHRLEESFLVEEDKKHERHPIFGNIVDEVAYHEKYPTIYHLRKKLVDSTDKADLRLIYLALAHMIKFRGHFLIEGDLNPDNSDVDKLFIQLVQTYNQLFEENPINASGVDAKAILSARLSKSRRLENLIAQLPGEKKNGLFGNLIALSLGLTPNFKSNFDLAEDAKLQLSKDTYDDDLDNLLAQIGDQYADLFLAAKNLSDAILLSDILRVNTEITKAPLSASMIKRYDEHHQDLTLLKALVRQQLPEKYKEIFFDQSKNGYAGYIDGGASQEEFYKFIKPILEKMDGTEELLVKLNREDLLRKQRTFDNGSIPHQIHLGELHAILRRQEDFYPFLKDNREKIEKILTFRIPYYVGPLARGNSRFAWMTRKSEETITPWNFEEVVDKGASAQSFIERMTNFDKNLPNEKVLPKHSLLYEYFTVYNELTKVKYVTEGMRKPAFLSGEQKKAIVDLLFKTNRKVTVKQLKEDYFKKIECFDSVEISGVEDRFNASLGTYHDLLKIIKDKDFLDNEENEDILEDIVLTLTLFEDREMIEERLKTYAHLFDDKVMKQLKRRRYTGWGRLSRKLINGIRDKQSGKTILDFLKSDGFANRNFMQLIHDDSLTFKEDIQKAQVSGQGDSLHEHIANLAGSPAIKKGILQTVKVVDELVKVMGRHKPENIVIEMARENQTTQKGQKNSRERMKRIEEGIKELGSQILKEHPVENTQLQNEKLYLYYLQNGRDMYVDQELDINRLSDYDVDHIVPQSFLKDDSIDNKVLTRSDKARGKSDNVPSEEVVKKMKNYWRQLLNAKLITQRKFDNLTKAERGGLSELDKAGFIKRQLVETRQITKHVAQILDSRMNTKYDENDKLIREVKVITLKSKLVSDFRKDFQFYKVREINNYHHAHDAYLNAVVGTALIKKYPKLESEFVYGDYKVYDVRKMIAKSEQEIGKATAKYFFYSNIMNFFKTEITLANGEIRKRPLIETNGETGEIVWDKGRDFATVRKVLSMPQVNIVKKTEVQTGGFSKESILPKRNSDKLIARKKDWDPKKYGGFDSPTVAYSVLVVAKVEKGKSKKLKSVKELLGITIMERSSFEKNPIDFLEAKGYKEVKKDLIIKLPKYSLFELENGRKRMLASAGELQKGNELALPSKYVNFLYLASHYEKLKGSPEDNEQKQLFVEQHKHYLDEIIEQISEFSKRVILADANLDKVLSAYNKHRDKPIREQAENIIHLFTLTNLGAPAAFKYFDTTIDRKRYTSTKEVLDATLIHQSITGLYETRIDLSQLGGDGGGGSGGGGGLLGRDLLTKLKAQIQFSTEGPQVTWEDRPAMCLVLNLEEEYRLHEKPVPPSIDPSWLQLFPMVWAEKAGMGLANQVPPVVVELKSDASPVAVRQYPMSKEAREGIRPHIQRFLDLGILVPCQSPWNTPLLPVKKPGTNDYRPVQDLREVNKRVQDIHPTVPNPYNLLSSLPPSHTWYSVLDLKDAFFCLKLHPNSQPLFAFEWRDPEKGNTGQLTWTRLPQGFKNSPTLFNEALHRDLASFRALNPQVVMLQYVDDLLVAAPTYRDCKEGTRRLLQELSKLGYRVSAKKAQLCREEVTYLGYLLKGGKRWLTPARKATVMKIPTPTTPRQVREFLGTAGFCRLWIPGFASLAAPLYPLTRPKVPFTWTEAHQEAFGRIKEALLSAPALALPDLTKPFALYVDEKEGVARGVLTQTLGPWRRPVAYLSKKLDPVASGWPTCLKAIAAVALLLKDADKLTLGQNVLVIAPHNLESIVRQPPDRWMTNARMTHYQSLLLNERVSFAPPAILNPATLLPVESDDTPIHICSEILAEETGTRPDLRDQPLPGVPAWYTDGSSFIMDGRRQAGAAIVDNKRTVWASNLPEGTSAQKAELIALTQALRLAEGKSINIYTDSRYAFATAHVHGAIYKQRGWLTSAGKDIKNKEEILALLEAIHLPKRVAIIHCPGHQRGTDPVATGNRKADEAAKQAAQSTRILTETTKNAGKRTADGSEFEKRTADGSEFESPKKKAKVE

SEQ ID NO: 1627 - protein, 2122 aa, synthetic construct
MPAAKRVKLDGGDKKYSIGLDIGTNSVGWAVITDEYKVPSKKFKVLGNTDRHSIKKNLIGALLFDSGETAEATRLKRTARRRYTRRKNRICYLQEIFSNEMAKVDDSFFHRLEESFLVEEDKKHERHPIFGNIVDEVAYHEKYPTIYHLRKKLVDSTDKADLRLIYLALAHMIKFRGHFLIEGDLNPDNSDVDKLFIQLVQTYNQLFEENPINASGVDAKAILSARLSKSRRLENLIAQLPGEKKNGLFGNLIALSLGLTPNFKSNFDLAEDAKLQLSKDTYDDDLDNLLAQIGDQYADLFLAAKNLSDAILLSDILRVNTEITKAPLSASMIKRYDEHHQDLTLLKALVRQQLPEKYKEIFFDQSKNGYAGYIDGGASQEEFYKFIKPILEKMDGTEELLVKLNREDLLRKQRTFDNGSIPHQIHLGELHAILRRQEDFYPFLKDNREKIEKILTFRIPYYVGPLARGNSRFAWMTRKSEETITPWNFEEVVDKGASAQSFIERMTNFDKNLPNEKVLPKHSLLYEYFTVYNELTKVKYVTEGMRKPAFLSGEQKKAIVDLLFKTNRKVTVKQLKEDYFKKIECFDSVEISGVEDRFNASLGTYHDLLKIIKDKDFLDNEENEDILEDIVLTLTLFEDREMIEERLKTYAHLFDDKVMKQLKRRRYTGWGRLSRKLINGIRDKQSGKTILDFLKSDGFANRNFMQLIHDDSLTFKEDIQKAQVSGQGDSLHEHIANLAGSPAIKKGILQTVKVVDELVKVMGRHKPENIVIEMARENQTTQKGQKNSRERMKRIEEGIKELGSQILKEHPVENTQLQNEKLYLYYLQNGRDMYVDQELDINRLSDYDVDHIVPQSFLKDDSIDNKVLTRSDKARGKSDNVPSEEVVKKMKNYWRQLLNAKLITQRKFDNLTKAERGGLSELDKAGFIKRQLVETRQITKHVAQILDSRMNTKYDENDKLIREVKVITLKSKLVSDFRKDFQFYKVREINNYHHAHDAYLNAVVGTALIKKYPKLESEFVYGDYKVYDVRKMIAKSEQEIGKATAKYFFYSNIMNFFKTEITLANGEIRKRPLIETNGETGEIVWDKGRDFATVRKVLSMPQVNIVKKTEVQTGGFSKESILPKRNSDKLIARKKDWDPKKYGGFDSPTVAYSVLVVAKVEKGKSKKLKSVKELLGITIMERSSFEKNPIDFLEAKGYKEVKKDLIIKLPKYSLFELENGRKRMLASAGELQKGNELALPSKYVNFLYLASHYEKLKGSPEDNEQKQLFVEQHKHYLDEIIEQISEFSKRVILADANLDKVLSAYNKHRDKPIREQAENIIHLFTLTNLGAPAAFKYFDTTIDRKRYTSTKEVLDATLIHQSITGLYETRIDLSQLGGDGGPAPGSSGGLLGRDLLTKLKAQIQFSTEGPQVTWEDRPAMCLVLNLEEEYRLHEKPVPPSIDPSWLQLFPMVWAEKAGMGLANQVPPVVVELKSDASPVAVRQYPMSKEAREGIRPHIQRFLDLGILVPCQSPWNTPLLPVKKPGTNDYRPVQDLREVNKRVQDIHPTVPNPYNLLSSLPPSHTWYSVLDLKDAFFCLKLHPNSQPLFAFEWRDPEKGNTGQLTWTRLPQGFKNSPTLFNEALHRDLASFRALNPQVVMLQYVDDLLVAAPTYRDCKEGTRRLLQELSKLGYRVSAKKAQLCREEVTYLGYLLKGGKRWLTPARKATVMKIPTPTTPRQVREFLGTAGFCRLWIPGFASLAAPLYPLTRPKVPFTWTEAHQEAFGRIKEALLSAPALALPDLTKPFALYVDEKEGVARGVLTQTLGPWRRPVAYLSKKLDPVASGWPTCLKAIAAVALLLKDADKLTLGQNVLVIAPHNLESIVRQPPDRWMTNARMTHYQSLLLNERVSFAPPAILNPATLLPVESDDTPIHICSEILAEETGTRPDLRDQPLPGVPAWYTDGSSFIMDGRRQAGAAIVDNKRTVWASNLPEGTSAQKAELIALTQALRLAEGKSINIYTDSRYAFATAHVHGAIYKQRGWLTSAGKDIKNKEEILALLEAIHLPKRVAIIHCPGHQRGTDPVATGNRKADEAAKQAAQSTRILTETTKNAGKRTADGSEFEKRTADGSEFESPKKKAKVE

SEQ ID NO: 1628 - protein, 2122 aa, synthetic construct
MPAAKRVKLDGGDKKYSIGLDIGTNSVGWAVITDEYKVPSKKFKVLGNTDRHSIKKNLIGALLFDSGETAEATRLKRTARRRYTRRKNRICYLQEIFSNEMAKVDDSFFHRLEESFLVEEDKKHERHPIFGNIVDEVAYHEKYPTIYHLRKKLVDSTDKADLRLIYLALAHMIKFRGHFLIEGDLNPDNSDVDKLFIQLVQTYNQLFEENPINASGVDAKAILSARLSKSRRLENLIAQLPGEKKNGLFGNLIALSLGLTPNFKSNFDLAEDAKLQLSKDTYDDDLDNLLAQIGDQYADLFLAAKNLSDAILLSDILRVNTEITKAPLSASMIKRYDEHHQDLTLLKALVRQQLPEKYKEIFFDQSKNGYAGYIDGGASQEEFYKFIKPILEKMDGTEELLVKLNREDLLRKQRTFDNGSIPHQIHLGELHAILRRQEDFYPFLKDNREKIEKILTFRIPYYVGPLARGNSRFAWMTRKSEETITPWNFEEVVDKGASAQSFIERMTNFDKNLPNEKVLPKHSLLYEYFTVYNELTKVKYVTEGMRKPAFLSGEQKKAIVDLLFKTNRKVTVKQLKEDYFKKIECFDSVEISGVEDRFNASLGTYHDLLKIIKDKDFLDNEENEDILEDIVLTLTLFEDREMIEERLKTYAHLFDDKVMKQLKRRRYTGWGRLSRKLINGIRDKQSGKTILDFLKSDGFANRNFMQLIHDDSLTFKEDIQKAQVSGQGDSLHEHIANLAGSPAIKKGILQTVKVVDELVKVMGRHKPENIVIEMARENQTTQKGQKNSRERMKRIEEGIKELGSQILKEHPVENTQLQNEKLYLYYLQNGRDMYVDQELDINRLSDYDVDHIVPQSFLKDDSIDNKVLTRSDKARGKSDNVPSEEVVKKMKNYWRQLLNAKLITQRKFDNLTKAERGGLSELDKAGFIKRQLVETRQITKHVAQILDSRMNTKYDENDKLIREVKVITLKSKLVSDFRKDFQFYKVREINNYHHAHDAYLNAVVGTALIKKYPKLESEFVYGDYKVYDVRKMIAKSEQEIGKATAKYFFYSNIMNFFKTEITLANGEIRKRPLIETNGETGEIVWDKGRDFATVRKVLSMPQVNIVKKTEVQTGGFSKESILPKRNSDKLIARKKDWDPKKYGGFDSPTVAYSVLVVAKVEKGKSKKLKSVKELLGITIMERSSFEKNPIDFLEAKGYKEVKKDLIIKLPKYSLFELENGRKRMLASAGELQKGNELALPSKYVNFLYLASHYEKLKGSPEDNEQKQLFVEQHKHYLDEIIEQISEFSKRVILADANLDKVLSAYNKHRDKPIREQAENIIHLFTLTNLGAPAAFKYFDTTIDRKRYTSTKEVLDATLIHQSITGLYETRIDLSQLGGDGGGGGGGGGGLLGRDLLTKLKAQIQFSTEGPQVTWEDRPAMCLVLNLEEEYRLHEKPVPPSIDPSWLQLFPMVWAEKAGMGLANQVPPVVVELKSDASPVAVRQYPMSKEAREGIRPHIQRFLDLGILVPCQSPWNTPLLPVKKPGTNDYRPVQDLREVNKRVQDIHPTVPNPYNLLSSLPPSHTWYSVLDLKDAFFCLKLHPNSQPLFAFEWRDPEKGNTGQLTWTRLPQGFKNSPTLFNEALHRDLASFRALNPQVVMLQYVDDLLVAAPTYRDCKEGTRRLLQELSKLGYRVSAKKAQLCREEVTYLGYLLKGGKRWLTPARKATVMKIPTPTTPRQVREFLGTAGFCRLWIPGFASLAAPLYPLTRPKVPFTWTEAHQEAFGRIKEALLSAPALALPDLTKPFALYVDEKEGVARGVLTQTLGPWRRPVAYLSKKLDPVASGWPTCLKAIAAVALLLKDADKLTLGQNVLVIAPHNLESIVRQPPDRWMTNARMTHYQSLLLNERVSFAPPAILNPATLLPVESDDTPIHICSEILAEETGTRPDLRDQPLPGVPAWYTDGSSFIMDGRRQAGAAIVDNKRTVWASNLPEGTSAQKAELIALTQALRLAEGKSINIYTDSRYAFATAHVHGAIYKQRGWLTSAGKDIKNKEEILALLEAIHLPKRVAIIHCPGHQRGTDPVATGNRKADEAAKQAAQSTRILTETTKNAGKRTADGSEFEKRTADGSEFESPKKKAKVE

SEQ ID NO: 1629 - protein, 2124 aa, synthetic construct
MPAAKRVKLDGGDKKYSIGLDIGTNSVGWAVITDEYKVPSKKFKVLGNTDRHSIKKNLIGALLFDSGETAEATRLKRTARRRYTRRKNRICYLQEIFSNEMAKVDDSFFHRLEESFLVEEDKKHERHPIFGNIVDEVAYHEKYPTIYHLRKKLVDSTDKADLRLIYLALAHMIKFRGHFLIEGDLNPDNSDVDKLFIQLVQTYNQLFEENPINASGVDAKAILSARLSKSRRLENLIAQLPGEKKNGLFGNLIALSLGLTPNFKSNFDLAEDAKLQLSKDTYDDDLDNLLAQIGDQYADLFLAAKNLSDAILLSDILRVNTEITKAPLSASMIKRYDEHHQDLTLLKALVRQQLPEKYKEIFFDQSKNGYAGYIDGGASQEEFYKFIKPILEKMDGTEELLVKLNREDLLRKQRTFDNGSIPHQIHLGELHAILRRQEDFYPFLKDNREKIEKILTFRIPYYVGPLARGNSRFAWMTRKSEETITPWNFEEVVDKGASAQSFIERMTNFDKNLPNEKVLPKHSLLYEYFTVYNELTKVKYVTEGMRKPAFLSGEQKKAIVDLLFKTNRKVTVKQLKEDYFKKIECFDSVEISGVEDRFNASLGTYHDLLKIIKDKDFLDNEENEDILEDIVLTLTLFEDREMIEERLKTYAHLFDDKVMKQLKRRRYTGWGRLSRKLINGIRDKQSGKTILDFLKSDGFANRNFMQLIHDDSLTFKEDIQKAQVSGQGDSLHEHIANLAGSPAIKKGILQTVKVVDELVKVMGRHKPENIVIEMARENQTTQKGQKNSRERMKRIEEGIKELGSQILKEHPVENTQLQNEKLYLYYLQNGRDMYVDQELDINRLSDYDVDHIVPQSFLKDDSIDNKVLTRSDKARGKSDNVPSEEVVKKMKNYWRQLLNAKLITQRKFDNLTKAERGGLSELDKAGFIKRQLVETRQITKHVAQILDSRMNTKYDENDKLIREVKVITLKSKLVSDFRKDFQFYKVREINNYHHAHDAYLNAVVGTALIKKYPKLESEFVYGDYKVYDVRKMIAKSEQEIGKATAKYFFYSNIMNFFKTEITLANGEIRKRPLIETNGETGEIVWDKGRDFATVRKVLSMPQVNIVKKTEVQTGGFSKESILPKRNSDKLIARKKDWDPKKYGGFDSPTVAYSVLVVAKVEKGKSKKLKSVKELLGITIMERSSFEKNPIDFLEAKGYKEVKKDLIIKLPKYSLFELENGRKRMLASAGELQKGNELALPSKYVNFLYLASHYEKLKGSPEDNEQKQLFVEQHKHYLDEIIEQISEFSKRVILADANLDKVLSAYNKHRDKPIREQAENIIHLFTLTNLGAPAAFKYFDTTIDRKRYTSTKEVLDATLIHQSITGLYETRIDLSQLGGDGGGGGEAAAKGGLLGRDLLTKLKAQIQFSTEGPQVTWEDRPAMCLVLNLEEEYRLHEKPVPPSIDPSWLQLFPMVWAEKAGMGLANQVPPVVVELKSDASPVAVRQYPMSKEAREGIRPHIQRFLDLGILVPCQSPWNTPLLPVKKPGTNDYRPVQDLREVNKRVQDIHPTVPNPYNLLSSLPPSHTWYSVLDLKDAFFCLKLHPNSQPLFAFEWRDPEKGNTGQLTWTRLPQGFKNSPTLFNEALHRDLASFRALNPQVVMLQYVDDLLVAAPTYRDCKEGTRRLLQELSKLGYRVSAKKAQLCREEVTYLGYLLKGGKRWLTPARKATVMKIPTPTTPRQVREFLGTAGFCRLWIPGFASLAAPLYPLTRPKVPFTWTEAHQEAFGRIKEALLSAPALALPDLTKPFALYVDEKEGVARGVLTQTLGPWRRPVAYLSKKLDPVASGWPTCLKAIAAVALLLKDADKLTLGQNVLVIAPHNLESIVRQPPDRWMTNARMTHYQSLLLNERVSFAPPAILNPATLLPVESDDTPIHICSEILAEETGTRPDLRDQPLPGVPAWYTDGSSFIMDGRRQAGAAIVDNKRTVWASNLPEGTSAQKAELIALTQALRLAEGKSINIYTDSRYAFATAHVHGAIYKQRGWLTSAGKDIKNKEEILALLEAIHLPKRVAIIHCPGHQRGTDPVATGNRKADEAAKQAAQSTRILTETTKNAGKRTADGSEFEKRTADGSEFESPKKKAKVE

SEQ ID NO: 1630 - protein, 2124 aa, synthetic construct
MPAAKRVKLDGGDKKYSIGLDIGTNSVGWAVITDEYKVPSKKFKVLGNTDRHSIKKNLIGALLFDSGETAEATRLKRTARRRYTRRKNRICYLQEIFSNEMAKVDDSFFHRLEESFLVEEDKKHERHPIFGNIVDEVAYHEKYPTIYHLRKKLVDSTDKADLRLIYLALAHMIKFRGHFLIEGDLNPDNSDVDKLFIQLVQTYNQLFEENPINASGVDAKAILSARLSKSRRLENLIAQLPGEKKNGLFGNLIALSLGLTPNFKSNFDLAEDAKLQLSKDTYDDDLDNLLAQIGDQYADLFLAAKNLSDAILLSDILRVNTEITKAPLSASMIKRYDEHHQDLTLLKALVRQQLPEKYKEIFFDQSKNGYAGYIDGGASQEEFYKFIKPILEKMDGTEELLVKLNREDLLRKQRTFDNGSIPHQIHLGELHAILRRQEDFYPFLKDNREKIEKILTFRIPYYVGPLARGNSRFAWMTRKSEETITPWNFEEVVDKGASAQSFIERMTNFDKNLPNEKVLPKHSLLYEYFTVYNELTKVKYVTEGMRKPAFLSGEQKKAIVDLLFKTNRKVTVKQLKEDYFKKIECFDSVEISGVEDRFNASLGTYHDLLKIIKDKDFLDNEENEDILEDIVLTLTLFEDREMIEERLKTYAHLFDDKVMKQLKRRRYTGWGRLSRKLINGIRDKQSGKTILDFLKSDGFANRNFMQLIHDDSLTFKEDIQKAQVSGQGDSLHEHIANLAGSPAIKKGILQTVKVVDELVKVMGRHKPENIVIEMARENQTTQKGQKNSRERMKRIEEGIKELGSQILKEHPVENTQLQNEKLYLYYLQNGRDMYVDQELDINRLSDYDVDHIVPQSFLKDDSIDNKVLTRSDKARGKSDNVPSEEVVKKMKNYWRQLLNAKLITQRKFDNLTKAERGGLSELDKAGFIKRQLVETRQITKHVAQILDSRMNTKYDENDKLIREVKVITLKSKLVSDFRKDFQFYKVREINNYHHAHDAYLNAVVGTALIKKYPKLESEFVYGDYKVYDVRKMIAKSEQEIGKATAKYFFYSNIMNFFKTEITLANGEIRKRPLIETNGETGEIVWDKGRDFATVRKVLSMPQVNIVKKTEVQTGGFSKESILPKRNSDKLIARKKDWDPKKYGGFDSPTVAYSVLVVAKVEKGKSKKLKSVKELLGITIMERSSFEKNPIDFLEAKGYKEVKKDLIIKLPKYSLFELENGRKRMLASAGELQKGNELALPSKYVNFLYLASHYEKLKGSPEDNEQKQLFVEQHKHYLDEIIEQISEFSKRVILADANLDKVLSAYNKHRDKPIREQAENIIHLFTLTNLGAPAAFKYFDTTIDRKRYTSTKEVLDATLIHQSITGLYETRIDLSQLGGDGGEAAAKGSSGGLLGRDLLTKLKAQIQFSTEGPQVTWEDRPAMCLVLNLEEEYRLHEKPVPPSIDPSWLQLFPMVWAEKAGMGLANQVPPVVVELKSDASPVAVRQYPMSKEAREGIRPHIQRFLDLGILVPCQSPWNTPLLPVKKPGTNDYRPVQDLREVNKRVQDIHPTVPNPYNLLSSLPPSHTWYSVLDLKDAFFCLKLHPNSQPLFAFEWRDPEKGNTGQLTWTRLPQGFKNSPTLFNEALHRDLASFRALNPQVVMLQYVDDLLVAAPTYRDCKEGTRRLLQELSKLGYRVSAKKAQLCREEVTYLGYLLKGGKRWLTPARKATVMKIPTPTTPRQVREFLGTAGFCRLWIPGFASLAAPLYPLTRPKVPFTWTEAHQEAFGRIKEALLSAPALALPDLTKPFALYVDEKEGVARGVLTQTLGPWRRPVAYLSKKLDPVASGWPTCLKAIAAVALLLKDADKLTLGQNVLVIAPHNLESIVRQPPDRWMTNARMTHYQSLLLNERVSFAPPAILNPATLLPVESDDTPIHICSEILAEETGTRPDLRDQPLPGVPAWYTDGSSFIMDGRRQAGAAIVDNKRTVWASNLPEGTSAQKAELIALTQALRLAEGKSINIYTDSRYAFATAHVHGAIYKQRGWLTSAGKDIKNKEEILALLEAIHLPKRVAIIHCPGHQRGTDPVATGNRKADEAAKQAAQSTRILTETTKNAGKRTADGSEFEKRTADGSEFESPKKKAKVE

SEQ ID NO: 1631 - protein, 2119 aa, synthetic construct
MPAAKRVKLDGGDKKYSIGLDIGTNSVGWAVITDEYKVPSKKFKVLGNTDRHSIKKNLIGALLFDSGETAEATRLKRTARRRYTRRKNRICYLQEIFSNEMAKVDDSFFHRLEESFLVEEDKKHERHPIFGNIVDEVAYHEKYPTIYHLRKKLVDSTDKADLRLIYLALAHMIKFRGHFLIEGDLNPDNSDVDKLFIQLVQTYNQLFEENPINASGVDAKAILSARLSKSRRLENLIAQLPGEKKNGLFGNLIALSLGLTPNFKSNFDLAEDAKLQLSKDTYDDDLDNLLAQIGDQYADLFLAAKNLSDAILLSDILRVNTEITKAPLSASMIKRYDEHHQDLTLLKALVRQQLPEKYKEIFFDQSKNGYAGYIDGGASQEEFYKFIKPILEKMDGTEELLVKLNREDLLRKQRTFDNGSIPHQIHLGELHAILRRQEDFYPFLKDNREKIEKILTFRIPYYVGPLARGNSRFAWMTRKSEETITPWNFEEVVDKGASAQSFIERMTNFDKNLPNEKVLPKHSLLYEYFTVYNELTKVKYVTEGMRKPAFLSGEQKKAIVDLLFKTNRKVTVKQLKEDYFKKIECFDSVEISGVEDRFNASLGTYHDLLKIIKDKDFLDNEENEDILEDIVLTLTLFEDREMIEERLKTYAHLFDDKVMKQLKRRRYTGWGRLSRKLINGIRDKQSGKTILDFLKSDGFANRNFMQLIHDDSLTFKEDIQKAQVSGQGDSLHEHIANLAGSPAIKKGILQTVKVVDELVKVMGRHKPENIVIEMARENQTTQKGQKNSRERMKRIEEGIKELGSQILKEHPVENTQLQNEKLYLYYLQNGRDMYVDQELDINRLSDYDVDHIVPQSFLKDDSIDNKVLTRSDKARGKSDNVPSEEVVKKMKNYWRQLLNAKLITQRKFDNLTKAERGGLSELDKAGFIKRQLVETRQITKHVAQILDSRMNTKYDENDKLIREVKVITLKSKLVSDFRKDFQFYKVREINNYHHAHDAYLNAVVGTALIKKYPKLESEFVYGDYKVYDVRKMIAKSEQEIGKATAKYFFYSNIMNFFKTEITLANGEIRKRPLIETNGETGEIVWDKGRDFATVRKVLSMPQVNIVKKTEVQTGGFSKESILPKRNSDKLIARKKDWDPKKYGGFDSPTVAYSVLVVAKVEKGKSKKLKSVKELLGITIMERSSFEKNPIDFLEAKGYKEVKKDLIIKLPKYSLFELENGRKRMLASAGELQKGNELALPSKYVNFLYLASHYEKLKGSPEDNEQKQLFVEQHKHYLDEIIEQISEFSKRVILADANLDKVLSAYNKHRDKPIREQAENIIHLFTLTNLGAPAAFKYFDTTIDRKRYTSTKEVLDATLIHQSITGLYETRIDLSQLGGDGGPAPGGLLGRDLLTKLKAQIQFSTEGPQVTWEDRPAMCLVLNLEEEYRLHEKPVPPSIDPSWLQLFPMVWAEKAGMGLANQVPPVVVELKSDASPVAVRQYPMSKEAREGIRPHIQRFLDLGILVPCQSPWNTPLLPVKKPGTNDYRPVQDLREVNKRVQDIHPTVPNPYNLLSSLPPSHTWYSVLDLKDAFFCLKLHPNSQPLFAFEWRDPEKGNTGQLTWTRLPQGFKNSPTLFNEALHRDLASFRALNPQVVMLQYVDDLLVAAPTYRDCKEGTRRLLQELSKLGYRVSAKKAQLCREEVTYLGYLLKGGKRWLTPARKATVMKIPTPTTPRQVREFLGTAGFCRLWIPGFASLAAPLYPLTRPKVPFTWTEAHQEAFGRIKEALLSAPALALPDLTKPFALYVDEKEGVARGVLTQTLGPWRRPVAYLSKKLDPVASGWPTCLKAIAAVALLLKDADKLTLGQNVLVIAPHNLESIVRQPPDRWMTNARMTHYQSLLLNERVSFAPPAILNPATLLPVESDDTPIHICSEILAEETGTRPDLRDQPLPGVPAWYTDGSSFIMDGRRQAGAAIVDNKRTVWASNLPEGTSAQKAELIALTQALRLAEGKSINIYTDSRYAFATAHVHGAIYKQRGWLTSAGKDIKNKEEILALLEAIHLPKRVAIIHCPGHQRGTDPVATGNRKADEAAKQAAQSTRILTETTKNAGKRTADGSEFEKRTADGSEFESPKKKAKVE

SEQ ID NO: 1632 - protein, 2141 aa, synthetic construct
MPAAKRVKLDGGDKKYSIGLDIGTNSVGWAVITDEYKVPSKKFKVLGNTDRHSIKKNLIGALLFDSGETAEATRLKRTARRRYTRRKNRICYLQEIFSNEMAKVDDSFFHRLEESFLVEEDKKHERHPIFGNIVDEVAYHEKYPTIYHLRKKLVDSTDKADLRLIYLALAHMIKFRGHFLIEGDLNPDNSDVDKLFIQLVQTYNQLFEENPINASGVDAKAILSARLSKSRRLENLIAQLPGEKKNGLFGNLIALSLGLTPNFKSNFDLAEDAKLQLSKDTYDDDLDNLLAQIGDQYADLFLAAKNLSDAILLSDILRVNTEITKAPLSASMIKRYDEHHQDLTLLKALVRQQLPEKYKEIFFDQSKNGYAGYIDGGASQEEFYKFIKPILEKMDGTEELLVKLNREDLLRKQRTFDNGSIPHQIHLGELHAILRRQEDFYPFLKDNREKIEKILTFRIPYYVGPLARGNSRFAWMTRKSEETITPWNFEEVVDKGASAQSFIERMTNFDKNLPNEKVLPKHSLLYEYFTVYNELTKVKYVTEGMRKPAFLSGEQKKAIVDLLFKTNRKVTVKQLKEDYFKKIECFDSVEISGVEDRFNASLGTYHDLLKIIKDKDFLDNEENEDILEDIVLTLTLFEDREMIEERLKTYAHLFDDKVMKQLKRRRYTGWGRLSRKLINGIRDKQSGKTILDFLKSDGFANRNFMQLIHDDSLTFKEDIQKAQVSGQGDSLHEHIANLAGSPAIKKGILQTVKVVDELVKVMGRHKPENIVIEMARENQTTQKGQKNSRERMKRIEEGIKELGSQILKEHPVENTQLQNEKLYLYYLQNGRDMYVDQELDINRLSDYDVDHIVPQSFLKDDSIDNKVLTRSDKARGKSDNVPSEEVVKKMKNYWRQLLNAKLITQRKFDNLTKAERGGLSELDKAGFIKRQLVETRQITKHVAQILDSRMNTKYDENDKLIREVKVITLKSKLVSDFRKDFQFYKVREINNYHHAHDAYLNAVVGTALIKKYPKLESEFVYGDYKVYDVRKMIAKSEQEIGKATAKYFFYSNIMNFFKTEITLANGEIRKRPLIETNGETGEIVWDKGRDFATVRKVLSMPQVNIVKKTEVQTGGFSKESILPKRNSDKLIARKKDWDPKKYGGFDSPTVAYSVLVVAKVEKGKSKKLKSVKELLGITIMERSSFEKNPIDFLEAKGYKEVKKDLIIKLPKYSLFELENGRKRMLASAGELQKGNELALPSKYVNFLYLASHYEKLKGSPEDNEQKQLFVEQHKHYLDEIIEQISEFSKRVILADANLDKVLSAYNKHRDKPIREQAENIIHLFTLTNLGAPAAFKYFDTTIDRKRYTSTKEVLDATLIHQSITGLYETRIDLSQLGGDGGEAAAKEAAAKEAAAKEAAAKEAAAKGGLLGRDLLTKLKAQIQFSTEGPQVTWEDRPAMCLVLNLEEEYRLHEKPVPPSIDPSWLQLFPMVWAEKAGMGLANQVPPVVVELKSDASPVAVRQYPMSKEAREGIRPHIQRFLDLGILVPCQSPWNTPLLPVKKPGTNDYRPVQDLREVNKRVQDIHPTVPNPYNLLSSLPPSHTWYSVLDLKDAFFCLKLHPNSQPLFAFEWRDPEKGNTGQLTWTRLPQGFKNSPTLFNEALHRDLASFRALNPQVVMLQYVDDLLVAAPTYRDCKEGTRRLLQELSKLGYRVSAKKAQLCREEVTYLGYLLKGGKRWLTPARKATVMKIPTPTTPRQVREFLGTAGFCRLWIPGFASLAAPLYPLTRPKVPFTWTEAHQEAFGRIKEALLSAPALALPDLTKPFALYVDEKEGVARGVLTQTLGPWRRPVAYLSKKLDPVASGWPTCLKAIAAVALLLKDADKLTLGQNVLVIAPHNLESIVRQPPDRWMTNARMTHYQSLLLNERVSFAPPAILNPATLLPVESDDTPIHICSEILAEETGTRPDLRDQPLPGVPAWYTDGSSFIMDGRRQAGAAIVDNKRTVWASNLPEGTSAQKAELIALTQALRLAEGKSINIYTDSRYAFATAHVHGAIYKQRGWLTSAGKDIKNKEEILALLEAIHLPKRVAIIHCPGHQRGTDPVATGNRKADEAAKQAAQSTRILTETTKNAGKRTADGSEFEKRTADGSEFESPKKKAKVE

SEQ ID NO: 1633 - protein, 2122 aa, synthetic construct
MPAAKRVKLDGGDKKYSIGLDIGTNSVGWAVITDEYKVPSKKFKVLGNTDRHSIKKNLIGALLFDSGETAEATRLKRTARRRYTRRKNRICYLQEIFSNEMAKVDDSFFHRLEESFLVEEDKKHERHPIFGNIVDEVAYHEKYPTIYHLRKKLVDSTDKADLRLIYLALAHMIKFRGHFLIEGDLNPDNSDVDKLFIQLVQTYNQLFEENPINASGVDAKAILSARLSKSRRLENLIAQLPGEKKNGLFGNLIALSLGLTPNFKSNFDLAEDAKLQLSKDTYDDDLDNLLAQIGDQYADLFLAAKNLSDAILLSDILRVNTEITKAPLSASMIKRYDEHHQDLTLLKALVRQQLPEKYKEIFFDQSKNGYAGYIDGGASQEEFYKFIKPILEKMDGTEELLVKLNREDLLRKQRTFDNGSIPHQIHLGELHAILRRQEDFYPFLKDNREKIEKILTFRIPYYVGPLARGNSRFAWMTRKSEETITPWNFEEVVDKGASAQSFIERMTNFDKNLPNEKVLPKHSLLYEYFTVYNELTKVKYVTEGMRKPAFLSGEQKKAIVDLLFKTNRKVTVKQLKEDYFKKIECFDSVEISGVEDRFNASLGTYHDLLKIIKDKDFLDNEENEDILEDIVLTLTLFEDREMIEERLKTYAHLFDDKVMKQLKRRRYTGWGRLSRKLINGIRDKQSGKTILDFLKSDGFANRNFMQLIHDDSLTFKEDIQKAQVSGQGDSLHEHIANLAGSPAIKKGILQTVKVVDELVKVMGRHKPENIVIEMARENQTTQKGQKNSRERMKRIEEGIKELGSQILKEHPVENTQLQNEKLYLYYLQNGRDMYVDQELDINRLSDYDVDHIVPQSFLKDDSIDNKVLTRSDKARGKSDNVPSEEVVKKMKNYWRQLLNAKLITQRKFDNLTKAERGGLSELDKAGFIKRQLVETRQITKHVAQILDSRMNTKYDENDKLIREVKVITLKSKLVSDFRKDFQFYKVREINNYHHAHDAYLNAVVGTALIKKYPKLESEFVYGDYKVYDVRKMIAKSEQEIGKATAKYFFYSNIMNFFKTEITLANGEIRKRPLIETNGETGEIVWDKGRDFATVRKVLSMPQVNIVKKTEVQTGGFSKESILPKRNSDKLIARKKDWDPKKYGGFDSPTVAYSVLVVAKVEKGKSKKLKSVKELLGITIMERSSFEKNPIDFLEAKGYKEVKKDLIIKLPKYSLFELENGRKRMLASAGELQKGNELALPSKYVNFLYLASHYEKLKGSPEDNEQKQLFVEQHKHYLDEIIEQISEFSKRVILADANLDKVLSAYNKHRDKPIREQAENIIHLFTLTNLGAPAAFKYFDTTIDRKRYTSTKEVLDATLIHQSITGLYETRIDLSQLGGDGGGGGPAPGGLLGRDLLTKLKAQIQFSTEGPQVTWEDRPAMCLVLNLEEEYRLHEKPVPPSIDPSWLQLFPMVWAEKAGMGLANQVPPVVVELKSDASPVAVRQYPMSKEAREGIRPHIQRFLDLGILVPCQSPWNTPLLPVKKPGTNDYRPVQDLREVNKRVQDIHPTVPNPYNLLSSLPPSHTWYSVLDLKDAFFCLKLHPNSQPLFAFEWRDPEKGNTGQLTWTRLPQGFKNSPTLFNEALHRDLASFRALNPQVVMLQYVDDLLVAAPTYRDCKEGTRRLLQELSKLGYRVSAKKAQLCREEVTYLGYLLKGGKRWLTPARKATVMKIPTPTTPRQVREFLGTAGFCRLWIPGFASLAAPLYPLTRPKVPFTWTEAHQEAFGRIKEALLSAPALALPDLTKPFALYVDEKEGVARGVLTQTLGPWRRPVAYLSKKLDPVASGWPTCLKAIAAVALLLKDADKLTLGQNVLVIAPHNLESIVRQPPDRWMTNARMTHYQSLLLNERVSFAPPAILNPATLLPVESDDTPIHICSEILAEETGTRPDLRDQPLPGVPAWYTDGSSFIMDGRRQAGAAIVDNKRTVWASNLPEGTSAQKAELIALTQALRLAEGKSINIYTDSRYAFATAHVHGAIYKQRGWLTSAGKDIKNKEEILALLEAIHLPKRVAIIHCPGHQRGTDPVATGNRKADEAAKQAAQSTRILTETTKNAGKRTADGSEFEKRTADGSEFESPKKKAKVE

SEQ ID NO: 1634 - protein, 2127 aa, synthetic construct
MPAAKRVKLDGGDKKYSIGLDIGTNSVGWAVITDEYKVPSKKFKVLGNTDRHSIKKNLIGALLFDSGETAEATRLKRTARRRYTRRKNRICYLQEIFSNEMAKVDDSFFHRLEESFLVEEDKKHERHPIFGNIVDEVAYHEKYPTIYHLRKKLVDSTDKADLRLIYLALAHMIKFRGHFLIEGDLNPDNSDVDKLFIQLVQTYNQLFEENPINASGVDAKAILSARLSKSRRLENLIAQLPGEKKNGLFGNLIALSLGLTPNFKSNFDLAEDAKLQLSKDTYDDDLDNLLAQIGDQYADLFLAAKNLSDAILLSDILRVNTEITKAPLSASMIKRYDEHHQDLTLLKALVRQQLPEKYKEIFFDQSKNGYAGYIDGGASQEEFYKFIKPILEKMDGTEELLVKLNREDLLRKQRTFDNGSIPHQIHLGELHAILRRQEDFYPFLKDNREKIEKILTFRIPYYVGPLARGNSRFAWMTRKSEETITPWNFEEVVDKGASAQSFIERMTNFDKNLPNEKVLPKHSLLYEYFTVYNELTKVKYVTEGMRKPAFLSGEQKKAIVDLLFKTNRKVTVKQLKEDYFKKIECFDSVEISGVEDRFNASLGTYHDLLKIIKDKDFLDNEENEDILEDIVLTLTLFEDREMIEERLKTYAHLFDDKVMKQLKRRRYTGWGRLSRKLINGIRDKQSGKTILDFLKSDGFANRNFMQLIHDDSLTFKEDIQKAQVSGQGDSLHEHIANLAGSPAIKKGILQTVKVVDELVKVMGRHKPENIVIEMARENQTTQKGQKNSRERMKRIEEGIKELGSQILKEHPVENTQLQNEKLYLYYLQNGRDMYVDQELDINRLSDYDVDHIVPQSFLKDDSIDNKVLTRSDKARGKSDNVPSEEVVKKMKNYWRQLLNAKLITQRKFDNLTKAERGGLSELDKAGFIKRQLVETRQITKHVAQILDSRMNTKYDENDKLIREVKVITLKSKLVSDFRKDFQFYKVREINNYHHAHDAYLNAVVGTALIKKYPKLESEFVYGDYKVYDVRKMIAKSEQEIGKATAKYFFYSNIMNFFKTEITLANGEIRKRPLIETNGETGEIVWDKGRDFATVRKVLSMPQVNIVKKTEVQTGGFSKESILPKRNSDKLIARKKDWDPKKYGGFDSPTVAYSVLVVAKVEKGKSKKLKSVKELLGITIMERSSFEKNPIDFLEAKGYKEVKKDLIIKLPKYSLFELENGRKRMLASAGELQKGNELALPSKYVNFLYLASHYEKLKGSPEDNEQKQLFVEQHKHYLDEIIEQISEFSKRVILADANLDKVLSAYNKHRDKPIREQAENIIHLFTLTNLGAPAAFKYFDTTIDRKRYTSTKEVLDATLIHQSITGLYETRIDLSQLGGDGGGSSEAAAKGGGGGLLGRDLLTKLKAQIQFSTEGPQVTWEDRPAMCLVLNLEEEYRLHEKPVPPSIDPSWLQLFPMVWAEKAGMGLANQVPPVVVELKSDASPVAVRQYPMSKEAREGIRPHIQRFLDLGILVPCQSPWNTPLLPVKKPGTNDYRPVQDLREVNKRVQDIHPTVPNPYNLLSSLPPSHTWYSVLDLKDAFFCLKLHPNSQPLFAFEWRDPEKGNTGQLTWTRLPQGFKNSPTLFNEALHRDLASFRALNPQVVMLQYVDDLLVAAPTYRDCKEGTRRLLQELSKLGYRVSAKKAQLCREEVTYLGYLLKGGKRWLTPARKATVMKIPTPTTPRQVREFLGTAGFCRLWIPGFASLAAPLYPLTRPKVPFTWTEAHQEAFGRIKEALLSAPALALPDLTKPFALYVDEKEGVARGVLTQTLGPWRRPVAYLSKKLDPVASGWPTCLKAIAAVALLLKDADKLTLGQNVLVIAPHNLESIVRQPPDRWMTNARMTHYQSLLLNERVSFAPPAILNPATLLPVESDDTPIHICSEILAEETGTRPDLRDQPLPGVPAWYTDGSSFIMDGRRQAGAAIVDNKRTVWASNLPEGTSAQKAELIALTQALRLAEGKSINIYTDSRYAFATAHVHGAIYKQRGWLTSAGKDIKNKEEILALLEAIHLPKRVAIIHCPGHQRGTDPVATGNRKADEAAKQAAQSTRILTETTKNAGKRTADGSEFEKRTADGSEFESPKKKAKVE

SEQ ID NO: 1635 - protein, 2131 aa, synthetic construct
MPAAKRVKLDGGDKKYSIGLDIGTNSVGWAVITDEYKVPSKKFKVLGNTDRHSIKKNLIGALLFDSGETAEATRLKRTARRRYTRRKNRICYLQEIFSNEMAKVDDSFFHRLEESFLVEEDKKHERHPIFGNIVDEVAYHEKYPTIYHLRKKLVDSTDKADLRLIYLALAHMIKFRGHFLIEGDLNPDNSDVDKLFIQLVQTYNQLFEENPINASGVDAKAILSARLSKSRRLENLIAQLPGEKKNGLFGNLIALSLGLTPNFKSNFDLAEDAKLQLSKDTYDDDLDNLLAQIGDQYADLFLAAKNLSDAILLSDILRVNTEITKAPLSASMIKRYDEHHQDLTLLKALVRQQLPEKYKEIFFDQSKNGYAGYIDGGASQEEFYKFIKPILEKMDGTEELLVKLNREDLLRKQRTFDNGSIPHQIHLGELHAILRRQEDFYPFLKDNREKIEKILTFRIPYYVGPLARGNSRFAWMTRKSEETITPWNFEEVVDKGASAQSFIERMTNFDKNLPNEKVLPKHSLLYEYFTVYNELTKVKYVTEGMRKPAFLSGEQKKAIVDLLFKTNRKVTVKQLKEDYFKKIECFDSVEISGVEDRFNASLGTYHDLLKIIKDKDFLDNEENEDILEDIVLTLTLFEDREMIEERLKTYAHLFDDKVMKQLKRRRYTGWGRLSRKLINGIRDKQSGKTILDFLKSDGFANRNFMQLIHDDSLTFKEDIQKAQVSGQGDSLHEHIANLAGSPAIKKGILQTVKVVDELVKVMGRHKPENIVIEMARENQTTQKGQKNSRERMKRIEEGIKELGSQILKEHPVENTQLQNEKLYLYYLQNGRDMYVDQELDINRLSDYDVDHIVPQSFLKDDSIDNKVLTRSDKARGKSDNVPSEEVVKKMKNYWRQLLNAKLITQRKFDNLTKAERGGLSELDKAGFIKRQLVETRQITKHVAQILDSRMNTKYDENDKLIREVKVITLKSKLVSDFRKDFQFYKVREINNYHHAHDAYLNAVVGTALIKKYPKLESEFVYGDYKVYDVRKMIAKSEQEIGKATAKYFFYSNIMNFFKTEITLANGEIRKRPLIETNGETGEIVWDKGRDFATVRKVLSMPQVNIVKKTEVQTGGFSKESILPKRNSDKLIARKKDWDPKKYGGFDSPTVAYSVLVVAKVEKGKSKKLKSVKELLGITIMERSSFEKNPIDFLEAKGYKEVKKDLIIKLPKYSLFELENGRKRMLASAGELQKGNELALPSKYVNFLYLASHYEKLKGSPEDNEQKQLFVEQHKHYLDEIIEQISEFSKRVILADANLDKVLSAYNKHRDKPIREQAENIIHLFTLTNLGAPAAFKYFDTTIDRKRYTSTKEVLDATLIHQSITGLYETRIDLSQLGGDGGGGGGSEAAAKGGGGSGGLLGRDLLTKLKAQIQFSTEGPQVTWEDRPAMCLVLNLEEEYRLHEKPVPPSIDPSWLQLFPMVWAEKAGMGLANQVPPVVVELKSDASPVAVRQYPMSKEAREGIRPHIQRFLDLGILVPCQSPWNTPLLPVKKPGTNDYRPVQDLREVNKRVQDIHPTVPNPYNLLSSLPPSHTWYSVLDLKDAFFCLKLHPNSQPLFAFEWRDPEKGNTGQLTWTRLPQGFKNSPTLFNEALHRDLASFRALNPQVVMLQYVDDLLVAAPTYRDCKEGTRRLLQELSKLGYRVSAKKAQLCREEVTYLGYLLKGGKRWLTPARKATVMKIPTPTTPRQVREFLGTAGFCRLWIPGFASLAAPLYPLTRPKVPFTWTEAHQEAFGRIKEALLSAPALALPDLTKPFALYVDEKEGVARGVLTQTLGPWRRPVAYLSKKLDPVASGWPTCLKAIAAVALLLKDADKLTLGQNVLVIAPHNLESIVRQPPDRWMTNARMTHYQSLLLNERVSFAPPAILNPATLLPVESDDTPIHICSEILAEETGTRPDLRDQPLPGVPAWYTDGSSFIMDGRRQAGAAIVDNKRTVWASNLPEGTSAQKAELIALTQALRLAEGKSINIYTDSRYAFATAHVHGAIYKQRGWLTSAGKDIKNKEEILALLEAIHLPKRVAIIHCPGHQRGTDPVATGNRKADEAAKQAAQSTRILTETTKNAGKRTADGSEFEKRTADGSEFESPKKKAKVE

SEQ ID NO: 1636 - protein, 2122 aa, synthetic construct
MPAAKRVKLDGGDKKYSIGLDIGTNSVGWAVITDEYKVPSKKFKVLGNTDRHSIKKNLIGALLFDSGETAEATRLKRTARRRYTRRKNRICYLQEIFSNEMAKVDDSFFHRLEESFLVEEDKKHERHPIFGNIVDEVAYHEKYPTIYHLRKKLVDSTDKADLRLIYLALAHMIKFRGHFLIEGDLNPDNSDVDKLFIQLVQTYNQLFEENPINASGVDAKAILSARLSKSRRLENLIAQLPGEKKNGLFGNLIALSLGLTPNFKSNFDLAEDAKLQLSKDTYDDDLDNLLAQIGDQYADLFLAAKNLSDAILLSDILRVNTEITKAPLSASMIKRYDEHHQDLTLLKALVRQQLPEKYKEIFFDQSKNGYAGYIDGGASQEEFYKFIKPILEKMDGTEELLVKLNREDLLRKQRTFDNGSIPHQIHLGELHAILRRQEDFYPFLKDNREKIEKILTFRIPYYVGPLARGNSRFAWMTRKSEETITPWNFEEVVDKGASAQSFIERMTNFDKNLPNEKVLPKHSLLYEYFTVYNELTKVKYVTEGMRKPAFLSGEQKKAIVDLLFKTNRKVTVKQLKEDYFKKIECFDSVEISGVEDRFNASLGTYHDLLKIIKDKDFLDNEENEDILEDIVLTLTLFEDREMIEERLKTYAHLFDDKVMKQLKRRRYTGWGRLSRKLINGIRDKQSGKTILDFLKSDGFANRNFMQLIHDDSLTFKEDIQKAQVSGQGDSLHEHIANLAGSPAIKKGILQTVKVVDELVKVMGRHKPENIVIEMARENQTTQKGQKNSRERMKRIEEGIKELGSQILKEHPVENTQLQNEKLYLYYLQNGRDMYVDQELDINRLSDYDVDHIVPQSFLKDDSIDNKVLTRSDKARGKSDNVPSEEVVKKMKNYWRQLLNAKLITQRKFDNLTKAERGGLSELDKAGFIKRQLVETRQITKHVAQILDSRMNTKYDENDKLIREVKVITLKSKLVSDFRKDFQFYKVREINNYHHAHDAYLNAVVGTALIKKYPKLESEFVYGDYKVYDVRKMIAKSEQEIGKATAKYFFYSNIMNFFKTEITLANGEIRKRPLIETNGETGEIVWDKGRDFATVRKVLSMPQVNIVKKTEVQTGGFSKESILPKRNSDKLIARKKDWDPKKYGGFDSPTVAYSVLVVAKVEKGKSKKLKSVKELLGITIMERSSFEKNPIDFLEAKGYKEVKKDLIIKLPKYSLFELENGRKRMLASAGELQKGNELALPSKYVNFLYLASHYEKLKGSPEDNEQKQLFVEQHKHYLDEIIEQISEFSKRVILADANLDKVLSAYNKHRDKPIREQAENIIHLFTLTNLGAPAAFKYFDTTIDRKRYTSTKEVLDATLIHQSITGLYETRIDLSQLGGDGGPAPGGSGGLLGRDLLTKLKAQIQFSTEGPQVTWEDRPAMCLVLNLEEEYRLHEKPVPPSIDPSWLQLFPMVWAEKAGMGLANQVPPVVVELKSDASPVAVRQYPMSKEAREGIRPHIQRFLDLGILVPCQSPWNTPLLPVKKPGTNDYRPVQDLREVNKRVQDIHPTVPNPYNLLSSLPPSHTWYSVLDLKDAFFCLKLHPNSQPLFAFEWRDPEKGNTGQLTWTRLPQGFKNSPTLFNEALHRDLASFRALNPQVVMLQYVDDLLVAAPTYRDCKEGTRRLLQELSKLGYRVSAKKAQLCREEVTYLGYLLKGGKRWLTPARKATVMKIPTPTTPRQVREFLGTAGFCRLWIPGFASLAAPLYPLTRPKVPFTWTEAHQEAFGRIKEALLSAPALALPDLTKPFALYVDEKEGVARGVLTQTLGPWRRPVAYLSKKLDPVASGWPTCLKAIAAVALLLKDADKLTLGQNVLVIAPHNLESIVRQPPDRWMTNARMTHYQSLLLNERVSFAPPAILNPATLLPVESDDTPIHICSEILAEETGTRPDLRDQPLPGVPAWYTDGSSFIMDGRRQAGAAIVDNKRTVWASNLPEGTSAQKAELIALTQALRLAEGKSINIYTDSRYAFATAHVHGAIYKQRGWLTSAGKDIKNKEEILALLEAIHLPKRVAIIHCPGHQRGTDPVATGNRKADEAAKQAAQSTRILTETTKNAGKRTADGSEFEKRTADGSEFESPKKKAKVE

SEQ ID NO: 1637 - protein, 2122 aa, synthetic construct
MPAAKRVKLDGGDKKYSIGLDIGTNSVGWAVITDEYKVPSKKFKVLGNTDRHSIKKNLIGALLFDSGETAEATRLKRTARRRYTRRKNRICYLQEIFSNEMAKVDDSFFHRLEESFLVEEDKKHERHPIFGNIVDEVAYHEKYPTIYHLRKKLVDSTDKADLRLIYLALAHMIKFRGHFLIEGDLNPDNSDVDKLFIQLVQTYNQLFEENPINASGVDAKAILSARLSKSRRLENLIAQLPGEKKNGLFGNLIALSLGLTPNFKSNFDLAEDAKLQLSKDTYDDDLDNLLAQIGDQYADLFLAAKNLSDAILLSDILRVNTEITKAPLSASMIKRYDEHHQDLTLLKALVRQQLPEKYKEIFFDQSKNGYAGYIDGGASQEEFYKFIKPILEKMDGTEELLVKLNREDLLRKQRTFDNGSIPHQIHLGELHAILRRQEDFYPFLKDNREKIEKILTFRIPYYVGPLARGNSRFAWMTRKSEETITPWNFEEVVDKGASAQSFIERMTNFDKNLPNEKVLPKHSLLYEYFTVYNELTKVKYVTEGMRKPAFLSGEQKKAIVDLLFKTNRKVTVKQLKEDYFKKIECFDSVEISGVEDRFNASLGTYHDLLKIIKDKDFLDNEENEDILEDIVLTLTLFEDREMIEERLKTYAHLFDDKVMKQLKRRRYTGWGRLSRKLINGIRDKQSGKTILDFLKSDGFANRNFMQLIHDDSLTFKEDIQKAQVSGQGDSLHEHIANLAGSPAIKKGILQTVKVVDELVKVMGRHKPENIVIEMARENQTTQKGQKNSRERMKRIEEGIKELGSQILKEHPVENTQLQNEKLYLYYLQNGRDMYVDQELDINRLSDYDVDHIVPQSFLKDDSIDNKVLTRSDKARGKSDNVPSEEVVKKMKNYWRQLLNAKLITQRKFDNLTKAERGGLSELDKAGFIKRQLVETRQITKHVAQILDSRMNTKYDENDKLIREVKVITLKSKLVSDFRKDFQFYKVREINNYHHAHDAYLNAVVGTALIKKYPKLESEFVYGDYKVYDVRKMIAKSEQEIGKATAKYFFYSNIMNFFKTEITLANGEIRKRPLIETNGETGEIVWDKGRDFATVRKVLSMPQVNIVKKTEVQTGGFSKESILPKRNSDKLIARKKDWDPKKYGGFDSPTVAYSVLVVAKVEKGKSKKLKSVKELLGITIMERSSFEKNPIDFLEAKGYKEVKKDLIIKLPKYSLFELENGRKRMLASAGELQKGNELALPSKYVNFLYLASHYEKLKGSPEDNEQKQLFVEQHKHYLDEIIEQISEFSKRVILADANLDKVLSAYNKHRDKPIREQAENIIHLFTLTNLGAPAAFKYFDTTIDRKRYTSTKEVLDATLIHQSITGLYETRIDLSQLGGDGGGGSGSSGGLLGRDLLTKLKAQIQFSTEGPQVTWEDRPAMCLVLNLEEEYRLHEKPVPPSIDPSWLQLFPMVWAEKAGMGLANQVPPVVVELKSDASPVAVRQYPMSKEAREGIRPHIQRFLDLGILVPCQSPWNTPLLPVKKPGTNDYRPVQDLREVNKRVQDIHPTVPNPYNLLSSLPPSHTWYSVLDLKDAFFCLKLHPNSQPLFAFEWRDPEKGNTGQLTWTRLPQGFKNSPTLFNEALHRDLASFRALNPQVVMLQYVDDLLVAAPTYRDCKEGTRRLLQELSKLGYRVSAKKAQLCREEVTYLGYLLKGGKRWLTPARKATVMKIPTPTTPRQVREFLGTAGFCRLWIPGFASLAAPLYPLTRPKVPFTWTEAHQEAFGRIKEALLSAPALALPDLTKPFALYVDEKEGVARGVLTQTLGPWRRPVAYLSKKLDPVASGWPTCLKAIAAVALLLKDADKLTLGQNVLVIAPHNLESIVRQPPDRWMTNARMTHYQSLLLNERVSFAPPAILNPATLLPVESDDTPIHICSEILAEETGTRPDLRDQPLPGVPAWYTDGSSFIMDGRRQAGAAIVDNKRTVWASNLPEGTSAQKAELIALTQALRLAEGKSINIYTDSRYAFATAHVHGAIYKQRGWLTSAGKDIKNKEEILALLEAIHLPKRVAIIHCPGHQRGTDPVATGNRKADEAAKQAAQSTRILTETTKNAGKRTADGSEFEKRTADGSEFESPKKKAKVE

SEQ ID NO: 1638 - protein, 2131 aa, synthetic construct
MPAAKRVKLDGGDKKYSIGLDIGTNSVGWAVITDEYKVPSKKFKVLGNTDRHSIKKNLIGALLFDSGETAEATRLKRTARRRYTRRKNRICYLQEIFSNEMAKVDDSFFHRLEESFLVEEDKKHERHPIFGNIVDEVAYHEKYPTIYHLRKKLVDSTDKADLRLIYLALAHMIKFRGHFLIEGDLNPDNSDVDKLFIQLVQTYNQLFEENPINASGVDAKAILSARLSKSRRLENLIAQLPGEKKNGLFGNLIALSLGLTPNFKSNFDLAEDAKLQLSKDTYDDDLDNLLAQIGDQYADLFLAAKNLSDAILLSDILRVNTEITKAPLSASMIKRYDEHHQDLTLLKALVRQQLPEKYKEIFFDQSKNGYAGYIDGGASQEEFYKFIKPILEKMDGTEELLVKLNREDLLRKQRTFDNGSIPHQIHLGELHAILRRQEDFYPFLKDNREKIEKILTFRIPYYVGPLARGNSRFAWMTRKSEETITPWNFEEVVDKGASAQSFIERMTNFDKNLPNEKVLPKHSLLYEYFTVYNELTKVKYVTEGMRKPAFLSGEQKKAIVDLLFKTNRKVTVKQLKEDYFKKIECFDSVEISGVEDRFNASLGTYHDLLKIIKDKDFLDNEENEDILEDIVLTLTLFEDREMIEERLKTYAHLFDDKVMKQLKRRRYTGWGRLSRKLINGIRDKQSGKTILDFLKSDGFANRNFMQLIHDDSLTFKEDIQKAQVSGQGDSLHEHIANLAGSPAIKKGILQTVKVVDELVKVMGRHKPENIVIEMARENQTTQKGQKNSRERMKRIEEGIKELGSQILKEHPVENTQLQNEKLYLYYLQNGRDMYVDQELDINRLSDYDVDHIVPQSFLKDDSIDNKVLTRSDKARGKSDNVPSEEVVKKMKNYWRQLLNAKLITQRKFDNLTKAERGGLSELDKAGFIKRQLVETRQITKHVAQILDSRMNTKYDENDKLIREVKVITLKSKLVSDFRKDFQFYKVREINNYHHAHDAYLNAVVGTALIKKYPKLESEFVYGDYKVYDVRKMIAKSEQEIGKATAKYFFYSNIMNFFKTEITLANGEIRKRPLIETNGETGEIVWDKGRDFATVRKVLSMPQVNIVKKTEVQTGGFSKESILPKRNSDKLIARKKDWDPKKYGGFDSPTVAYSVLVVAKVEKGKSKKLKSVKELLGITIMERSSFEKNPIDFLEAKGYKEVKKDLIIKLPKYSLFELENGRKRMLASAGELQKGNELALPSKYVNFLYLASHYEKLKGSPEDNEQKQLFVEQHKHYLDEIIEQISEFSKRVILADANLDKVLSAYNKHRDKPIREQAENIIHLFTLTNLGAPAAFKYFDTTIDRKRYTSTKEVLDATLIHQSITGLYETRIDLSQLGGDGGEAAAKGGGGSEAAAKGGLLGRDLLTKLKAQIQFSTEGPQVTWEDRPAMCLVLNLEEEYRLHEKPVPPSIDPSWLQLFPMVWAEKAGMGLANQVPPVVVELKSDASPVAVRQYPMSKEAREGIRPHIQRFLDLGILVPCQSPWNTPLLPVKKPGTNDYRPVQDLREVNKRVQDIHPTVPNPYNLLSSLPPSHTWYSVLDLKDAFFCLKLHPNSQPLFAFEWRDPEKGNTGQLTWTRLPQGFKNSPTLFNEALHRDLASFRALNPQVVMLQYVDDLLVAAPTYRDCKEGTRRLLQELSKLGYRVSAKKAQLCREEVTYLGYLLKGGKRWLTPARKATVMKIPTPTTPRQVREFLGTAGFCRLWIPGFASLAAPLYPLTRPKVPFTWTEAHQEAFGRIKEALLSAPALALPDLTKPFALYVDEKEGVARGVLTQTLGPWRRPVAYLSKKLDPVASGWPTCLKAIAAVALLLKDADKLTLGQNVLVIAPHNLESIVRQPPDRWMTNARMTHYQSLLLNERVSFAPPAILNPATLLPVESDDTPIHICSEILAEETGTRPDLRDQPLPGVPAWYTDGSSFIMDGRRQAGAAIVDNKRTVWASNLPEGTSAQKAELIALTQALRLAEGKSINIYTDSRYAFATAHVHGAIYKQRGWLTSAGKDIKNKEEILALLEAIHLPKRVAIIHCPGHQRGTDPVATGNRKADEAAKQAAQSTRILTETTKNAGKRTADGSEFEKRTADGSEFESPKKKAKVE

SEQ ID NO: 1639 - protein, 2127 aa, synthetic construct
MPAAKRVKLDGGDKKYSIGLDIGTNSVGWAVITDEYKVPSKKFKVLGNTDRHSIKKNLIGALLFDSGETAEATRLKRTARRRYTRRKNRICYLQEIFSNEMAKVDDSFFHRLEESFLVEEDKKHERHPIFGNIVDEVAYHEKYPTIYHLRKKLVDSTDKADLRLIYLALAHMIKFRGHFLIEGDLNPDNSDVDKLFIQLVQTYNQLFEENPINASGVDAKAILSARLSKSRRLENLIAQLPGEKKNGLFGNLIALSLGLTPNFKSNFDLAEDAKLQLSKDTYDDDLDNLLAQIGDQYADLFLAAKNLSDAILLSDILRVNTEITKAPLSASMIKRYDEHHQDLTLLKALVRQQLPEKYKEIFFDQSKNGYAGYIDGGASQEEFYKFIKPILEKMDGTEELLVKLNREDLLRKQRTFDNGSIPHQIHLGELHAILRRQEDFYPFLKDNREKIEKILTFRIPYYVGPLARGNSRFAWMTRKSEETITPWNFEEVVDKGASAQSFIERMTNFDKNLPNEKVLPKHSLLYEYFTVYNELTKVKYVTEGMRKPAFLSGEQKKAIVDLLFKTNRKVTVKQLKEDYFKKIECFDSVEISGVEDRFNASLGTYHDLLKIIKDKDFLDNEENEDILEDIVLTLTLFEDREMIEERLKTYAHLFDDKVMKQLKRRRYTGWGRLSRKLINGIRDKQSGKTILDFLKSDGFANRNFMQLIHDDSLTFKEDIQKAQVSGQGDSLHEHIANLAGSPAIKKGILQTVKVVDELVKVMGRHKPENIVIEMARENQTTQKGQKNSRERMKRIEEGIKELGSQILKEHPVENTQLQNEKLYLYYLQNGRDMYVDQELDINRLSDYDVDHIVPQSFLKDDSIDNKVLTRSDKARGKSDNVPSEEVVKKMKNYWRQLLNAKLITQRKFDNLTKAERGGLSELDKAGFIKRQLVETRQITKHVAQILDSRMNTKYDENDKLIREVKVITLKSKLVSDFRKDFQFYKVREINNYHHAHDAYLNAVVGTALIKKYPKLESEFVYGDYKVYDVRKMIAKSEQEIGKATAKYFFYSNIMNFFKTEITLANGEIRKRPLIETNGETGEIVWDKGRDFATVRKVLSMPQVNIVKKTEVQTGGFSKESILPKRNSDKLIARKKDWDPKKYGGFDSPTVAYSVLVVAKVEKGKSKKLKSVKELLGITIMERSSFEKNPIDFLEAKGYKEVKKDLIIKLPKYSLFELENGRKRMLASAGELQKGNELALPSKYVNFLYLASHYEKLKGSPEDNEQKQLFVEQHKHYLDEIIEQISEFSKRVILADANLDKVLSAYNKHRDKPIREQAENIIHLFTLTNLGAPAAFKYFDTTIDRKRYTSTKEVLDATLIHQSITGLYETRIDLSQLGGDGGGGGGSSEAAAKGGLLGRDLLTKLKAQIQFSTEGPQVTWEDRPAMCLVLNLEEEYRLHEKPVPPSIDPSWLQLFPMVWAEKAGMGLANQVPPVVVELKSDASPVAVRQYPMSKEAREGIRPHIQRFLDLGILVPCQSPWNTPLLPVKKPGTNDYRPVQDLREVNKRVQDIHPTVPNPYNLLSSLPPSHTWYSVLDLKDAFFCLKLHPNSQPLFAFEWRDPEKGNTGQLTWTRLPQGFKNSPTLFNEALHRDLASFRALNPQVVMLQYVDDLLVAAPTYRDCKEGTRRLLQELSKLGYRVSAKKAQLCREEVTYLGYLLKGGKRWLTPARKATVMKIPTPTTPRQVREFLGTAGFCRLWIPGFASLAAPLYPLTRPKVPFTWTEAHQEAFGRIKEALLSAPALALPDLTKPFALYVDEKEGVARGVLTQTLGPWRRPVAYLSKKLDPVASGWPTCLKAIAAVALLLKDADKLTLGQNVLVIAPHNLESIVRQPPDRWMTNARMTHYQSLLLNERVSFAPPAILNPATLLPVESDDTPIHICSEILAEETGTRPDLRDQPLPGVPAWYTDGSSFIMDGRRQAGAAIVDNKRTVWASNLPEGTSAQKAELIALTQALRLAEGKSINIYTDSRYAFATAHVHGAIYKQRGWLTSAGKDIKNKEEILALLEAIHLPKRVAIIHCPGHQRGTDPVATGNRKADEAAKQAAQSTRILTETTKNAGKRTADGSEFEKRTADGSEFESPKKKAKVE

SEQ ID NO: 1640 - protein, 2127 aa, synthetic construct
MPAAKRVKLDGGDKKYSIGLDIGTNSVGWAVITDEYKVPSKKFKVLGNTDRHSIKKNLIGALLFDSGETAEATRLKRTARRRYTRRKNRICYLQEIFSNEMAKVDDSFFHRLEESFLVEEDKKHERHPIFGNIVDEVAYHEKYPTIYHLRKKLVDSTDKADLRLIYLALAHMIKFRGHFLIEGDLNPDNSDVDKLFIQLVQTYNQLFEENPINASGVDAKAILSARLSKSRRLENLIAQLPGEKKNGLFGNLIALSLGLTPNFKSNFDLAEDAKLQLSKDTYDDDLDNLLAQIGDQYADLFLAAKNLSDAILLSDILRVNTEITKAPLSASMIKRYDEHHQDLTLLKALVRQQLPEKYKEIFFDQSKNGYAGYIDGGASQEEFYKFIKPILEKMDGTEELLVKLNREDLLRKQRTFDNGSIPHQIHLGELHAILRRQEDFYPFLKDNREKIEKILTFRIPYYVGPLARGNSRFAWMTRKSEETITPWNFEEVVDKGASAQSFIERMTNFDKNLPNEKVLPKHSLLYEYFTVYNELTKVKYVTEGMRKPAFLSGEQKKAIVDLLFKTNRKVTVKQLKEDYFKKIECFDSVEISGVEDRFNASLGTYHDLLKIIKDKDFLDNEENEDILEDIVLTLTLFEDREMIEERLKTYAHLFDDKVMKQLKRRRYTGWGRLSRKLINGIRDKQSGKTILDFLKSDGFANRNFMQLIHDDSLTFKEDIQKAQVSGQGDSLHEHIANLAGSPAIKKGILQTVKVVDELVKVMGRHKPENIVIEMARENQTTQKGQKNSRERMKRIEEGIKELGSQILKEHPVENTQLQNEKLYLYYLQNGRDMYVDQELDINRLSDYDVDHIVPQSFLKDDSIDNKVLTRSDKARGKSDNVPSEEVVKKMKNYWRQLLNAKLITQRKFDNLTKAERGGLSELDKAGFIKRQLVETRQITKHVAQILDSRMNTKYDENDKLIREVKVITLKSKLVSDFRKDFQFYKVREINNYHHAHDAYLNAVVGTALIKKYPKLESEFVYGDYKVYDVRKMIAKSEQEIGKATAKYFFYSNIMNFFKTEITLANGEIRKRPLIETNGETGEIVWDKGRDFATVRKVLSMPQVNIVKKTEVQTGGFSKESILPKRNSDKLIARKKDWDPKKYGGFDSPTVAYSVLVVAKVEKGKSKKLKSVKELLGITIMERSSFEKNPIDFLEAKGYKEVKKDLIIKLPKYSLFELENGRKRMLASAGELQKGNELALPSKYVNFLYLASHYEKLKGSPEDNEQKQLFVEQHKHYLDEIIEQISEFSKRVILADANLDKVLSAYNKHRDKPIREQAENIIHLFTLTNLGAPAAFKYFDTTIDRKRYTSTKEVLDATLIHQSITGLYETRIDLSQLGGDGGPAPGGSEAAAKGGLLGRDLLTKLKAQIQFSTEGPQVTWEDRPAMCLVLNLEEEYRLHEKPVPPSIDPSWLQLFPMVWAEKAGMGLANQVPPVVVELKSDASPVAVRQYPMSKEAREGIRPHIQRFLDLGILVPCQSPWNTPLLPVKKPGTNDYRPVQDLREVNKRVQDIHPTVPNPYNLLSSLPPSHTWYSVLDLKDAFFCLKLHPNSQPLFAFEWRDPEKGNTGQLTWTRLPQGFKNSPTLFNEALHRDLASFRALNPQVVMLQYVDDLLVAAPTYRDCKEGTRRLLQELSKLGYRVSAKKAQLCREEVTYLGYLLKGGKRWLTPARKATVMKIPTPTTPRQVREFLGTAGFCRLWIPGFASLAAPLYPLTRPKVPFTWTEAHQEAFGRIKEALLSAPALALPDLTKPFALYVDEKEGVARGVLTQTLGPWRRPVAYLSKKLDPVASGWPTCLKAIAAVALLLKDADKLTLGQNVLVIAPHNLESIVRQPPDRWMTNARMTHYQSLLLNERVSFAPPAILNPATLLPVESDDTPIHICSEILAEETGTRPDLRDQPLPGVPAWYTDGSSFIMDGRRQAGAAIVDNKRTVWASNLPEGTSAQKAELIALTQALRLAEGKSINIYTDSRYAFATAHVHGAIYKQRGWLTSAGKDIKNKEEILALLEAIHLPKRVAIIHCPGHQRGTDPVATGNRKADEAAKQAAQSTRILTETTKNAGKRTADGSEFEKRTADGSEFESPKKKAKVE

SEQ ID NO: 1641 - protein, 2127 aa, synthetic construct
MPAAKRVKLDGGDKKYSIGLDIGTNSVGWAVITDEYKVPSKKFKVLGNTDRHSIKKNLIGALLFDSGETAEATRLKRTARRRYTRRKNRICYLQEIFSNEMAKVDDSFFHRLEESFLVEEDKKHERHPIFGNIVDEVAYHEKYPTIYHLRKKLVDSTDKADLRLIYLALAHMIKFRGHFLIEGDLNPDNSDVDKLFIQLVQTYNQLFEENPINASGVDAKAILSARLSKSRRLENLIAQLPGEKKNGLFGNLIALSLGLTPNFKSNFDLAEDAKLQLSKDTYDDDLDNLLAQIGDQYADLFLAAKNLSDAILLSDILRVNTEITKAPLSASMIKRYDEHHQDLTLLKALVRQQLPEKYKEIFFDQSKNGYAGYIDGGASQEEFYKFIKPILEKMDGTEELLVKLNREDLLRKQRTFDNGSIPHQIHLGELHAILRRQEDFYPFLKDNREKIEKILTFRIPYYVGPLARGNSRFAWMTRKSEETITPWNFEEVVDKGASAQSFIERMTNFDKNLPNEKVLPKHSLLYEYFTVYNELTKVKYVTEGMRKPAFLSGEQKKAIVDLLFKTNRKVTVKQLKEDYFKKIECFDSVEISGVEDRFNASLGTYHDLLKIIKDKDFLDNEENEDILEDIVLTLTLFEDREMIEERLKTYAHLFDDKVMKQLKRRRYTGWGRLSRKLINGIRDKQSGKTILDFLKSDGFANRNFMQLIHDDSLTFKEDIQKAQVSGQGDSLHEHIANLAGSPAIKKGILQTVKVVDELVKVMGRHKPENIVIEMARENQTTQKGQKNSRERMKRIEEGIKELGSQILKEHPVENTQLQNEKLYLYYLQNGRDMYVDQELDINRLSDYDVDHIVPQSFLKDDSIDNKVLTRSDKARGKSDNVPSEEVVKKMKNYWRQLLNAKLITQRKFDNLTKAERGGLSELDKAGFIKRQLVETRQITKHVAQILDSRMNTKYDENDKLIREVKVITLKSKLVSDFRKDFQFYKVREINNYHHAHDAYLNAVVGTALIKKYPKLESEFVYGDYKVYDVRKMIAKSEQEIGKATAKYFFYSNIMNFFKTEITLANGEIRKRPLIETNGETGEIVWDKGRDFATVRKVLSMPQVNIVKKTEVQTGGFSKESILPKRNSDKLIARKKDWDPKKYGGFDSPTVAYSVLVVAKVEKGKSKKLKSVKELLGITIMERSSFEKNPIDFLEAKGYKEVKKDLIIKLPKYSLFELENGRKRMLASAGELQKGNELALPSKYVNFLYLASHYEKLKGSPEDNEQKQLFVEQHKHYLDEIIEQISEFSKRVILADANLDKVLSAYNKHRDKPIREQAENIIHLFTLTNLGAPAAFKYFDTTIDRKRYTSTKEVLDATLIHQSITGLYETRIDLSQLGGDGGPAPEAAAKGGSGGLLGRDLLTKLKAQIQFSTEGPQVTWEDRPAMCLVLNLEEEYRLHEKPVPPSIDPSWLQLFPMVWAEKAGMGLANQVPPVVVELKSDASPVAVRQYPMSKEAREGIRPHIQRFLDLGILVPCQSPWNTPLLPVKKPGTNDYRPVQDLREVNKRVQDIHPTVPNPYNLLSSLPPSHTWYSVLDLKDAFFCLKLHPNSQPLFAFEWRDPEKGNTGQLTWTRLPQGFKNSPTLFNEALHRDLASFRALNPQVVMLQYVDDLLVAAPTYRDCKEGTRRLLQELSKLGYRVSAKKAQLCREEVTYLGYLLKGGKRWLTPARKATVMKIPTPTTPRQVREFLGTAGFCRLWIPGFASLAAPLYPLTRPKVPFTWTEAHQEAFGRIKEALLSAPALALPDLTKPFALYVDEKEGVARGVLTQTLGPWRRPVAYLSKKLDPVASGWPTCLKAIAAVALLLKDADKLTLGQNVLVIAPHNLESIVRQPPDRWMTNARMTHYQSLLLNERVSFAPPAILNPATLLPVESDDTPIHICSEILAEETGTRPDLRDQPLPGVPAWYTDGSSFIMDGRRQAGAAIVDNKRTVWASNLPEGTSAQKAELIALTQALRLAEGKSINIYTDSRYAFATAHVHGAIYKQRGWLTSAGKDIKNKEEILALLEAIHLPKRVAIIHCPGHQRGTDPVATGNRKADEAAKQAAQSTRILTETTKNAGKRTADGSEFEKRTADGSEFESPKKKAKVE

SEQ ID NO: 1642 - protein, 2122 aa, synthetic construct
MPAAKRVKLDGGDKKYSIGLDIGTNSVGWAVITDEYKVPSKKFKVLGNTDRHSIKKNLIGALLFDSGETAEATRLKRTARRRYTRRKNRICYLQEIFSNEMAKVDDSFFHRLEESFLVEEDKKHERHPIFGNIVDEVAYHEKYPTIYHLRKKLVDSTDKADLRLIYLALAHMIKFRGHFLIEGDLNPDNSDVDKLFIQLVQTYNQLFEENPINASGVDAKAILSARLSKSRRLENLIAQLPGEKKNGLFGNLIALSLGLTPNFKSNFDLAEDAKLQLSKDTYDDDLDNLLAQIGDQYADLFLAAKNLSDAILLSDILRVNTEITKAPLSASMIKRYDEHHQDLTLLKALVRQQLPEKYKEIFFDQSKNGYAGYIDGGASQEEFYKFIKPILEKMDGTEELLVKLNREDLLRKQRTFDNGSIPHQIHLGELHAILRRQEDFYPFLKDNREKIEKILTFRIPYYVGPLARGNSRFAWMTRKSEETITPWNFEEVVDKGASAQSFIERMTNFDKNLPNEKVLPKHSLLYEYFTVYNELTKVKYVTEGMRKPAFLSGEQKKAIVDLLFKTNRKVTVKQLKEDYFKKIECFDSVEISGVEDRFNASLGTYHDLLKIIKDKDFLDNEENEDILEDIVLTLTLFEDREMIEERLKTYAHLFDDKVMKQLKRRRYTGWGRLSRKLINGIRDKQSGKTILDFLKSDGFANRNFMQLIHDDSLTFKEDIQKAQVSGQGDSLHEHIANLAGSPAIKKGILQTVKVVDELVKVMGRHKPENIVIEMARENQTTQKGQKNSRERMKRIEEGIKELGSQILKEHPVENTQLQNEKLYLYYLQNGRDMYVDQELDINRLSDYDVDHIVPQSFLKDDSIDNKVLTRSDKARGKSDNVPSEEVVKKMKNYWRQLLNAKLITQRKFDNLTKAERGGLSELDKAGFIKRQLVETRQITKHVAQILDSRMNTKYDENDKLIREVKVITLKSKLVSDFRKDFQFYKVREINNYHHAHDAYLNAVVGTALIKKYPKLESEFVYGDYKVYDVRKMIAKSEQEIGKATAKYFFYSNIMNFFKTEITLANGEIRKRPLIETNGETGEIVWDKGRDFATVRKVLSMPQVNIVKKTEVQTGGFSKESILPKRNSDKLIARKKDWDPKKYGGFDSPTVAYSVLVVAKVEKGKSKKLKSVKELLGITIMERSSFEKNPIDFLEAKGYKEVKKDLIIKLPKYSLFELENGRKRMLASAGELQKGNELALPSKYVNFLYLASHYEKLKGSPEDNEQKQLFVEQHKHYLDEIIEQISEFSKRVILADANLDKVLSAYNKHRDKPIREQAENIIHLFTLTNLGAPAAFKYFDTTIDRKRYTSTKEVLDATLIHQSITGLYETRIDLSQLGGDGGGGGGGSGGLLGRDLLTKLKAQIQFSTEGPQVTWEDRPAMCLVLNLEEEYRLHEKPVPPSIDPSWLQLFPMVWAEKAGMGLANQVPPVVVELKSDASPVAVRQYPMSKEAREGIRPHIQRFLDLGILVPCQSPWNTPLLPVKKPGTNDYRPVQDLREVNKRVQDIHPTVPNPYNLLSSLPPSHTWYSVLDLKDAFFCLKLHPNSQPLFAFEWRDPEKGNTGQLTWTRLPQGFKNSPTLFNEALHRDLASFRALNPQVVMLQYVDDLLVAAPTYRDCKEGTRRLLQELSKLGYRVSAKKAQLCREEVTYLGYLLKGGKRWLTPARKATVMKIPTPTTPRQVREFLGTAGFCRLWIPGFASLAAPLYPLTRPKVPFTWTEAHQEAFGRIKEALLSAPALALPDLTKPFALYVDEKEGVARGVLTQTLGPWRRPVAYLSKKLDPVASGWPTCLKAIAAVALLLKDADKLTLGQNVLVIAPHNLESIVRQPPDRWMTNARMTHYQSLLLNERVSFAPPAILNPATLLPVESDDTPIHICSEILAEETGTRPDLRDQPLPGVPAWYTDGSSFIMDGRRQAGAAIVDNKRTVWASNLPEGTSAQKAELIALTQALRLAEGKSINIYTDSRYAFATAHVHGAIYKQRGWLTSAGKDIKNKEEILALLEAIHLPKRVAIIHCPGHQRGTDPVATGNRKADEAAKQAAQSTRILTETTKNAGKRTADGSEFEKRTADGSEFESPKKKAKVE

SEQ ID NO: 1643 - protein, 2121 aa, synthetic construct
MPAAKRVKLDGGDKKYSIGLDIGTNSVGWAVITDEYKVPSKKFKVLGNTDRHSIKKNLIGALLFDSGETAEATRLKRTARRRYTRRKNRICYLQEIFSNEMAKVDDSFFHRLEESFLVEEDKKHERHPIFGNIVDEVAYHEKYPTIYHLRKKLVDSTDKADLRLIYLALAHMIKFRGHFLIEGDLNPDNSDVDKLFIQLVQTYNQLFEENPINASGVDAKAILSARLSKSRRLENLIAQLPGEKKNGLFGNLIALSLGLTPNFKSNFDLAEDAKLQLSKDTYDDDLDNLLAQIGDQYADLFLAAKNLSDAILLSDILRVNTEITKAPLSASMIKRYDEHHQDLTLLKALVRQQLPEKYKEIFFDQSKNGYAGYIDGGASQEEFYKFIKPILEKMDGTEELLVKLNREDLLRKQRTFDNGSIPHQIHLGELHAILRRQEDFYPFLKDNREKIEKILTFRIPYYVGPLARGNSRFAWMTRKSEETITPWNFEEVVDKGASAQSFIERMTNFDKNLPNEKVLPKHSLLYEYFTVYNELTKVKYVTEGMRKPAFLSGEQKKAIVDLLFKTNRKVTVKQLKEDYFKKIECFDSVEISGVEDRFNASLGTYHDLLKIIKDKDFLDNEENEDILEDIVLTLTLFEDREMIEERLKTYAHLFDDKVMKQLKRRRYTGWGRLSRKLINGIRDKQSGKTILDFLKSDGFANRNFMQLIHDDSLTFKEDIQKAQVSGQGDSLHEHIANLAGSPAIKKGILQTVKVVDELVKVMGRHKPENIVIEMARENQTTQKGQKNSRERMKRIEEGIKELGSQILKEHPVENTQLQNEKLYLYYLQNGRDMYVDQELDINRLSDYDVDHIVPQSFLKDDSIDNKVLTRSDKARGKSDNVPSEEVVKKMKNYWRQLLNAKLITQRKFDNLTKAERGGLSELDKAGFIKRQLVETRQITKHVAQILDSRMNTKYDENDKLIREVKVITLKSKLVSDFRKDFQFYKVREINNYHHAHDAYLNAVVGTALIKKYPKLESEFVYGDYKVYDVRKMIAKSEQEIGKATAKYFFYSNIMNFFKTEITLANGEIRKRPLIETNGETGEIVWDKGRDFATVRKVLSMPQVNIVKKTEVQTGGFSKESILPKRNSDKLIARKKDWDPKKYGGFDSPTVAYSVLVVAKVEKGKSKKLKSVKELLGITIMERSSFEKNPIDFLEAKGYKEVKKDLIIKLPKYSLFELENGRKRMLASAGELQKGNELALPSKYVNFLYLASHYEKLKGSPEDNEQKQLFVEQHKHYLDEIIEQISEFSKRVILADANLDKVLSAYNKHRDKPIREQAENIIHLFTLTNLGAPAAFKYFDTTIDRKRYTSTKEVLDATLIHQSITGLYETRIDLSQLGGDGGGGGGGGGLLGRDLLTKLKAQIQFSTEGPQVTWEDRPAMCLVLNLEEEYRLHEKPVPPSIDPSWLQLFPMVWAEKAGMGLANQVPPVVVELKSDASPVAVRQYPMSKEAREGIRPHIQRFLDLGILVPCQSPWNTPLLPVKKPGTNDYRPVQDLREVNKRVQDIHPTVPNPYNLLSSLPPSHTWYSVLDLKDAFFCLKLHPNSQPLFAFEWRDPEKGNTGQLTWTRLPQGFKNSPTLFNEALHRDLASFRALNPQVVMLQYVDDLLVAAPTYRDCKEGTRRLLQELSKLGYRVSAKKAQLCREEVTYLGYLLKGGKRWLTPARKATVMKIPTPTTPRQVREFLGTAGFCRLWIPGFASLAAPLYPLTRPKVPFTWTEAHQEAFGRIKEALLSAPALALPDLTKPFALYVDEKEGVARGVLTQTLGPWRRPVAYLSKKLDPVASGWPTCLKAIAAVALLLKDADKLTLGQNVLVIAPHNLESIVRQPPDRWMTNARMTHYQSLLLNERVSFAPPAILNPATLLPVESDDTPIHICSEILAEETGTRPDLRDQPLPGVPAWYTDGSSFIMDGRRQAGAAIVDNKRTVWASNLPEGTSAQKAELIALTQALRLAEGKSINIYTDSRYAFATAHVHGAIYKQRGWLTSAGKDIKNKEEILALLEAIHLPKRVAIIHCPGHQRGTDPVATGNRKADEAAKQAAQSTRILTETTKNAGKRTADGSEFEKRTADGSEFESPKKKAKVE

SEQ ID NO: 1644 - protein, 2127 aa, synthetic construct
MPAAKRVKLDGGDKKYSIGLDIGTNSVGWAVITDEYKVPSKKFKVLGNTDRHSIKKNLIGALLFDSGETAEATRLKRTARRRYTRRKNRICYLQEIFSNEMAKVDDSFFHRLEESFLVEEDKKHERHPIFGNIVDEVAYHEKYPTIYHLRKKLVDSTDKADLRLIYLALAHMIKFRGHFLIEGDLNPDNSDVDKLFIQLVQTYNQLFEENPINASGVDAKAILSARLSKSRRLENLIAQLPGEKKNGLFGNLIALSLGLTPNFKSNFDLAEDAKLQLSKDTYDDDLDNLLAQIGDQYADLFLAAKNLSDAILLSDILRVNTEITKAPLSASMIKRYDEHHQDLTLLKALVRQQLPEKYKEIFFDQSKNGYAGYIDGGASQEEFYKFIKPILEKMDGTEELLVKLNREDLLRKQRTFDNGSIPHQIHLGELHAILRRQEDFYPFLKDNREKIEKILTFRIPYYVGPLARGNSRFAWMTRKSEETITPWNFEEVVDKGASAQSFIERMTNFDKNLPNEKVLPKHSLLYEYFTVYNELTKVKYVTEGMRKPAFLSGEQKKAIVDLLFKTNRKVTVKQLKEDYFKKIECFDSVEISGVEDRFNASLGTYHDLLKIIKDKDFLDNEENEDILEDIVLTLTLFEDREMIEERLKTYAHLFDDKVMKQLKRRRYTGWGRLSRKLINGIRDKQSGKTILDFLKSDGFANRNFMQLIHDDSLTFKEDIQKAQVSGQGDSLHEHIANLAGSPAIKKGILQTVKVVDELVKVMGRHKPENIVIEMARENQTTQKGQKNSRERMKRIEEGIKELGSQILKEHPVENTQLQNEKLYLYYLQNGRDMYVDQELDINRLSDYDVDHIVPQSFLKDDSIDNKVLTRSDKARGKSDNVPSEEVVKKMKNYWRQLLNAKLITQRKFDNLTKAERGGLSELDKAGFIKRQLVETRQITKHVAQILDSRMNTKYDENDKLIREVKVITLKSKLVSDFRKDFQFYKVREINNYHHAHDAYLNAVVGTALIKKYPKLESEFVYGDYKVYDVRKMIAKSEQEIGKATAKYFFYSNIMNFFKTEITLANGEIRKRPLIETNGETGEIVWDKGRDFATVRKVLSMPQVNIVKKTEVQTGGFSKESILPKRNSDKLIARKKDWDPKKYGGFDSPTVAYSVLVVAKVEKGKSKKLKSVKELLGITIMERSSFEKNPIDFLEAKGYKEVKKDLIIKLPKYSLFELENGRKRMLASAGELQKGNELALPSKYVNFLYLASHYEKLKGSPEDNEQKQLFVEQHKHYLDEIIEQISEFSKRVILADANLDKVLSAYNKHRDKPIREQAENIIHLFTLTNLGAPAAFKYFDTTIDRKRYTSTKEVLDATLIHQSITGLYETRIDLSQLGGDGGGGSGSSEAAAKGGLLGRDLLTKLKAQIQFSTEGPQVTWEDRPAMCLVLNLEEEYRLHEKPVPPSIDPSWLQLFPMVWAEKAGMGLANQVPPVVVELKSDASPVAVRQYPMSKEAREGIRPHIQRFLDLGILVPCQSPWNTPLLPVKKPGTNDYRPVQDLREVNKRVQDIHPTVPNPYNLLSSLPPSHTWYSVLDLKDAFFCLKLHPNSQPLFAFEWRDPEKGNTGQLTWTRLPQGFKNSPTLFNEALHRDLASFRALNPQVVMLQYVDDLLVAAPTYRDCKEGTRRLLQELSKLGYRVSAKKAQLCREEVTYLGYLLKGGKRWLTPARKATVMKIPTPTTPRQVREFLGTAGFCRLWIPGFASLAAPLYPLTRPKVPFTWTEAHQEAFGRIKEALLSAPALALPDLTKPFALYVDEKEGVARGVLTQTLGPWRRPVAYLSKKLDPVASGWPTCLKAIAAVALLLKDADKLTLGQNVLVIAPHNLESIVRQPPDRWMTNARMTHYQSLLLNERVSFAPPAILNPATLLPVESDDTPIHICSEILAEETGTRPDLRDQPLPGVPAWYTDGSSFIMDGRRQAGAAIVDNKRTVWASNLPEGTSAQKAELIALTQALRLAEGKSINIYTDSRYAFATAHVHGAIYKQRGWLTSAGKDIKNKEEILALLEAIHLPKRVAIIHCPGHQRGTDPVATGNRKADEAAKQAAQSTRILTETTKNAGKRTADGSEFEKRTADGSEFESPKKKAKVE

SEQ ID NO: 1645 - protein, 2127 aa, synthetic construct
MPAAKRVKLDGGDKKYSIGLDIGTNSVGWAVITDEYKVPSKKFKVLGNTDRHSIKKNLIGALLFDSGETAEATRLKRTARRRYTRRKNRICYLQEIFSNEMAKVDDSFFHRLEESFLVEEDKKHERHPIFGNIVDEVAYHEKYPTIYHLRKKLVDSTDKADLRLIYLALAHMIKFRGHFLIEGDLNPDNSDVDKLFIQLVQTYNQLFEENPINASGVDAKAILSARLSKSRRLENLIAQLPGEKKNGLFGNLIALSLGLTPNFKSNFDLAEDAKLQLSKDTYDDDLDNLLAQIGDQYADLFLAAKNLSDAILLSDILRVNTEITKAPLSASMIKRYDEHHQDLTLLKALVRQQLPEKYKEIFFDQSKNGYAGYIDGGASQEEFYKFIKPILEKMDGTEELLVKLNREDLLRKQRTFDNGSIPHQIHLGELHAILRRQEDFYPFLKDNREKIEKILTFRIPYYVGPLARGNSRFAWMTRKSEETITPWNFEEVVDKGASAQSFIERMTNFDKNLPNEKVLPKHSLLYEYFTVYNELTKVKYVTEGMRKPAFLSGEQKKAIVDLLFKTNRKVTVKQLKEDYFKKIECFDSVEISGVEDRFNASLGTYHDLLKIIKDKDFLDNEENEDILEDIVLTLTLFEDREMIEERLKTYAHLFDDKVMKQLKRRRYTGWGRLSRKLINGIRDKQSGKTILDFLKSDGFANRNFMQLIHDDSLTFKEDIQKAQVSGQGDSLHEHIANLAGSPAIKKGILQTVKVVDELVKVMGRHKPENIVIEMARENQTTQKGQKNSRERMKRIEEGIKELGSQILKEHPVENTQLQNEKLYLYYLQNGRDMYVDQELDINRLSDYDVDHIVPQSFLKDDSIDNKVLTRSDKARGKSDNVPSEEVVKKMKNYWRQLLNAKLITQRKFDNLTKAERGGLSELDKAGFIKRQLVETRQITKHVAQILDSRMNTKYDENDKLIREVKVITLKSKLVSDFRKDFQFYKVREINNYHHAHDAYLNAVVGTALIKKYPKLESEFVYGDYKVYDVRKMIAKSEQEIGKATAKYFFYSNIMNFFKTEITLANGEIRKRPLIETNGETGEIVWDKGRDFATVRKVLSMPQVNIVKKTEVQTGGFSKESILPKRNSDKLIARKKDWDPKKYGGFDSPTVAYSVLVVAKVEKGKSKKLKSVKELLGITIMERSSFEKNPIDFLEAKGYKEVKKDLIIKLPKYSLFELENGRKRMLASAGELQKGNELALPSKYVNFLYLASHYEKLKGSPEDNEQKQLFVEQHKHYLDEIIEQISEFSKRVILADANLDKVLSAYNKHRDKPIREQAENIIHLFTLTNLGAPAAFKYFDTTIDRKRYTSTKEVLDATLIHQSITGLYETRIDLSQLGGDGGEAAAKGGSGSSGGLLGRDLLTKLKAQIQFSTEGPQVTWEDRPAMCLVLNLEEEYRLHEKPVPPSIDPSWLQLFPMVWAEKAGMGLANQVPPVVVELKSDASPVAVRQYPMSKEAREGIRPHIQRFLDLGILVPCQSPWNTPLLPVKKPGTNDYRPVQDLREVNKRVQDIHPTVPNPYNLLSSLPPSHTWYSVLDLKDAFFCLKLHPNSQPLFAFEWRDPEKGNTGQLTWTRLPQGFKNSPTLFNEALHRDLASFRALNPQVVMLQYVDDLLVAAPTYRDCKEGTRRLLQELSKLGYRVSAKKAQLCREEVTYLGYLLKGGKRWLTPARKATVMKIPTPTTPRQVREFLGTAGFCRLWIPGFASLAAPLYPLTRPKVPFTWTEAHQEAFGRIKEALLSAPALALPDLTKPFALYVDEKEGVARGVLTQTLGPWRRPVAYLSKKLDPVASGWPTCLKAIAAVALLLKDADKLTLGQNVLVIAPHNLESIVRQPPDRWMTNARMTHYQSLLLNERVSFAPPAILNPATLLPVESDDTPIHICSEILAEETGTRPDLRDQPLPGVPAWYTDGSSFIMDGRRQAGAAIVDNKRTVWASNLPEGTSAQKAELIALTQALRLAEGKSINIYTDSRYAFATAHVHGAIYKQRGWLTSAGKDIKNKEEILALLEAIHLPKRVAIIHCPGHQRGTDPVATGNRKADEAAKQAAQSTRILTETTKNAGKRTADGSEFEKRTADGSEFESPKKKAKVE

SEQ ID NO: 1646 - protein, 2127 aa, synthetic construct
MPAAKRVKLDGGDKKYSIGLDIGTNSVGWAVITDEYKVPSKKFKVLGNTDRHSIKKNLIGALLFDSGETAEATRLKRTARRRYTRRKNRICYLQEIFSNEMAKVDDSFFHRLEESFLVEEDKKHERHPIFGNIVDEVAYHEKYPTIYHLRKKLVDSTDKADLRLIYLALAHMIKFRGHFLIEGDLNPDNSDVDKLFIQLVQTYNQLFEENPINASGVDAKAILSARLSKSRRLENLIAQLPGEKKNGLFGNLIALSLGLTPNFKSNFDLAEDAKLQLSKDTYDDDLDNLLAQIGDQYADLFLAAKNLSDAILLSDILRVNTEITKAPLSASMIKRYDEHHQDLTLLKALVRQQLPEKYKEIFFDQSKNGYAGYIDGGASQEEFYKFIKPILEKMDGTEELLVKLNREDLLRKQRTFDNGSIPHQIHLGELHAILRRQEDFYPFLKDNREKIEKILTFRIPYYVGPLARGNSRFAWMTRKSEETITPWNFEEVVDKGASAQSFIERMTNFDKNLPNEKVLPKHSLLYEYFTVYNELTKVKYVTEGMRKPAFLSGEQKKAIVDLLFKTNRKVTVKQLKEDYFKKIECFDSVEISGVEDRFNASLGTYHDLLKIIKDKDFLDNEENEDILEDIVLTLTLFEDREMIEERLKTYAHLFDDKVMKQLKRRRYTGWGRLSRKLINGIRDKQSGKTILDFLKSDGFANRNFMQLIHDDSLTFKEDIQKAQVSGQGDSLHEHIANLAGSPAIKKGILQTVKVVDELVKVMGRHKPENIVIEMARENQTTQKGQKNSRERMKRIEEGIKELGSQILKEHPVENTQLQNEKLYLYYLQNGRDMYVDQELDINRLSDYDVDHIVPQSFLKDDSIDNKVLTRSDKARGKSDNVPSEEVVKKMKNYWRQLLNAKLITQRKFDNLTKAERGGLSELDKAGFIKRQLVETRQITKHVAQILDSRMNTKYDENDKLIREVKVITLKSKLVSDFRKDFQFYKVREINNYHHAHDAYLNAVVGTALIKKYPKLESEFVYGDYKVYDVRKMIAKSEQEIGKATAKYFFYSNIMNFFKTEITLANGEIRKRPLIETNGETGEIVWDKGRDFATVRKVLSMPQVNIVKKTEVQTGGFSKESILPKRNSDKLIARKKDWDPKKYGGFDSPTVAYSVLVVAKVEKGKSKKLKSVKELLGITIMERSSFEKNPIDFLEAKGYKEVKKDLIIKLPKYSLFELENGRKRMLASAGELQKGNELALPSKYVNFLYLASHYEKLKGSPEDNEQKQLFVEQHKHYLDEIIEQISEFSKRVILADANLDKVLSAYNKHRDKPIREQAENIIHLFTLTNLGAPAAFKYFDTTIDRKRYTSTKEVLDATLIHQSITGLYETRIDLSQLGGDGGEAAAKGGGGGSGGLLGRDLLTKLKAQIQFSTEGPQVTWEDRPAMCLVLNLEEEYRLHEKPVPPSIDPSWLQLFPMVWAEKAGMGLANQVPPVVVELKSDASPVAVRQYPMSKEAREGIRPHIQRFLDLGILVPCQSPWNTPLLPVKKPGTNDYRPVQDLREVNKRVQDIHPTVPNPYNLLSSLPPSHTWYSVLDLKDAFFCLKLHPNSQPLFAFEWRDPEKGNTGQLTWTRLPQGFKNSPTLFNEALHRDLASFRALNPQVVMLQYVDDLLVAAPTYRDCKEGTRRLLQELSKLGYRVSAKKAQLCREEVTYLGYLLKGGKRWLTPARKATVMKIPTPTTPRQVREFLGTAGFCRLWIPGFASLAAPLYPLTRPKVPFTWTEAHQEAFGRIKEALLSAPALALPDLTKPFALYVDEKEGVARGVLTQTLGPWRRPVAYLSKKLDPVASGWPTCLKAIAAVALLLKDADKLTLGQNVLVIAPHNLESIVRQPPDRWMTNARMTHYQSLLLNERVSFAPPAILNPATLLPVESDDTPIHICSEILAEETGTRPDLRDQPLPGVPAWYTDGSSFIMDGRRQAGAAIVDNKRTVWASNLPEGTSAQKAELIALTQALRLAEGKSINIYTDSRYAFATAHVHGAIYKQRGWLTSAGKDIKNKEEILALLEAIHLPKRVAIIHCPGHQRGTDPVATGNRKADEAAKQAAQSTRILTETTKNAGKRTADGSEFEKRTADGSEFESPKKKAKVE

SEQ ID NO: 1647 - protein, 2127 aa, synthetic construct
MPAAKRVKLDGGDKKYSIGLDIGTNSVGWAVITDEYKVPSKKFKVLGNTDRHSIKKNLIGALLFDSGETAEATRLKRTARRRYTRRKNRICYLQEIFSNEMAKVDDSFFHRLEESFLVEEDKKHERHPIFGNIVDEVAYHEKYPTIYHLRKKLVDSTDKADLRLIYLALAHMIKFRGHFLIEGDLNPDNSDVDKLFIQLVQTYNQLFEENPINASGVDAKAILSARLSKSRRLENLIAQLPGEKKNGLFGNLIALSLGLTPNFKSNFDLAEDAKLQLSKDTYDDDLDNLLAQIGDQYADLFLAAKNLSDAILLSDILRVNTEITKAPLSASMIKRYDEHHQDLTLLKALVRQQLPEKYKEIFFDQSKNGYAGYIDGGASQEEFYKFIKPILEKMDGTEELLVKLNREDLLRKQRTFDNGSIPHQIHLGELHAILRRQEDFYPFLKDNREKIEKILTFRIPYYVGPLARGNSRFAWMTRKSEETITPWNFEEVVDKGASAQSFIERMTNFDKNLPNEKVLPKHSLLYEYFTVYNELTKVKYVTEGMRKPAFLSGEQKKAIVDLLFKTNRKVTVKQLKEDYFKKIECFDSVEISGVEDRFNASLGTYHDLLKIIKDKDFLDNEENEDILEDIVLTLTLFEDREMIEERLKTYAHLFDDKVMKQLKRRRYTGWGRLSRKLINGIRDKQSGKTILDFLKSDGFANRNFMQLIHDDSLTFKEDIQKAQVSGQGDSLHEHIANLAGSPAIKKGILQTVKVVDELVKVMGRHKPENIVIEMARENQTTQKGQKNSRERMKRIEEGIKELGSQILKEHPVENTQLQNEKLYLYYLQNGRDMYVDQELDINRLSDYDVDHIVPQSFLKDDSIDNKVLTRSDKARGKSDNVPSEEVVKKMKNYWRQLLNAKLITQRKFDNLTKAERGGLSELDKAGFIKRQLVETRQITKHVAQILDSRMNTKYDENDKLIREVKVITLKSKLVSDFRKDFQFYKVREINNYHHAHDAYLNAVVGTALIKKYPKLESEFVYGDYKVYDVRKMIAKSEQEIGKATAKYFFYSNIMNFFKTEITLANGEIRKRPLIETNGETGEIVWDKGRDFATVRKVLSMPQVNIVKKTEVQTGGFSKESILPKRNSDKLIARKKDWDPKKYGGFDSPTVAYSVLVVAKVEKGKSKKLKSVKELLGITIMERSSFEKNPIDFLEAKGYKEVKKDLIIKLPKYSLFELENGRKRMLASAGELQKGNELALPSKYVNFLYLASHYEKLKGSPEDNEQKQLFVEQHKHYLDEIIEQISEFSKRVILADANLDKVLSAYNKHRDKPIREQAENIIHLFTLTNLGAPAAFKYFDTTIDRKRYTSTKEVLDATLIHQSITGLYETRIDLSQLGGDGGGGSEAAAKGGGGGLLGRDLLTKLKAQIQFSTEGPQVTWEDRPAMCLVLNLEEEYRLHEKPVPPSIDPSWLQLFPMVWAEKAGMGLANQVPPVVVELKSDASPVAVRQYPMSKEAREGIRPHIQRFLDLGILVPCQSPWNTPLLPVKKPGTNDYRPVQDLREVNKRVQDIHPTVPNPYNLLSSLPPSHTWYSVLDLKDAFFCLKLHPNSQPLFAFEWRDPEKGNTGQLTWTRLPQGFKNSPTLFNEALHRDLASFRALNPQVVMLQYVDDLLVAAPTYRDCKEGTRRLLQELSKLGYRVSAKKAQLCREEVTYLGYLLKGGKRWLTPARKATVMKIPTPTTPRQVREFLGTAGFCRLWIPGFASLAAPLYPLTRPKVPFTWTEAHQEAFGRIKEALLSAPALALPDLTKPFALYVDEKEGVARGVLTQTLGPWRRPVAYLSKKLDPVASGWPTCLKAIAAVALLLKDADKLTLGQNVLVIAPHNLESIVRQPPDRWMTNARMTHYQSLLLNERVSFAPPAILNPATLLPVESDDTPIHICSEILAEETGTRPDLRDQPLPGVPAWYTDGSSFIMDGRRQAGAAIVDNKRTVWASNLPEGTSAQKAELIALTQALRLAEGKSINIYTDSRYAFATAHVHGAIYKQRGWLTSAGKDIKNKEEILALLEAIHLPKRVAIIHCPGHQRGTDPVATGNRKADEAAKQAAQSTRILTETTKNAGKRTADGSEFEKRTADGSEFESPKKKAKVE

SEQ ID NO: 1648 - protein, 2125 aa, synthetic construct
MPAAKRVKLDGGDKKYSIGLDIGTNSVGWAVITDEYKVPSKKFKVLGNTDRHSIKKNLIGALLFDSGETAEATRLKRTARRRYTRRKNRICYLQEIFSNEMAKVDDSFFHRLEESFLVEEDKKHERHPIFGNIVDEVAYHEKYPTIYHLRKKLVDSTDKADLRLIYLALAHMIKFRGHFLIEGDLNPDNSDVDKLFIQLVQTYNQLFEENPINASGVDAKAILSARLSKSRRLENLIAQLPGEKKNGLFGNLIALSLGLTPNFKSNFDLAEDAKLQLSKDTYDDDLDNLLAQIGDQYADLFLAAKNLSDAILLSDILRVNTEITKAPLSASMIKRYDEHHQDLTLLKALVRQQLPEKYKEIFFDQSKNGYAGYIDGGASQEEFYKFIKPILEKMDGTEELLVKLNREDLLRKQRTFDNGSIPHQIHLGELHAILRRQEDFYPFLKDNREKIEKILTFRIPYYVGPLARGNSRFAWMTRKSEETITPWNFEEVVDKGASAQSFIERMTNFDKNLPNEKVLPKHSLLYEYFTVYNELTKVKYVTEGMRKPAFLSGEQKKAIVDLLFKTNRKVTVKQLKEDYFKKIECFDSVEISGVEDRFNASLGTYHDLLKIIKDKDFLDNEENEDILEDIVLTLTLFEDREMIEERLKTYAHLFDDKVMKQLKRRRYTGWGRLSRKLINGIRDKQSGKTILDFLKSDGFANRNFMQLIHDDSLTFKEDIQKAQVSGQGDSLHEHIANLAGSPAIKKGILQTVKVVDELVKVMGRHKPENIVIEMARENQTTQKGQKNSRERMKRIEEGIKELGSQILKEHPVENTQLQNEKLYLYYLQNGRDMYVDQELDINRLSDYDVDHIVPQSFLKDDSIDNKVLTRSDKARGKSDNVPSEEVVKKMKNYWRQLLNAKLITQRKFDNLTKAERGGLSELDKAGFIKRQLVETRQITKHVAQILDSRMNTKYDENDKLIREVKVITLKSKLVSDFRKDFQFYKVREINNYHHAHDAYLNAVVGTALIKKYPKLESEFVYGDYKVYDVRKMIAKSEQEIGKATAKYFFYSNIMNFFKTEITLANGEIRKRPLIETNGETGEIVWDKGRDFATVRKVLSMPQVNIVKKTEVQTGGFSKESILPKRNSDKLIARKKDWDPKKYGGFDSPTVAYSVLVVAKVEKGKSKKLKSVKELLGITIMERSSFEKNPIDFLEAKGYKEVKKDLIIKLPKYSLFELENGRKRMLASAGELQKGNELALPSKYVNFLYLASHYEKLKGSPEDNEQKQLFVEQHKHYLDEIIEQISEFSKRVILADANLDKVLSAYNKHRDKPIREQAENIIHLFTLTNLGAPAAFKYFDTTIDRKRYTSTKEVLDATLIHQSITGLYETRIDLSQLGGDGGGGSPAPGSSGGLLGRDLLTKLKAQIQFSTEGPQVTWEDRPAMCLVLNLEEEYRLHEKPVPPSIDPSWLQLFPMVWAEKAGMGLANQVPPVVVELKSDASPVAVRQYPMSKEAREGIRPHIQRFLDLGILVPCQSPWNTPLLPVKKPGTNDYRPVQDLREVNKRVQDIHPTVPNPYNLLSSLPPSHTWYSVLDLKDAFFCLKLHPNSQPLFAFEWRDPEKGNTGQLTWTRLPQGFKNSPTLFNEALHRDLASFRALNPQVVMLQYVDDLLVAAPTYRDCKEGTRRLLQELSKLGYRVSAKKAQLCREEVTYLGYLLKGGKRWLTPARKATVMKIPTPTTPRQVREFLGTAGFCRLWIPGFASLAAPLYPLTRPKVPFTWTEAHQEAFGRIKEALLSAPALALPDLTKPFALYVDEKEGVARGVLTQTLGPWRRPVAYLSKKLDPVASGWPTCLKAIAAVALLLKDADKLTLGQNVLVIAPHNLESIVRQPPDRWMTNARMTHYQSLLLNERVSFAPPAILNPATLLPVESDDTPIHICSEILAEETGTRPDLRDQPLPGVPAWYTDGSSFIMDGRRQAGAAIVDNKRTVWASNLPEGTSAQKAELIALTQALRLAEGKSINIYTDSRYAFATAHVHGAIYKQRGWLTSAGKDIKNKEEILALLEAIHLPKRVAIIHCPGHQRGTDPVATGNRKADEAAKQAAQSTRILTETTKNAGKRTADGSEFEKRTADGSEFESPKKKAKVE

SEQ ID NO: 1649 - protein, 2149 aa, synthetic construct
MPAAKRVKLDGGDKKYSIGLDIGTNSVGWAVITDEYKVPSKKFKVLGNTDRHSIKKNLIGALLFDSGETAEATRLKRTARRRYTRRKNRICYLQEIFSNEMAKVDDSFFHRLEESFLVEEDKKHERHPIFGNIVDEVAYHEKYPTIYHLRKKLVDSTDKADLRLIYLALAHMIKFRGHFLIEGDLNPDNSDVDKLFIQLVQTYNQLFEENPINASGVDAKAILSARLSKSRRLENLIAQLPGEKKNGLFGNLIALSLGLTPNFKSNFDLAEDAKLQLSKDTYDDDLDNLLAQIGDQYADLFLAAKNLSDAILLSDILRVNTEITKAPLSASMIKRYDEHHQDLTLLKALVRQQLPEKYKEIFFDQSKNGYAGYIDGGASQEEFYKFIKPILEKMDGTEELLVKLNREDLLRKQRTFDNGSIPHQIHLGELHAILRRQEDFYPFLKDNREKIEKILTFRIPYYVGPLARGNSRFAWMTRKSEETITPWNFEEVVDKGASAQSFIERMTNFDKNLPNEKVLPKHSLLYEYFTVYNELTKVKYVTEGMRKPAFLSGEQKKAIVDLLFKTNRKVTVKQLKEDYFKKIECFDSVEISGVEDRFNASLGTYHDLLKIIKDKDFLDNEENEDILEDIVLTLTLFEDREMIEERLKTYAHLFDDKVMKQLKRRRYTGWGRLSRKLINGIRDKQSGKTILDFLKSDGFANRNFMQLIHDDSLTFKEDIQKAQVSGQGDSLHEHIANLAGSPAIKKGILQTVKVVDELVKVMGRHKPENIVIEMARENQTTQKGQKNSRERMKRIEEGIKELGSQILKEHPVENTQLQNEKLYLYYLQNGRDMYVDQELDINRLSDYDVDHIVPQSFLKDDSIDNKVLTRSDKARGKSDNVPSEEVVKKMKNYWRQLLNAKLITQRKFDNLTKAERGGLSELDKAGFIKRQLVETRQITKHVAQILDSRMNTKYDENDKLIREVKVITLKSKLVSDFRKDFQFYKVREINNYHHAHDAYLNAVVGTALIKKYPKLESEFVYGDYKVYDVRKMIAKSEQEIGKATAKYFFYSNIMNFFKTEITLANGEIRKRPLIETNGETGEIVWDKGRDFATVRKVLSMPQVNIVKKTEVQTGGFSKESILPKRNSDKLIARKKDWDPKKYGGFDSPTVAYSVLVVAKVEKGKSKKLKSVKELLGITIMERSSFEKNPIDFLEAKGYKEVKKDLIIKLPKYSLFELENGRKRMLASAGELQKGNELALPSKYVNFLYLASHYEKLKGSPEDNEQKQLFVEQHKHYLDEIIEQISEFSKRVILADANLDKVLSAYNKHRDKPIREQAENIIHLFTLTNLGAPAAFKYFDTTIDRKRYTSTKEVLDATLIHQSITGLYETRIDLSQLGGDGGSGGSSGGSSGSETPGTSESATPESSGGSSGGSSGGLLGRDLLTKLKAQIQFSTEGPQVTWEDRPAMCLVLNLEEEYRLHEKPVPPSIDPSWLQLFPMVWAEKAGMGLANQVPPVVVELKSDASPVAVRQYPMSKEAREGIRPHIQRFLDLGILVPCQSPWNTPLLPVKKPGTNDYRPVQDLREVNKRVQDIHPTVPNPYNLLSSLPPSHTWYSVLDLKDAFFCLKLHPNSQPLFAFEWRDPEKGNTGQLTWTRLPQGFKNSPTLFNEALHRDLASFRALNPQVVMLQYVDDLLVAAPTYRDCKEGTRRLLQELSKLGYRVSAKKAQLCREEVTYLGYLLKGGKRWLTPARKATVMKIPTPTTPRQVREFLGTAGFCRLWIPGFASLAAPLYPLTRPKVPFTWTEAHQEAFGRIKEALLSAPALALPDLTKPFALYVDEKEGVARGVLTQTLGPWRRPVAYLSKKLDPVASGWPTCLKAIAAVALLLKDADKLTLGQNVLVIAPHNLESIVRQPPDRWMTNARMTHYQSLLLNERVSFAPPAILNPATLLPVESDDTPIHICSEILAEETGTRPDLRDQPLPGVPAWYTDGSSFIMDGRRQAGAAIVDNKRTVWASNLPEGTSAQKAELIALTQALRLAEGKSINIYTDSRYAFATAHVHGAIYKQRGWLTSAGKDIKNKEEILALLEAIHLPKRVAIIHCPGHQRGTDPVATGNRKADEAAKQAAQSTRILTETTKNAGKRTADGSEFEKRTADGSEFESPKKKAKVE

SEQ ID NO: 1650 - protein, 2121 aa, synthetic construct
MPAAKRVKLDGGDKKYSIGLDIGTNSVGWAVITDEYKVPSKKFKVLGNTDRHSIKKNLIGALLFDSGETAEATRLKRTARRRYTRRKNRICYLQEIFSNEMAKVDDSFFHRLEESFLVEEDKKHERHPIFGNIVDEVAYHEKYPTIYHLRKKLVDSTDKADLRLIYLALAHMIKFRGHFLIEGDLNPDNSDVDKLFIQLVQTYNQLFEENPINASGVDAKAILSARLSKSRRLENLIAQLPGEKKNGLFGNLIALSLGLTPNFKSNFDLAEDAKLQLSKDTYDDDLDNLLAQIGDQYADLFLAAKNLSDAILLSDILRVNTEITKAPLSASMIKRYDEHHQDLTLLKALVRQQLPEKYKEIFFDQSKNGYAGYIDGGASQEEFYKFIKPILEKMDGTEELLVKLNREDLLRKQRTFDNGSIPHQIHLGELHAILRRQEDFYPFLKDNREKIEKILTFRIPYYVGPLARGNSRFAWMTRKSEETITPWNFEEVVDKGASAQSFIERMTNFDKNLPNEKVLPKHSLLYEYFTVYNELTKVKYVTEGMRKPAFLSGEQKKAIVDLLFKTNRKVTVKQLKEDYFKKIECFDSVEISGVEDRFNASLGTYHDLLKIIKDKDFLDNEENEDILEDIVLTLTLFEDREMIEERLKTYAHLFDDKVMKQLKRRRYTGWGRLSRKLINGIRDKQSGKTILDFLKSDGFANRNFMQLIHDDSLTFKEDIQKAQVSGQGDSLHEHIANLAGSPAIKKGILQTVKVVDELVKVMGRHKPENIVIEMARENQTTQKGQKNSRERMKRIEEGIKELGSQILKEHPVENTQLQNEKLYLYYLQNGRDMYVDQELDINRLSDYDVDHIVPQSFLKDDSIDNKVLTRSDKARGKSDNVPSEEVVKKMKNYWRQLLNAKLITQRKFDNLTKAERGGLSELDKAGFIKRQLVETRQITKHVAQILDSRMNTKYDENDKLIREVKVITLKSKLVSDFRKDFQFYKVREINNYHHAHDAYLNAVVGTALIKKYPKLESEFVYGDYKVYDVRKMIAKSEQEIGKATAKYFFYSNIMNFFKTEITLANGEIRKRPLIETNGETGEIVWDKGRDFATVRKVLSMPQVNIVKKTEVQTGGFSKESILPKRNSDKLIARKKDWDPKKYGGFDSPTVAYSVLVVAKVEKGKSKKLKSVKELLGITIMERSSFEKNPIDFLEAKGYKEVKKDLIIKLPKYSLFELENGRKRMLASAGELQKGNELALPSKYVNFLYLASHYEKLKGSPEDNEQKQLFVEQHKHYLDEIIEQISEFSKRVILADANLDKVLSAYNKHRDKPIREQAENIIHLFTLTNLGAPAAFKYFDTTIDRKRYTSTKEVLDATLIHQSITGLYETRIDLSQLGGDGGGGGGSGGLLGRDLLTKLKAQIQFSTEGPQVTWEDRPAMCLVLNLEEEYRLHEKPVPPSIDPSWLQLFPMVWAEKAGMGLANQVPPVVVELKSDASPVAVRQYPMSKEAREGIRPHIQRFLDLGILVPCQSPWNTPLLPVKKPGTNDYRPVQDLREVNKRVQDIHPTVPNPYNLLSSLPPSHTWYSVLDLKDAFFCLKLHPNSQPLFAFEWRDPEKGNTGQLTWTRLPQGFKNSPTLFNEALHRDLASFRALNPQVVMLQYVDDLLVAAPTYRDCKEGTRRLLQELSKLGYRVSAKKAQLCREEVTYLGYLLKGGKRWLTPARKATVMKIPTPTTPRQVREFLGTAGFCRLWIPGFASLAAPLYPLTRPKVPFTWTEAHQEAFGRIKEALLSAPALALPDLTKPFALYVDEKEGVARGVLTQTLGPWRRPVAYLSKKLDPVASGWPTCLKAIAAVALLLKDADKLTLGQNVLVIAPHNLESIVRQPPDRWMTNARMTHYQSLLLNERVSFAPPAILNPATLLPVESDDTPIHICSEILAEETGTRPDLRDQPLPGVPAWYTDGSSFIMDGRRQAGAAIVDNKRTVWASNLPEGTSAQKAELIALTQALRLAEGKSINIYTDSRYAFATAHVHGAIYKQRGWLTSAGKDIKNKEEILALLEAIHLPKRVAIIHCPGHQRGTDPVATGNRKADEAAKQAAQSTRILTETTKNAGKRTADGSEFEKRTADGSEFESPKKKAKVE

SEQ ID NO: 1651 - protein, 2125 aa, synthetic construct
MPAAKRVKLDGGDKKYSIGLDIGTNSVGWAVITDEYKVPSKKFKVLGNTDRHSIKKNLIGALLFDSGETAEATRLKRTARRRYTRRKNRICYLQEIFSNEMAKVDDSFFHRLEESFLVEEDKKHERHPIFGNIVDEVAYHEKYPTIYHLRKKLVDSTDKADLRLIYLALAHMIKFRGHFLIEGDLNPDNSDVDKLFIQLVQTYNQLFEENPINASGVDAKAILSARLSKSRRLENLIAQLPGEKKNGLFGNLIALSLGLTPNFKSNFDLAEDAKLQLSKDTYDDDLDNLLAQIGDQYADLFLAAKNLSDAILLSDILRVNTEITKAPLSASMIKRYDEHHQDLTLLKALVRQQLPEKYKEIFFDQSKNGYAGYIDGGASQEEFYKFIKPILEKMDGTEELLVKLNREDLLRKQRTFDNGSIPHQIHLGELHAILRRQEDFYPFLKDNREKIEKILTFRIPYYVGPLARGNSRFAWMTRKSEETITPWNFEEVVDKGASAQSFIERMTNFDKNLPNEKVLPKHSLLYEYFTVYNELTKVKYVTEGMRKPAFLSGEQKKAIVDLLFKTNRKVTVKQLKEDYFKKIECFDSVEISGVEDRFNASLGTYHDLLKIIKDKDFLDNEENEDILEDIVLTLTLFEDREMIEERLKTYAHLFDDKVMKQLKRRRYTGWGRLSRKLINGIRDKQSGKTILDFLKSDGFANRNFMQLIHDDSLTFKEDIQKAQVSGQGDSLHEHIANLAGSPAIKKGILQTVKVVDELVKVMGRHKPENIVIEMARENQTTQKGQKNSRERMKRIEEGIKELGSQILKEHPVENTQLQNEKLYLYYLQNGRDMYVDQELDINRLSDYDVDHIVPQSFLKDDSIDNKVLTRSDKARGKSDNVPSEEVVKKMKNYWRQLLNAKLITQRKFDNLTKAERGGLSELDKAGFIKRQLVETRQITKHVAQILDSRMNTKYDENDKLIREVKVITLKSKLVSDFRKDFQFYKVREINNYHHAHDAYLNAVVGTALIKKYPKLESEFVYGDYKVYDVRKMIAKSEQEIGKATAKYFFYSNIMNFFKTEITLANGEIRKRPLIETNGETGEIVWDKGRDFATVRKVLSMPQVNIVKKTEVQTGGFSKESILPKRNSDKLIARKKDWDPKKYGGFDSPTVAYSVLVVAKVEKGKSKKLKSVKELLGITIMERSSFEKNPIDFLEAKGYKEVKKDLIIKLPKYSLFELENGRKRMLASAGELQKGNELALPSKYVNFLYLASHYEKLKGSPEDNEQKQLFVEQHKHYLDEIIEQISEFSKRVILADANLDKVLSAYNKHRDKPIREQAENIIHLFTLTNLGAPAAFKYFDTTIDRKRYTSTKEVLDATLIHQSITGLYETRIDLSQLGGDGGPAPGSSGGSGGLLGRDLLTKLKAQIQFSTEGPQVTWEDRPAMCLVLNLEEEYRLHEKPVPPSIDPSWLQLFPMVWAEKAGMGLANQVPPVVVELKSDASPVAVRQYPMSKEAREGIRPHIQRFLDLGILVPCQSPWNTPLLPVKKPGTNDYRPVQDLREVNKRVQDIHPTVPNPYNLLSSLPPSHTWYSVLDLKDAFFCLKLHPNSQPLFAFEWRDPEKGNTGQLTWTRLPQGFKNSPTLFNEALHRDLASFRALNPQVVMLQYVDDLLVAAPTYRDCKEGTRRLLQELSKLGYRVSAKKAQLCREEVTYLGYLLKGGKRWLTPARKATVMKIPTPTTPRQVREFLGTAGFCRLWIPGFASLAAPLYPLTRPKVPFTWTEAHQEAFGRIKEALLSAPALALPDLTKPFALYVDEKEGVARGVLTQTLGPWRRPVAYLSKKLDPVASGWPTCLKAIAAVALLLKDADKLTLGQNVLVIAPHNLESIVRQPPDRWMTNARMTHYQSLLLNERVSFAPPAILNPATLLPVESDDTPIHICSEILAEETGTRPDLRDQPLPGVPAWYTDGSSFIMDGRRQAGAAIVDNKRTVWASNLPEGTSAQKAELIALTQALRLAEGKSINIYTDSRYAFATAHVHGAIYKQRGWLTSAGKDIKNKEEILALLEAIHLPKRVAIIHCPGHQRGTDPVATGNRKADEAAKQAAQSTRILTETTKNAGKRTADGSEFEKRTADGSEFESPKKKAKVE

SEQ ID NO: 1652 - protein, 2125 aa, synthetic construct
MPAAKRVKLDGGDKKYSIGLDIGTNSVGWAVITDEYKVPSKKFKVLGNTDRHSIKKNLIGALLFDSGETAEATRLKRTARRRYTRRKNRICYLQEIFSNEMAKVDDSFFHRLEESFLVEEDKKHERHPIFGNIVDEVAYHEKYPTIYHLRKKLVDSTDKADLRLIYLALAHMIKFRGHFLIEGDLNPDNSDVDKLFIQLVQTYNQLFEENPINASGVDAKAILSARLSKSRRLENLIAQLPGEKKNGLFGNLIALSLGLTPNFKSNFDLAEDAKLQLSKDTYDDDLDNLLAQIGDQYADLFLAAKNLSDAILLSDILRVNTEITKAPLSASMIKRYDEHHQDLTLLKALVRQQLPEKYKEIFFDQSKNGYAGYIDGGASQEEFYKFIKPILEKMDGTEELLVKLNREDLLRKQRTFDNGSIPHQIHLGELHAILRRQEDFYPFLKDNREKIEKILTFRIPYYVGPLARGNSRFAWMTRKSEETITPWNFEEVVDKGASAQSFIERMTNFDKNLPNEKVLPKHSLLYEYFTVYNELTKVKYVTEGMRKPAFLSGEQKKAIVDLLFKTNRKVTVKQLKEDYFKKIECFDSVEISGVEDRFNASLGTYHDLLKIIKDKDFLDNEENEDILEDIVLTLTLFEDREMIEERLKTYAHLFDDKVMKQLKRRRYTGWGRLSRKLINGIRDKQSGKTILDFLKSDGFANRNFMQLIHDDSLTFKEDIQKAQVSGQGDSLHEHIANLAGSPAIKKGILQTVKVVDELVKVMGRHKPENIVIEMARENQTTQKGQKNSRERMKRIEEGIKELGSQILKEHPVENTQLQNEKLYLYYLQNGRDMYVDQELDINRLSDYDVDHIVPQSFLKDDSIDNKVLTRSDKARGKSDNVPSEEVVKKMKNYWRQLLNAKLITQRKFDNLTKAERGGLSELDKAGFIKRQLVETRQITKHVAQILDSRMNTKYDENDKLIREVKVITLKSKLVSDFRKDFQFYKVREINNYHHAHDAYLNAVVGTALIKKYPKLESEFVYGDYKVYDVRKMIAKSEQEIGKATAKYFFYSNIMNFFKTEITLANGEIRKRPLIETNGETGEIVWDKGRDFATVRKVLSMPQVNIVKKTEVQTGGFSKESILPKRNSDKLIARKKDWDPKKYGGFDSPTVAYSVLVVAKVEKGKSKKLKSVKELLGITIMERSSFEKNPIDFLEAKGYKEVKKDLIIKLPKYSLFELENGRKRMLASAGELQKGNELALPSKYVNFLYLASHYEKLKGSPEDNEQKQLFVEQHKHYLDEIIEQISEFSKRVILADANLDKVLSAYNKHRDKPIREQAENIIHLFTLTNLGAPAAFKYFDTTIDRKRYTSTKEVLDATLIHQSITGLYETRIDLSQLGGDGGPAPGGSGGGGGLLGRDLLTKLKAQIQFSTEGPQVTWEDRPAMCLVLNLEEEYRLHEKPVPPSIDPSWLQLFPMVWAEKAGMGLANQVPPVVVELKSDASPVAVRQYPMSKEAREGIRPHIQRFLDLGILVPCQSPWNTPLLPVKKPGTNDYRPVQDLREVNKRVQDIHPTVPNPYNLLSSLPPSHTWYSVLDLKDAFFCLKLHPNSQPLFAFEWRDPEKGNTGQLTWTRLPQGFKNSPTLFNEALHRDLASFRALNPQVVMLQYVDDLLVAAPTYRDCKEGTRRLLQELSKLGYRVSAKKAQLCREEVTYLGYLLKGGKRWLTPARKATVMKIPTPTTPRQVREFLGTAGFCRLWIPGFASLAAPLYPLTRPKVPFTWTEAHQEAFGRIKEALLSAPALALPDLTKPFALYVDEKEGVARGVLTQTLGPWRRPVAYLSKKLDPVASGWPTCLKAIAAVALLLKDADKLTLGQNVLVIAPHNLESIVRQPPDRWMTNARMTHYQSLLLNERVSFAPPAILNPATLLPVESDDTPIHICSEILAEETGTRPDLRDQPLPGVPAWYTDGSSFIMDGRRQAGAAIVDNKRTVWASNLPEGTSAQKAELIALTQALRLAEGKSINIYTDSRYAFATAHVHGAIYKQRGWLTSAGKDIKNKEEILALLEAIHLPKRVAIIHCPGHQRGTDPVATGNRKADEAAKQAAQSTRILTETTKNAGKRTADGSEFEKRTADGSEFESPKKKAKVE

SEQ ID NO: 1653 - protein, 2125 aa, synthetic construct
MPAAKRVKLDGGDKKYSIGLDIGTNSVGWAVITDEYKVPSKKFKVLGNTDRHSIKKNLIGALLFDSGETAEATRLKRTARRRYTRRKNRICYLQEIFSNEMAKVDDSFFHRLEESFLVEEDKKHERHPIFGNIVDEVAYHEKYPTIYHLRKKLVDSTDKADLRLIYLALAHMIKFRGHFLIEGDLNPDNSDVDKLFIQLVQTYNQLFEENPINASGVDAKAILSARLSKSRRLENLIAQLPGEKKNGLFGNLIALSLGLTPNFKSNFDLAEDAKLQLSKDTYDDDLDNLLAQIGDQYADLFLAAKNLSDAILLSDILRVNTEITKAPLSASMIKRYDEHHQDLTLLKALVRQQLPEKYKEIFFDQSKNGYAGYIDGGASQEEFYKFIKPILEKMDGTEELLVKLNREDLLRKQRTFDNGSIPHQIHLGELHAILRRQEDFYPFLKDNREKIEKILTFRIPYYVGPLARGNSRFAWMTRKSEETITPWNFEEVVDKGASAQSFIERMTNFDKNLPNEKVLPKHSLLYEYFTVYNELTKVKYVTEGMRKPAFLSGEQKKAIVDLLFKTNRKVTVKQLKEDYFKKIECFDSVEISGVEDRFNASLGTYHDLLKIIKDKDFLDNEENEDILEDIVLTLTLFEDREMIEERLKTYAHLFDDKVMKQLKRRRYTGWGRLSRKLINGIRDKQSGKTILDFLKSDGFANRNFMQLIHDDSLTFKEDIQKAQVSGQGDSLHEHIANLAGSPAIKKGILQTVKVVDELVKVMGRHKPENIVIEMARENQTTQKGQKNSRERMKRIEEGIKELGSQILKEHPVENTQLQNEKLYLYYLQNGRDMYVDQELDINRLSDYDVDHIVPQSFLKDDSIDNKVLTRSDKARGKSDNVPSEEVVKKMKNYWRQLLNAKLITQRKFDNLTKAERGGLSELDKAGFIKRQLVETRQITKHVAQILDSRMNTKYDENDKLIREVKVITLKSKLVSDFRKDFQFYKVREINNYHHAHDAYLNAVVGTALIKKYPKLESEFVYGDYKVYDVRKMIAKSEQEIGKATAKYFFYSNIMNFFKTEITLANGEIRKRPLIETNGETGEIVWDKGRDFATVRKVLSMPQVNIVKKTEVQTGGFSKESILPKRNSDKLIARKKDWDPKKYGGFDSPTVAYSVLVVAKVEKGKSKKLKSVKELLGITIMERSSFEKNPIDFLEAKGYKEVKKDLIIKLPKYSLFELENGRKRMLASAGELQKGNELALPSKYVNFLYLASHYEKLKGSPEDNEQKQLFVEQHKHYLDEIIEQISEFSKRVILADANLDKVLSAYNKHRDKPIREQAENIIHLFTLTNLGAPAAFKYFDTTIDRKRYTSTKEVLDATLIHQSITGLYETRIDLSQLGGDGGGGGGGSPAPGGLLGRDLLTKLKAQIQFSTEGPQVTWEDRPAMCLVLNLEEEYRLHEKPVPPSIDPSWLQLFPMVWAEKAGMGLANQVPPVVVELKSDASPVAVRQYPMSKEAREGIRPHIQRFLDLGILVPCQSPWNTPLLPVKKPGTNDYRPVQDLREVNKRVQDIHPTVPNPYNLLSSLPPSHTWYSVLDLKDAFFCLKLHPNSQPLFAFEWRDPEKGNTGQLTWTRLPQGFKNSPTLFNEALHRDLASFRALNPQVVMLQYVDDLLVAAPTYRDCKEGTRRLLQELSKLGYRVSAKKAQLCREEVTYLGYLLKGGKRWLTPARKATVMKIPTPTTPRQVREFLGTAGFCRLWIPGFASLAAPLYPLTRPKVPFTWTEAHQEAFGRIKEALLSAPALALPDLTKPFALYVDEKEGVARGVLTQTLGPWRRPVAYLSKKLDPVASGWPTCLKAIAAVALLLKDADKLTLGQNVLVIAPHNLESIVRQPPDRWMTNARMTHYQSLLLNERVSFAPPAILNPATLLPVESDDTPIHICSEILAEETGTRPDLRDQPLPGVPAWYTDGSSFIMDGRRQAGAAIVDNKRTVWASNLPEGTSAQKAELIALTQALRLAEGKSINIYTDSRYAFATAHVHGAIYKQRGWLTSAGKDIKNKEEILALLEAIHLPKRVAIIHCPGHQRGTDPVATGNRKADEAAKQAAQSTRILTETTKNAGKRTADGSEFEKRTADGSEFESPKKKAKVE

SEQ ID NO: 1654 - protein, 2127 aa, synthetic construct
MPAAKRVKLDGGDKKYSIGLDIGTNSVGWAVITDEYKVPSKKFKVLGNTDRHSIKKNLIGALLFDSGETAEATRLKRTARRRYTRRKNRICYLQEIFSNEMAKVDDSFFHRLEESFLVEEDKKHERHPIFGNIVDEVAYHEKYPTIYHLRKKLVDSTDKADLRLIYLALAHMIKFRGHFLIEGDLNPDNSDVDKLFIQLVQTYNQLFEENPINASGVDAKAILSARLSKSRRLENLIAQLPGEKKNGLFGNLIALSLGLTPNFKSNFDLAEDAKLQLSKDTYDDDLDNLLAQIGDQYADLFLAAKNLSDAILLSDILRVNTEITKAPLSASMIKRYDEHHQDLTLLKALVRQQLPEKYKEIFFDQSKNGYAGYIDGGASQEEFYKFIKPILEKMDGTEELLVKLNREDLLRKQRTFDNGSIPHQIHLGELHAILRRQEDFYPFLKDNREKIEKILTFRIPYYVGPLARGNSRFAWMTRKSEETITPWNFEEVVDKGASAQSFIERMTNFDKNLPNEKVLPKHSLLYEYFTVYNELTKVKYVTEGMRKPAFLSGEQKKAIVDLLFKTNRKVTVKQLKEDYFKKIECFDSVEISGVEDRFNASLGTYHDLLKIIKDKDFLDNEENEDILEDIVLTLTLFEDREMIEERLKTYAHLFDDKVMKQLKRRRYTGWGRLSRKLINGIRDKQSGKTILDFLKSDGFANRNFMQLIHDDSLTFKEDIQKAQVSGQGDSLHEHIANLAGSPAIKKGILQTVKVVDELVKVMGRHKPENIVIEMARENQTTQKGQKNSRERMKRIEEGIKELGSQILKEHPVENTQLQNEKLYLYYLQNGRDMYVDQELDINRLSDYDVDHIVPQSFLKDDSIDNKVLTRSDKARGKSDNVPSEEVVKKMKNYWRQLLNAKLITQRKFDNLTKAERGGLSELDKAGFIKRQLVETRQITKHVAQILDSRMNTKYDENDKLIREVKVITLKSKLVSDFRKDFQFYKVREINNYHHAHDAYLNAVVGTALIKKYPKLESEFVYGDYKVYDVRKMIAKSEQEIGKATAKYFFYSNIMNFFKTEITLANGEIRKRPLIETNGETGEIVWDKGRDFATVRKVLSMPQVNIVKKTEVQTGGFSKESILPKRNSDKLIARKKDWDPKKYGGFDSPTVAYSVLVVAKVEKGKSKKLKSVKELLGITIMERSSFEKNPIDFLEAKGYKEVKKDLIIKLPKYSLFELENGRKRMLASAGELQKGNELALPSKYVNFLYLASHYEKLKGSPEDNEQKQLFVEQHKHYLDEIIEQISEFSKRVILADANLDKVLSAYNKHRDKPIREQAENIIHLFTLTNLGAPAAFKYFDTTIDRKRYTSTKEVLDATLIHQSITGLYETRIDLSQLGGDGGGGSEAAAKPAPGGLLGRDLLTKLKAQIQFSTEGPQVTWEDRPAMCLVLNLEEEYRLHEKPVPPSIDPSWLQLFPMVWAEKAGMGLANQVPPVVVELKSDASPVAVRQYPMSKEAREGIRPHIQRFLDLGILVPCQSPWNTPLLPVKKPGTNDYRPVQDLREVNKRVQDIHPTVPNPYNLLSSLPPSHTWYSVLDLKDAFFCLKLHPNSQPLFAFEWRDPEKGNTGQLTWTRLPQGFKNSPTLFNEALHRDLASFRALNPQVVMLQYVDDLLVAAPTYRDCKEGTRRLLQELSKLGYRVSAKKAQLCREEVTYLGYLLKGGKRWLTPARKATVMKIPTPTTPRQVREFLGTAGFCRLWIPGFASLAAPLYPLTRPKVPFTWTEAHQEAFGRIKEALLSAPALALPDLTKPFALYVDEKEGVARGVLTQTLGPWRRPVAYLSKKLDPVASGWPTCLKAIAAVALLLKDADKLTLGQNVLVIAPHNLESIVRQPPDRWMTNARMTHYQSLLLNERVSFAPPAILNPATLLPVESDDTPIHICSEILAEETGTRPDLRDQPLPGVPAWYTDGSSFIMDGRRQAGAAIVDNKRTVWASNLPEGTSAQKAELIALTQALRLAEGKSINIYTDSRYAFATAHVHGAIYKQRGWLTSAGKDIKNKEEILALLEAIHLPKRVAIIHCPGHQRGTDPVATGNRKADEAAKQAAQSTRILTETTKNAGKRTADGSEFEKRTADGSEFESPKKKAKVE

SEQ ID NO: 1655 - protein, 2125 aa, synthetic construct
MPAAKRVKLDGGDKKYSIGLDIGTNSVGWAVITDEYKVPSKKFKVLGNTDRHSIKKNLIGALLFDSGETAEATRLKRTARRRYTRRKNRICYLQEIFSNEMAKVDDSFFHRLEESFLVEEDKKHERHPIFGNIVDEVAYHEKYPTIYHLRKKLVDSTDKADLRLIYLALAHMIKFRGHFLIEGDLNPDNSDVDKLFIQLVQTYNQLFEENPINASGVDAKAILSARLSKSRRLENLIAQLPGEKKNGLFGNLIALSLGLTPNFKSNFDLAEDAKLQLSKDTYDDDLDNLLAQIGDQYADLFLAAKNLSDAILLSDILRVNTEITKAPLSASMIKRYDEHHQDLTLLKALVRQQLPEKYKEIFFDQSKNGYAGYIDGGASQEEFYKFIKPILEKMDGTEELLVKLNREDLLRKQRTFDNGSIPHQIHLGELHAILRRQEDFYPFLKDNREKIEKILTFRIPYYVGPLARGNSRFAWMTRKSEETITPWNFEEVVDKGASAQSFIERMTNFDKNLPNEKVLPKHSLLYEYFTVYNELTKVKYVTEGMRKPAFLSGEQKKAIVDLLFKTNRKVTVKQLKEDYFKKIECFDSVEISGVEDRFNASLGTYHDLLKIIKDKDFLDNEENEDILEDIVLTLTLFEDREMIEERLKTYAHLFDDKVMKQLKRRRYTGWGRLSRKLINGIRDKQSGKTILDFLKSDGFANRNFMQLIHDDSLTFKEDIQKAQVSGQGDSLHEHIANLAGSPAIKKGILQTVKVVDELVKVMGRHKPENIVIEMARENQTTQKGQKNSRERMKRIEEGIKELGSQILKEHPVENTQLQNEKLYLYYLQNGRDMYVDQELDINRLSDYDVDHIVPQSFLKDDSIDNKVLTRSDKARGKSDNVPSEEVVKKMKNYWRQLLNAKLITQRKFDNLTKAERGGLSELDKAGFIKRQLVETRQITKHVAQILDSRMNTKYDENDKLIREVKVITLKSKLVSDFRKDFQFYKVREINNYHHAHDAYLNAVVGTALIKKYPKLESEFVYGDYKVYDVRKMIAKSEQEIGKATAKYFFYSNIMNFFKTEITLANGEIRKRPLIETNGETGEIVWDKGRDFATVRKVLSMPQVNIVKKTEVQTGGFSKESILPKRNSDKLIARKKDWDPKKYGGFDSPTVAYSVLVVAKVEKGKSKKLKSVKELLGITIMERSSFEKNPIDFLEAKGYKEVKKDLIIKLPKYSLFELENGRKRMLASAGELQKGNELALPSKYVNFLYLASHYEKLKGSPEDNEQKQLFVEQHKHYLDEIIEQISEFSKRVILADANLDKVLSAYNKHRDKPIREQAENIIHLFTLTNLGAPAAFKYFDTTIDRKRYTSTKEVLDATLIHQSITGLYETRIDLSQLGGDGGGGSGGSGGSGGLLGRDLLTKLKAQIQFSTEGPQVTWEDRPAMCLVLNLEEEYRLHEKPVPPSIDPSWLQLFPMVWAEKAGMGLANQVPPVVVELKSDASPVAVRQYPMSKEAREGIRPHIQRFLDLGILVPCQSPWNTPLLPVKKPGTNDYRPVQDLREVNKRVQDIHPTVPNPYNLLSSLPPSHTWYSVLDLKDAFFCLKLHPNSQPLFAFEWRDPEKGNTGQLTWTRLPQGFKNSPTLFNEALHRDLASFRALNPQVVMLQYVDDLLVAAPTYRDCKEGTRRLLQELSKLGYRVSAKKAQLCREEVTYLGYLLKGGKRWLTPARKATVMKIPTPTTPRQVREFLGTAGFCRLWIPGFASLAAPLYPLTRPKVPFTWTEAHQEAFGRIKEALLSAPALALPDLTKPFALYVDEKEGVARGVLTQTLGPWRRPVAYLSKKLDPVASGWPTCLKAIAAVALLLKDADKLTLGQNVLVIAPHNLESIVRQPPDRWMTNARMTHYQSLLLNERVSFAPPAILNPATLLPVESDDTPIHICSEILAEETGTRPDLRDQPLPGVPAWYTDGSSFIMDGRRQAGAAIVDNKRTVWASNLPEGTSAQKAELIALTQALRLAEGKSINIYTDSRYAFATAHVHGAIYKQRGWLTSAGKDIKNKEEILALLEAIHLPKRVAIIHCPGHQRGTDPVATGNRKADEAAKQAAQSTRILTETTKNAGKRTADGSEFEKRTADGSEFESPKKKAKVE

SEQ ID NO: 1656 - protein, 2127 aa, synthetic construct
MPAAKRVKLDGGDKKYSIGLDIGTNSVGWAVITDEYKVPSKKFKVLGNTDRHSIKKNLIGALLFDSGETAEATRLKRTARRRYTRRKNRICYLQEIFSNEMAKVDDSFFHRLEESFLVEEDKKHERHPIFGNIVDEVAYHEKYPTIYHLRKKLVDSTDKADLRLIYLALAHMIKFRGHFLIEGDLNPDNSDVDKLFIQLVQTYNQLFEENPINASGVDAKAILSARLSKSRRLENLIAQLPGEKKNGLFGNLIALSLGLTPNFKSNFDLAEDAKLQLSKDTYDDDLDNLLAQIGDQYADLFLAAKNLSDAILLSDILRVNTEITKAPLSASMIKRYDEHHQDLTLLKALVRQQLPEKYKEIFFDQSKNGYAGYIDGGASQEEFYKFIKPILEKMDGTEELLVKLNREDLLRKQRTFDNGSIPHQIHLGELHAILRRQEDFYPFLKDNREKIEKILTFRIPYYVGPLARGNSRFAWMTRKSEETITPWNFEEVVDKGASAQSFIERMTNFDKNLPNEKVLPKHSLLYEYFTVYNELTKVKYVTEGMRKPAFLSGEQKKAIVDLLFKTNRKVTVKQLKEDYFKKIECFDSVEISGVEDRFNASLGTYHDLLKIIKDKDFLDNEENEDILEDIVLTLTLFEDREMIEERLKTYAHLFDDKVMKQLKRRRYTGWGRLSRKLINGIRDKQSGKTILDFLKSDGFANRNFMQLIHDDSLTFKEDIQKAQVSGQGDSLHEHIANLAGSPAIKKGILQTVKVVDELVKVMGRHKPENIVIEMARENQTTQKGQKNSRERMKRIEEGIKELGSQILKEHPVENTQLQNEKLYLYYLQNGRDMYVDQELDINRLSDYDVDHIVPQSFLKDDSIDNKVLTRSDKARGKSDNVPSEEVVKKMKNYWRQLLNAKLITQRKFDNLTKAERGGLSELDKAGFIKRQLVETRQITKHVAQILDSRMNTKYDENDKLIREVKVITLKSKLVSDFRKDFQFYKVREINNYHHAHDAYLNAVVGTALIKKYPKLESEFVYGDYKVYDVRKMIAKSEQEIGKATAKYFFYSNIMNFFKTEITLANGEIRKRPLIETNGETGEIVWDKGRDFATVRKVLSMPQVNIVKKTEVQTGGFSKESILPKRNSDKLIARKKDWDPKKYGGFDSPTVAYSVLVVAKVEKGKSKKLKSVKELLGITIMERSSFEKNPIDFLEAKGYKEVKKDLIIKLPKYSLFELENGRKRMLASAGELQKGNELALPSKYVNFLYLASHYEKLKGSPEDNEQKQLFVEQHKHYLDEIIEQISEFSKRVILADANLDKVLSAYNKHRDKPIREQAENIIHLFTLTNLGAPAAFKYFDTTIDRKRYTSTKEVLDATLIHQSITGLYETRIDLSQLGGDGGPAPEAAAKGSSGGLLGRDLLTKLKAQIQFSTEGPQVTWEDRPAMCLVLNLEEEYRLHEKPVPPSIDPSWLQLFPMVWAEKAGMGLANQVPPVVVELKSDASPVAVRQYPMSKEAREGIRPHIQRFLDLGILVPCQSPWNTPLLPVKKPGTNDYRPVQDLREVNKRVQDIHPTVPNPYNLLSSLPPSHTWYSVLDLKDAFFCLKLHPNSQPLFAFEWRDPEKGNTGQLTWTRLPQGFKNSPTLFNEALHRDLASFRALNPQVVMLQYVDDLLVAAPTYRDCKEGTRRLLQELSKLGYRVSAKKAQLCREEVTYLGYLLKGGKRWLTPARKATVMKIPTPTTPRQVREFLGTAGFCRLWIPGFASLAAPLYPLTRPKVPFTWTEAHQEAFGRIKEALLSAPALALPDLTKPFALYVDEKEGVARGVLTQTLGPWRRPVAYLSKKLDPVASGWPTCLKAIAAVALLLKDADKLTLGQNVLVIAPHNLESIVRQPPDRWMTNARMTHYQSLLLNERVSFAPPAILNPATLLPVESDDTPIHICSEILAEETGTRPDLRDQPLPGVPAWYTDGSSFIMDGRRQAGAAIVDNKRTVWASNLPEGTSAQKAELIALTQALRLAEGKSINIYTDSRYAFATAHVHGAIYKQRGWLTSAGKDIKNKEEILALLEAIHLPKRVAIIHCPGHQRGTDPVATGNRKADEAAKQAAQSTRILTETTKNAGKRTADGSEFEKRTADGSEFESPKKKAKVE

SEQ ID NO: 1657 - protein, 2122 aa, synthetic construct
MPAAKRVKLDGGDKKYSIGLDIGTNSVGWAVITDEYKVPSKKFKVLGNTDRHSIKKNLIGALLFDSGETAEATRLKRTARRRYTRRKNRICYLQEIFSNEMAKVDDSFFHRLEESFLVEEDKKHERHPIFGNIVDEVAYHEKYPTIYHLRKKLVDSTDKADLRLIYLALAHMIKFRGHFLIEGDLNPDNSDVDKLFIQLVQTYNQLFEENPINASGVDAKAILSARLSKSRRLENLIAQLPGEKKNGLFGNLIALSLGLTPNFKSNFDLAEDAKLQLSKDTYDDDLDNLLAQIGDQYADLFLAAKNLSDAILLSDILRVNTEITKAPLSASMIKRYDEHHQDLTLLKALVRQQLPEKYKEIFFDQSKNGYAGYIDGGASQEEFYKFIKPILEKMDGTEELLVKLNREDLLRKQRTFDNGSIPHQIHLGELHAILRRQEDFYPFLKDNREKIEKILTFRIPYYVGPLARGNSRFAWMTRKSEETITPWNFEEVVDKGASAQSFIERMTNFDKNLPNEKVLPKHSLLYEYFTVYNELTKVKYVTEGMRKPAFLSGEQKKAIVDLLFKTNRKVTVKQLKEDYFKKIECFDSVEISGVEDRFNASLGTYHDLLKIIKDKDFLDNEENEDILEDIVLTLTLFEDREMIEERLKTYAHLFDDKVMKQLKRRRYTGWGRLSRKLINGIRDKQSGKTILDFLKSDGFANRNFMQLIHDDSLTFKEDIQKAQVSGQGDSLHEHIANLAGSPAIKKGILQTVKVVDELVKVMGRHKPENIVIEMARENQTTQKGQKNSRERMKRIEEGIKELGSQILKEHPVENTQLQNEKLYLYYLQNGRDMYVDQELDINRLSDYDVDHIVPQSFLKDDSIDNKVLTRSDKARGKSDNVPSEEVVKKMKNYWRQLLNAKLITQRKFDNLTKAERGGLSELDKAGFIKRQLVETRQITKHVAQILDSRMNTKYDENDKLIREVKVITLKSKLVSDFRKDFQFYKVREINNYHHAHDAYLNAVVGTALIKKYPKLESEFVYGDYKVYDVRKMIAKSEQEIGKATAKYFFYSNIMNFFKTEITLANGEIRKRPLIETNGETGEIVWDKGRDFATVRKVLSMPQVNIVKKTEVQTGGFSKESILPKRNSDKLIARKKDWDPKKYGGFDSPTVAYSVLVVAKVEKGKSKKLKSVKELLGITIMERSSFEKNPIDFLEAKGYKEVKKDLIIKLPKYSLFELENGRKRMLASAGELQKGNELALPSKYVNFLYLASHYEKLKGSPEDNEQKQLFVEQHKHYLDEIIEQISEFSKRVILADANLDKVLSAYNKHRDKPIREQAENIIHLFTLTNLGAPAAFKYFDTTIDRKRYTSTKEVLDATLIHQSITGLYETRIDLSQLGGDGGGGGGSSGGLLGRDLLTKLKAQIQFSTEGPQVTWEDRPAMCLVLNLEEEYRLHEKPVPPSIDPSWLQLFPMVWAEKAGMGLANQVPPVVVELKSDASPVAVRQYPMSKEAREGIRPHIQRFLDLGILVPCQSPWNTPLLPVKKPGTNDYRPVQDLREVNKRVQDIHPTVPNPYNLLSSLPPSHTWYSVLDLKDAFFCLKLHPNSQPLFAFEWRDPEKGNTGQLTWTRLPQGFKNSPTLFNEALHRDLASFRALNPQVVMLQYVDDLLVAAPTYRDCKEGTRRLLQELSKLGYRVSAKKAQLCREEVTYLGYLLKGGKRWLTPARKATVMKIPTPTTPRQVREFLGTAGFCRLWIPGFASLAAPLYPLTRPKVPFTWTEAHQEAFGRIKEALLSAPALALPDLTKPFALYVDEKEGVARGVLTQTLGPWRRPVAYLSKKLDPVASGWPTCLKAIAAVALLLKDADKLTLGQNVLVIAPHNLESIVRQPPDRWMTNARMTHYQSLLLNERVSFAPPAILNPATLLPVESDDTPIHICSEILAEETGTRPDLRDQPLPGVPAWYTDGSSFIMDGRRQAGAAIVDNKRTVWASNLPEGTSAQKAELIALTQALRLAEGKSINIYTDSRYAFATAHVHGAIYKQRGWLTSAGKDIKNKEEILALLEAIHLPKRVAIIHCPGHQRGTDPVATGNRKADEAAKQAAQSTRILTETTKNAGKRTADGSEFEKRTADGSEFESPKKKAKVE

SEQ ID NO: 1658 - protein, 2125 aa, synthetic construct
MPAAKRVKLDGGDKKYSIGLDIGTNSVGWAVITDEYKVPSKKFKVLGNTDRHSIKKNLIGALLFDSGETAEATRLKRTARRRYTRRKNRICYLQEIFSNEMAKVDDSFFHRLEESFLVEEDKKHERHPIFGNIVDEVAYHEKYPTIYHLRKKLVDSTDKADLRLIYLALAHMIKFRGHFLIEGDLNPDNSDVDKLFIQLVQTYNQLFEENPINASGVDAKAILSARLSKSRRLENLIAQLPGEKKNGLFGNLIALSLGLTPNFKSNFDLAEDAKLQLSKDTYDDDLDNLLAQIGDQYADLFLAAKNLSDAILLSDILRVNTEITKAPLSASMIKRYDEHHQDLTLLKALVRQQLPEKYKEIFFDQSKNGYAGYIDGGASQEEFYKFIKPILEKMDGTEELLVKLNREDLLRKQRTFDNGSIPHQIHLGELHAILRRQEDFYPFLKDNREKIEKILTFRIPYYVGPLARGNSRFAWMTRKSEETITPWNFEEVVDKGASAQSFIERMTNFDKNLPNEKVLPKHSLLYEYFTVYNELTKVKYVTEGMRKPAFLSGEQKKAIVDLLFKTNRKVTVKQLKEDYFKKIECFDSVEISGVEDRFNASLGTYHDLLKIIKDKDFLDNEENEDILEDIVLTLTLFEDREMIEERLKTYAHLFDDKVMKQLKRRRYTGWGRLSRKLINGIRDKQSGKTILDFLKSDGFANRNFMQLIHDDSLTFKEDIQKAQVSGQGDSLHEHIANLAGSPAIKKGILQTVKVVDELVKVMGRHKPENIVIEMARENQTTQKGQKNSRERMKRIEEGIKELGSQILKEHPVENTQLQNEKLYLYYLQNGRDMYVDQELDINRLSDYDVDHIVPQSFLKDDSIDNKVLTRSDKARGKSDNVPSEEVVKKMKNYWRQLLNAKLITQRKFDNLTKAERGGLSELDKAGFIKRQLVETRQITKHVAQILDSRMNTKYDENDKLIREVKVITLKSKLVSDFRKDFQFYKVREINNYHHAHDAYLNAVVGTALIKKYPKLESEFVYGDYKVYDVRKMIAKSEQEIGKATAKYFFYSNIMNFFKTEITLANGEIRKRPLIETNGETGEIVWDKGRDFATVRKVLSMPQVNIVKKTEVQTGGFSKESILPKRNSDKLIARKKDWDPKKYGGFDSPTVAYSVLVVAKVEKGKSKKLKSVKELLGITIMERSSFEKNPIDFLEAKGYKEVKKDLIIKLPKYSLFELENGRKRMLASAGELQKGNELALPSKYVNFLYLASHYEKLKGSPEDNEQKQLFVEQHKHYLDEIIEQISEFSKRVILADANLDKVLSAYNKHRDKPIREQAENIIHLFTLTNLGAPAAFKYFDTTIDRKRYTSTKEVLDATLIHQSITGLYETRIDLSQLGGDGGPAPGGSGSSGGLLGRDLLTKLKAQIQFSTEGPQVTWEDRPAMCLVLNLEEEYRLHEKPVPPSIDPSWLQLFPMVWAEKAGMGLANQVPPVVVELKSDASPVAVRQYPMSKEAREGIRPHIQRFLDLGILVPCQSPWNTPLLPVKKPGTNDYRPVQDLREVNKRVQDIHPTVPNPYNLLSSLPPSHTWYSVLDLKDAFFCLKLHPNSQPLFAFEWRDPEKGNTGQLTWTRLPQGFKNSPTLFNEALHRDLASFRALNPQVVMLQYVDDLLVAAPTYRDCKEGTRRLLQELSKLGYRVSAKKAQLCREEVTYLGYLLKGGKRWLTPARKATVMKIPTPTTPRQVREFLGTAGFCRLWIPGFASLAAPLYPLTRPKVPFTWTEAHQEAFGRIKEALLSAPALALPDLTKPFALYVDEKEGVARGVLTQTLGPWRRPVAYLSKKLDPVASGWPTCLKAIAAVALLLKDADKLTLGQNVLVIAPHNLESIVRQPPDRWMTNARMTHYQSLLLNERVSFAPPAILNPATLLPVESDDTPIHICSEILAEETGTRPDLRDQPLPGVPAWYTDGSSFIMDGRRQAGAAIVDNKRTVWASNLPEGTSAQKAELIALTQALRLAEGKSINIYTDSRYAFATAHVHGAIYKQRGWLTSAGKDIKNKEEILALLEAIHLPKRVAIIHCPGHQRGTDPVATGNRKADEAAKQAAQSTRILTETTKNAGKRTADGSEFEKRTADGSEFESPKKKAKVE

SEQ ID NO: 1659 - protein, 2127 aa, synthetic construct
MPAAKRVKLDGGDKKYSIGLDIGTNSVGWAVITDEYKVPSKKFKVLGNTDRHSIKKNLIGALLFDSGETAEATRLKRTARRRYTRRKNRICYLQEIFSNEMAKVDDSFFHRLEESFLVEEDKKHERHPIFGNIVDEVAYHEKYPTIYHLRKKLVDSTDKADLRLIYLALAHMIKFRGHFLIEGDLNPDNSDVDKLFIQLVQTYNQLFEENPINASGVDAKAILSARLSKSRRLENLIAQLPGEKKNGLFGNLIALSLGLTPNFKSNFDLAEDAKLQLSKDTYDDDLDNLLAQIGDQYADLFLAAKNLSDAILLSDILRVNTEITKAPLSASMIKRYDEHHQDLTLLKALVRQQLPEKYKEIFFDQSKNGYAGYIDGGASQEEFYKFIKPILEKMDGTEELLVKLNREDLLRKQRTFDNGSIPHQIHLGELHAILRRQEDFYPFLKDNREKIEKILTFRIPYYVGPLARGNSRFAWMTRKSEETITPWNFEEVVDKGASAQSFIERMTNFDKNLPNEKVLPKHSLLYEYFTVYNELTKVKYVTEGMRKPAFLSGEQKKAIVDLLFKTNRKVTVKQLKEDYFKKIECFDSVEISGVEDRFNASLGTYHDLLKIIKDKDFLDNEENEDILEDIVLTLTLFEDREMIEERLKTYAHLFDDKVMKQLKRRRYTGWGRLSRKLINGIRDKQSGKTILDFLKSDGFANRNFMQLIHDDSLTFKEDIQKAQVSGQGDSLHEHIANLAGSPAIKKGILQTVKVVDELVKVMGRHKPENIVIEMARENQTTQKGQKNSRERMKRIEEGIKELGSQILKEHPVENTQLQNEKLYLYYLQNGRDMYVDQELDINRLSDYDVDHIVPQSFLKDDSIDNKVLTRSDKARGKSDNVPSEEVVKKMKNYWRQLLNAKLITQRKFDNLTKAERGGLSELDKAGFIKRQLVETRQITKHVAQILDSRMNTKYDENDKLIREVKVITLKSKLVSDFRKDFQFYKVREINNYHHAHDAYLNAVVGTALIKKYPKLESEFVYGDYKVYDVRKMIAKSEQEIGKATAKYFFYSNIMNFFKTEITLANGEIRKRPLIETNGETGEIVWDKGRDFATVRKVLSMPQVNIVKKTEVQTGGFSKESILPKRNSDKLIARKKDWDPKKYGGFDSPTVAYSVLVVAKVEKGKSKKLKSVKELLGITIMERSSFEKNPIDFLEAKGYKEVKKDLIIKLPKYSLFELENGRKRMLASAGELQKGNELALPSKYVNFLYLASHYEKLKGSPEDNEQKQLFVEQHKHYLDEIIEQISEFSKRVILADANLDKVLSAYNKHRDKPIREQAENIIHLFTLTNLGAPAAFKYFDTTIDRKRYTSTKEVLDATLIHQSITGLYETRIDLSQLGGDGGGGSGGGEAAAKGGLLGRDLLTKLKAQIQFSTEGPQVTWEDRPAMCLVLNLEEEYRLHEKPVPPSIDPSWLQLFPMVWAEKAGMGLANQVPPVVVELKSDASPVAVRQYPMSKEAREGIRPHIQRFLDLGILVPCQSPWNTPLLPVKKPGTNDYRPVQDLREVNKRVQDIHPTVPNPYNLLSSLPPSHTWYSVLDLKDAFFCLKLHPNSQPLFAFEWRDPEKGNTGQLTWTRLPQGFKNSPTLFNEALHRDLASFRALNPQVVMLQYVDDLLVAAPTYRDCKEGTRRLLQELSKLGYRVSAKKAQLCREEVTYLGYLLKGGKRWLTPARKATVMKIPTPTTPRQVREFLGTAGFCRLWIPGFASLAAPLYPLTRPKVPFTWTEAHQEAFGRIKEALLSAPALALPDLTKPFALYVDEKEGVARGVLTQTLGPWRRPVAYLSKKLDPVASGWPTCLKAIAAVALLLKDADKLTLGQNVLVIAPHNLESIVRQPPDRWMTNARMTHYQSLLLNERVSFAPPAILNPATLLPVESDDTPIHICSEILAEETGTRPDLRDQPLPGVPAWYTDGSSFIMDGRRQAGAAIVDNKRTVWASNLPEGTSAQKAELIALTQALRLAEGKSINIYTDSRYAFATAHVHGAIYKQRGWLTSAGKDIKNKEEILALLEAIHLPKRVAIIHCPGHQRGTDPVATGNRKADEAAKQAAQSTRILTETTKNAGKRTADGSEFEKRTADGSEFESPKKKAKVE

SEQ ID NO: 1660 - protein, 2132 aa, synthetic construct
MPAAKRVKLDGGDKKYSIGLDIGTNSVGWAVITDEYKVPSKKFKVLGNTDRHSIKKNLIGALLFDSGETAEATRLKRTARRRYTRRKNRICYLQEIFSNEMAKVDDSFFHRLEESFLVEEDKKHERHPIFGNIVDEVAYHEKYPTIYHLRKKLVDSTDKADLRLIYLALAHMIKFRGHFLIEGDLNPDNSDVDKLFIQLVQTYNQLFEENPINASGVDAKAILSARLSKSRRLENLIAQLPGEKKNGLFGNLIALSLGLTPNFKSNFDLAEDAKLQLSKDTYDDDLDNLLAQIGDQYADLFLAAKNLSDAILLSDILRVNTEITKAPLSASMIKRYDEHHQDLTLLKALVRQQLPEKYKEIFFDQSKNGYAGYIDGGASQEEFYKFIKPILEKMDGTEELLVKLNREDLLRKQRTFDNGSIPHQIHLGELHAILRRQEDFYPFLKDNREKIEKILTFRIPYYVGPLARGNSRFAWMTRKSEETITPWNFEEVVDKGASAQSFIERMTNFDKNLPNEKVLPKHSLLYEYFTVYNELTKVKYVTEGMRKPAFLSGEQKKAIVDLLFKTNRKVTVKQLKEDYFKKIECFDSVEISGVEDRFNASLGTYHDLLKIIKDKDFLDNEENEDILEDIVLTLTLFEDREMIEERLKTYAHLFDDKVMKQLKRRRYTGWGRLSRKLINGIRDKQSGKTILDFLKSDGFANRNFMQLIHDDSLTFKEDIQKAQVSGQGDSLHEHIANLAGSPAIKKGILQTVKVVDELVKVMGRHKPENIVIEMARENQTTQKGQKNSRERMKRIEEGIKELGSQILKEHPVENTQLQNEKLYLYYLQNGRDMYVDQELDINRLSDYDVDHIVPQSFLKDDSIDNKVLTRSDKARGKSDNVPSEEVVKKMKNYWRQLLNAKLITQRKFDNLTKAERGGLSELDKAGFIKRQLVETRQITKHVAQILDSRMNTKYDENDKLIREVKVITLKSKLVSDFRKDFQFYKVREINNYHHAHDAYLNAVVGTALIKKYPKLESEFVYGDYKVYDVRKMIAKSEQEIGKATAKYFFYSNIMNFFKTEITLANGEIRKRPLIETNGETGEIVWDKGRDFATVRKVLSMPQVNIVKKTEVQTGGFSKESILPKRNSDKLIARKKDWDPKKYGGFDSPTVAYSVLVVAKVEKGKSKKLKSVKELLGITIMERSSFEKNPIDFLEAKGYKEVKKDLIIKLPKYSLFELENGRKRMLASAGELQKGNELALPSKYVNFLYLASHYEKLKGSPEDNEQKQLFVEQHKHYLDEIIEQISEFSKRVILADANLDKVLSAYNKHRDKPIREQAENIIHLFTLTNLGAPAAFKYFDTTIDRKRYTSTKEVLDATLIHQSITGLYETRIDLSQLGGDGGSGSETPGTSESATPESGGLLGRDLLTKLKAQIQFSTEGPQVTWEDRPAMCLVLNLEEEYRLHEKPVPPSIDPSWLQLFPMVWAEKAGMGLANQVPPVVVELKSDASPVAVRQYPMSKEAREGIRPHIQRFLDLGILVPCQSPWNTPLLPVKKPGTNDYRPVQDLREVNKRVQDIHPTVPNPYNLLSSLPPSHTWYSVLDLKDAFFCLKLHPNSQPLFAFEWRDPEKGNTGQLTWTRLPQGFKNSPTLFNEALHRDLASFRALNPQVVMLQYVDDLLVAAPTYRDCKEGTRRLLQELSKLGYRVSAKKAQLCREEVTYLGYLLKGGKRWLTPARKATVMKIPTPTTPRQVREFLGTAGFCRLWIPGFASLAAPLYPLTRPKVPFTWTEAHQEAFGRIKEALLSAPALALPDLTKPFALYVDEKEGVARGVLTQTLGPWRRPVAYLSKKLDPVASGWPTCLKAIAAVALLLKDADKLTLGQNVLVIAPHNLESIVRQPPDRWMTNARMTHYQSLLLNERVSFAPPAILNPATLLPVESDDTPIHICSEILAEETGTRPDLRDQPLPGVPAWYTDGSSFIMDGRRQAGAAIVDNKRTVWASNLPEGTSAQKAELIALTQALRLAEGKSINIYTDSRYAFATAHVHGAIYKQRGWLTSAGKDIKNKEEILALLEAIHLPKRVAIIHCPGHQRGTDPVATGNRKADEAAKQAAQSTRILTETTKNAGKRTADGSEFEKRTADGSEFESPKKKAKVE

SEQ ID NO: 1661 - protein, 2125 aa, synthetic construct
MPAAKRVKLDGGDKKYSIGLDIGTNSVGWAVITDEYKVPSKKFKVLGNTDRHSIKKNLIGALLFDSGETAEATRLKRTARRRYTRRKNRICYLQEIFSNEMAKVDDSFFHRLEESFLVEEDKKHERHPIFGNIVDEVAYHEKYPTIYHLRKKLVDSTDKADLRLIYLALAHMIKFRGHFLIEGDLNPDNSDVDKLFIQLVQTYNQLFEENPINASGVDAKAILSARLSKSRRLENLIAQLPGEKKNGLFGNLIALSLGLTPNFKSNFDLAEDAKLQLSKDTYDDDLDNLLAQIGDQYADLFLAAKNLSDAILLSDILRVNTEITKAPLSASMIKRYDEHHQDLTLLKALVRQQLPEKYKEIFFDQSKNGYAGYIDGGASQEEFYKFIKPILEKMDGTEELLVKLNREDLLRKQRTFDNGSIPHQIHLGELHAILRRQEDFYPFLKDNREKIEKILTFRIPYYVGPLARGNSRFAWMTRKSEETITPWNFEEVVDKGASAQSFIERMTNFDKNLPNEKVLPKHSLLYEYFTVYNELTKVKYVTEGMRKPAFLSGEQKKAIVDLLFKTNRKVTVKQLKEDYFKKIECFDSVEISGVEDRFNASLGTYHDLLKIIKDKDFLDNEENEDILEDIVLTLTLFEDREMIEERLKTYAHLFDDKVMKQLKRRRYTGWGRLSRKLINGIRDKQSGKTILDFLKSDGFANRNFMQLIHDDSLTFKEDIQKAQVSGQGDSLHEHIANLAGSPAIKKGILQTVKVVDELVKVMGRHKPENIVIEMARENQTTQKGQKNSRERMKRIEEGIKELGSQILKEHPVENTQLQNEKLYLYYLQNGRDMYVDQELDINRLSDYDVDHIVPQSFLKDDSIDNKVLTRSDKARGKSDNVPSEEVVKKMKNYWRQLLNAKLITQRKFDNLTKAERGGLSELDKAGFIKRQLVETRQITKHVAQILDSRMNTKYDENDKLIREVKVITLKSKLVSDFRKDFQFYKVREINNYHHAHDAYLNAVVGTALIKKYPKLESEFVYGDYKVYDVRKMIAKSEQEIGKATAKYFFYSNIMNFFKTEITLANGEIRKRPLIETNGETGEIVWDKGRDFATVRKVLSMPQVNIVKKTEVQTGGFSKESILPKRNSDKLIARKKDWDPKKYGGFDSPTVAYSVLVVAKVEKGKSKKLKSVKELLGITIMERSSFEKNPIDFLEAKGYKEVKKDLIIKLPKYSLFELENGRKRMLASAGELQKGNELALPSKYVNFLYLASHYEKLKGSPEDNEQKQLFVEQHKHYLDEIIEQISEFSKRVILADANLDKVLSAYNKHRDKPIREQAENIIHLFTLTNLGAPAAFKYFDTTIDRKRYTSTKEVLDATLIHQSITGLYETRIDLSQLGGDGGGSSGGSPAPGGLLGRDLLTKLKAQIQFSTEGPQVTWEDRPAMCLVLNLEEEYRLHEKPVPPSIDPSWLQLFPMVWAEKAGMGLANQVPPVVVELKSDASPVAVRQYPMSKEAREGIRPHIQRFLDLGILVPCQSPWNTPLLPVKKPGTNDYRPVQDLREVNKRVQDIHPTVPNPYNLLSSLPPSHTWYSVLDLKDAFFCLKLHPNSQPLFAFEWRDPEKGNTGQLTWTRLPQGFKNSPTLFNEALHRDLASFRALNPQVVMLQYVDDLLVAAPTYRDCKEGTRRLLQELSKLGYRVSAKKAQLCREEVTYLGYLLKGGKRWLTPARKATVMKIPTPTTPRQVREFLGTAGFCRLWIPGFASLAAPLYPLTRPKVPFTWTEAHQEAFGRIKEALLSAPALALPDLTKPFALYVDEKEGVARGVLTQTLGPWRRPVAYLSKKLDPVASGWPTCLKAIAAVALLLKDADKLTLGQNVLVIAPHNLESIVRQPPDRWMTNARMTHYQSLLLNERVSFAPPAILNPATLLPVESDDTPIHICSEILAEETGTRPDLRDQPLPGVPAWYTDGSSFIMDGRRQAGAAIVDNKRTVWASNLPEGTSAQKAELIALTQALRLAEGKSINIYTDSRYAFATAHVHGAIYKQRGWLTSAGKDIKNKEEILALLEAIHLPKRVAIIHCPGHQRGTDPVATGNRKADEAAKQAAQSTRILTETTKNAGKRTADGSEFEKRTADGSEFESPKKKAKVE

SEQ ID NO: 1662 - protein, 2146 aa, synthetic construct
MPAAKRVKLDGGDKKYSIGLDIGTNSVGWAVITDEYKVPSKKFKVLGNTDRHSIKKNLIGALLFDSGETAEATRLKRTARRRYTRRKNRICYLQEIFSNEMAKVDDSFFHRLEESFLVEEDKKHERHPIFGNIVDEVAYHEKYPTIYHLRKKLVDSTDKADLRLIYLALAHMIKFRGHFLIEGDLNPDNSDVDKLFIQLVQTYNQLFEENPINASGVDAKAILSARLSKSRRLENLIAQLPGEKKNGLFGNLIALSLGLTPNFKSNFDLAEDAKLQLSKDTYDDDLDNLLAQIGDQYADLFLAAKNLSDAILLSDILRVNTEITKAPLSASMIKRYDEHHQDLTLLKALVRQQLPEKYKEIFFDQSKNGYAGYIDGGASQEEFYKFIKPILEKMDGTEELLVKLNREDLLRKQRTFDNGSIPHQIHLGELHAILRRQEDFYPFLKDNREKIEKILTFRIPYYVGPLARGNSRFAWMTRKSEETITPWNFEEVVDKGASAQSFIERMTNFDKNLPNEKVLPKHSLLYEYFTVYNELTKVKYVTEGMRKPAFLSGEQKKAIVDLLFKTNRKVTVKQLKEDYFKKIECFDSVEISGVEDRFNASLGTYHDLLKIIKDKDFLDNEENEDILEDIVLTLTLFEDREMIEERLKTYAHLFDDKVMKQLKRRRYTGWGRLSRKLINGIRDKQSGKTILDFLKSDGFANRNFMQLIHDDSLTFKEDIQKAQVSGQGDSLHEHIANLAGSPAIKKGILQTVKVVDELVKVMGRHKPENIVIEMARENQTTQKGQKNSRERMKRIEEGIKELGSQILKEHPVENTQLQNEKLYLYYLQNGRDMYVDQELDINRLSDYDVDHIVPQSFLKDDSIDNKVLTRSDKARGKSDNVPSEEVVKKMKNYWRQLLNAKLITQRKFDNLTKAERGGLSELDKAGFIKRQLVETRQITKHVAQILDSRMNTKYDENDKLIREVKVITLKSKLVSDFRKDFQFYKVREINNYHHAHDAYLNAVVGTALIKKYPKLESEFVYGDYKVYDVRKMIAKSEQEIGKATAKYFFYSNIMNFFKTEITLANGEIRKRPLIETNGETGEIVWDKGRDFATVRKVLSMPQVNIVKKTEVQTGGFSKESILPKRNSDKLIARKKDWDPKKYGGFDSPTVAYSVLVVAKVEKGKSKKLKSVKELLGITIMERSSFEKNPIDFLEAKGYKEVKKDLIIKLPKYSLFELENGRKRMLASAGELQKGNELALPSKYVNFLYLASHYEKLKGSPEDNEQKQLFVEQHKHYLDEIIEQISEFSKRVILADANLDKVLSAYNKHRDKPIREQAENIIHLFTLTNLGAPAAFKYFDTTIDRKRYTSTKEVLDATLIHQSITGLYETRIDLSQLGGDGGGGGGSGGGGSGGGGSGGGGSGGGGSGGGGSGGLLGRDLLTKLKAQIQFSTEGPQVTWEDRPAMCLVLNLEEEYRLHEKPVPPSIDPSWLQLFPMVWAEKAGMGLANQVPPVVVELKSDASPVAVRQYPMSKEAREGIRPHIQRFLDLGILVPCQSPWNTPLLPVKKPGTNDYRPVQDLREVNKRVQDIHPTVPNPYNLLSSLPPSHTWYSVLDLKDAFFCLKLHPNSQPLFAFEWRDPEKGNTGQLTWTRLPQGFKNSPTLFNEALHRDLASFRALNPQVVMLQYVDDLLVAAPTYRDCKEGTRRLLQELSKLGYRVSAKKAQLCREEVTYLGYLLKGGKRWLTPARKATVMKIPTPTTPRQVREFLGKAGFCRLFIPGFASLAAPLYPLTRPKVPFTWTEAHQEAFGRIKEALLSAPALALPDLTKPFALYVDEKEGVARGVLTQTLGPWRRPVAYLSKKLDPVASGWPTCLKAIAAVALLLKDADKLTLGQNVLVIAPHNLESIVRQPPDRWMTNARMTHYQSLLLNERVSFAPPAILNPATLLPVESDDTPIHICSEILAEETGTRPDLRDQPLPGVPAWYTDGSSFIMDGRRQAGAAIVDNKRTVWASNLPEGTSAQKAELIALTQALRLAEGKSINIYTDSRYAFATAHVHGAIYKQRGWLTSAGKDIKNKEEILALLEAIHLPKRVAIIHCPGHQRGTDPVATGNRKADEAAKQAAQSTRILTETTKNAGKRTADGSEFEKRTADGSEFESPKKKAKVE

SEQ ID NO: 1663 - protein, 2127 aa, synthetic construct
MPAAKRVKLDGGDKKYSIGLDIGTNSVGWAVITDEYKVPSKKFKVLGNTDRHSIKKNLIGALLFDSGETAEATRLKRTARRRYTRRKNRICYLQEIFSNEMAKVDDSFFHRLEESFLVEEDKKHERHPIFGNIVDEVAYHEKYPTIYHLRKKLVDSTDKADLRLIYLALAHMIKFRGHFLIEGDLNPDNSDVDKLFIQLVQTYNQLFEENPINASGVDAKAILSARLSKSRRLENLIAQLPGEKKNGLFGNLIALSLGLTPNFKSNFDLAEDAKLQLSKDTYDDDLDNLLAQIGDQYADLFLAAKNLSDAILLSDILRVNTEITKAPLSASMIKRYDEHHQDLTLLKALVRQQLPEKYKEIFFDQSKNGYAGYIDGGASQEEFYKFIKPILEKMDGTEELLVKLNREDLLRKQRTFDNGSIPHQIHLGELHAILRRQEDFYPFLKDNREKIEKILTFRIPYYVGPLARGNSRFAWMTRKSEETITPWNFEEVVDKGASAQSFIERMTNFDKNLPNEKVLPKHSLLYEYFTVYNELTKVKYVTEGMRKPAFLSGEQKKAIVDLLFKTNRKVTVKQLKEDYFKKIECFDSVEISGVEDRFNASLGTYHDLLKIIKDKDFLDNEENEDILEDIVLTLTLFEDREMIEERLKTYAHLFDDKVMKQLKRRRYTGWGRLSRKLINGIRDKQSGKTILDFLKSDGFANRNFMQLIHDDSLTFKEDIQKAQVSGQGDSLHEHIANLAGSPAIKKGILQTVKVVDELVKVMGRHKPENIVIEMARENQTTQKGQKNSRERMKRIEEGIKELGSQILKEHPVENTQLQNEKLYLYYLQNGRDMYVDQELDINRLSDYDVDHIVPQSFLKDDSIDNKVLTRSDKARGKSDNVPSEEVVKKMKNYWRQLLNAKLITQRKFDNLTKAERGGLSELDKAGFIKRQLVETRQITKHVAQILDSRMNTKYDENDKLIREVKVITLKSKLVSDFRKDFQFYKVREINNYHHAHDAYLNAVVGTALIKKYPKLESEFVYGDYKVYDVRKMIAKSEQEIGKATAKYFFYSNIMNFFKTEITLANGEIRKRPLIETNGETGEIVWDKGRDFATVRKVLSMPQVNIVKKTEVQTGGFSKESILPKRNSDKLIARKKDWDPKKYGGFDSPTVAYSVLVVAKVEKGKSKKLKSVKELLGITIMERSSFEKNPIDFLEAKGYKEVKKDLIIKLPKYSLFELENGRKRMLASAGELQKGNELALPSKYVNFLYLASHYEKLKGSPEDNEQKQLFVEQHKHYLDEIIEQISEFSKRVILADANLDKVLSAYNKHRDKPIREQAENIIHLFTLTNLGAPAAFKYFDTTIDRKRYTSTKEVLDATLIHQSITGLYETRIDLSQLGGDGGPAPEAAAKGGGGGLLGRDLLTKLKAQIQFSTEGPQVTWEDRPAMCLVLNLEEEYRLHEKPVPPSIDPSWLQLFPMVWAEKAGMGLANQVPPVVVELKSDASPVAVRQYPMSKEAREGIRPHIQRFLDLGILVPCQSPWNTPLLPVKKPGTNDYRPVQDLREVNKRVQDIHPTVPNPYNLLSSLPPSHTWYSVLDLKDAFFCLKLHPNSQPLFAFEWRDPEKGNTGQLTWTRLPQGFKNSPTLFNEALHRDLASFRALNPQVVMLQYVDDLLVAAPTYRDCKEGTRRLLQELSKLGYRVSAKKAQLCREEVTYLGYLLKGGKRWLTPARKATVMKIPTPTTPRQVREFLGKAGFCRLFIPGFASLAAPLYPLTRPKVPFTWTEAHQEAFGRIKEALLSAPALALPDLTKPFALYVDEKEGVARGVLTQTLGPWRRPVAYLSKKLDPVASGWPTCLKAIAAVALLLKDADKLTLGQNVLVIAPHNLESIVRQPPDRWMTNARMTHYQSLLLNERVSFAPPAILNPATLLPVESDDTPIHICSEILAEETGTRPDLRDQPLPGVPAWYTDGSSFIMDGRRQAGAAIVDNKRTVWASNLPEGTSAQKAELIALTQALRLAEGKSINIYTDSRYAFATAHVHGAIYKQRGWLTSAGKDIKNKEEILALLEAIHLPKRVAIIHCPGHQRGTDPVATGNRKADEAAKQAAQSTRILTETTKNAGKRTADGSEFEKRTADGSEFESPKKKAKVE

SEQ ID NO: 1664 - protein, 2127 aa, synthetic construct
MPAAKRVKLDGGDKKYSIGLDIGTNSVGWAVITDEYKVPSKKFKVLGNTDRHSIKKNLIGALLFDSGETAEATRLKRTARRRYTRRKNRICYLQEIFSNEMAKVDDSFFHRLEESFLVEEDKKHERHPIFGNIVDEVAYHEKYPTIYHLRKKLVDSTDKADLRLIYLALAHMIKFRGHFLIEGDLNPDNSDVDKLFIQLVQTYNQLFEENPINASGVDAKAILSARLSKSRRLENLIAQLPGEKKNGLFGNLIALSLGLTPNFKSNFDLAEDAKLQLSKDTYDDDLDNLLAQIGDQYADLFLAAKNLSDAILLSDILRVNTEITKAPLSASMIKRYDEHHQDLTLLKALVRQQLPEKYKEIFFDQSKNGYAGYIDGGASQEEFYKFIKPILEKMDGTEELLVKLNREDLLRKQRTFDNGSIPHQIHLGELHAILRRQEDFYPFLKDNREKIEKILTFRIPYYVGPLARGNSRFAWMTRKSEETITPWNFEEVVDKGASAQSFIERMTNFDKNLPNEKVLPKHSLLYEYFTVYNELTKVKYVTEGMRKPAFLSGEQKKAIVDLLFKTNRKVTVKQLKEDYFKKIECFDSVEISGVEDRFNASLGTYHDLLKIIKDKDFLDNEENEDILEDIVLTLTLFEDREMIEERLKTYAHLFDDKVMKQLKRRRYTGWGRLSRKLINGIRDKQSGKTILDFLKSDGFANRNFMQLIHDDSLTFKEDIQKAQVSGQGDSLHEHIANLAGSPAIKKGILQTVKVVDELVKVMGRHKPENIVIEMARENQTTQKGQKNSRERMKRIEEGIKELGSQILKEHPVENTQLQNEKLYLYYLQNGRDMYVDQELDINRLSDYDVDHIVPQSFLKDDSIDNKVLTRSDKARGKSDNVPSEEVVKKMKNYWRQLLNAKLITQRKFDNLTKAERGGLSELDKAGFIKRQLVETRQITKHVAQILDSRMNTKYDENDKLIREVKVITLKSKLVSDFRKDFQFYKVREINNYHHAHDAYLNAVVGTALIKKYPKLESEFVYGDYKVYDVRKMIAKSEQEIGKATAKYFFYSNIMNFFKTEITLANGEIRKRPLIETNGETGEIVWDKGRDFATVRKVLSMPQVNIVKKTEVQTGGFSKESILPKRNSDKLIARKKDWDPKKYGGFDSPTVAYSVLVVAKVEKGKSKKLKSVKELLGITIMERSSFEKNPIDFLEAKGYKEVKKDLIIKLPKYSLFELENGRKRMLASAGELQKGNELALPSKYVNFLYLASHYEKLKGSPEDNEQKQLFVEQHKHYLDEIIEQISEFSKRVILADANLDKVLSAYNKHRDKPIREQAENIIHLFTLTNLGAPAAFKYFDTTIDRKRYTSTKEVLDATLIHQSITGLYETRIDLSQLGGDGGEAAAKGSSPAPGGLLGRDLLTKLKAQIQFSTEGPQVTWEDRPAMCLVLNLEEEYRLHEKPVPPSIDPSWLQLFPMVWAEKAGMGLANQVPPVVVELKSDASPVAVRQYPMSKEAREGIRPHIQRFLDLGILVPCQSPWNTPLLPVKKPGTNDYRPVQDLREVNKRVQDIHPTVPNPYNLLSSLPPSHTWYSVLDLKDAFFCLKLHPNSQPLFAFEWRDPEKGNTGQLTWTRLPQGFKNSPTLFNEALHRDLASFRALNPQVVMLQYVDDLLVAAPTYRDCKEGTRRLLQELSKLGYRVSAKKAQLCREEVTYLGYLLKGGKRWLTPARKATVMKIPTPTTPRQVREFLGKAGFCRLFIPGFASLAAPLYPLTRPKVPFTWTEAHQEAFGRIKEALLSAPALALPDLTKPFALYVDEKEGVARGVLTQTLGPWRRPVAYLSKKLDPVASGWPTCLKAIAAVALLLKDADKLTLGQNVLVIAPHNLESIVRQPPDRWMTNARMTHYQSLLLNERVSFAPPAILNPATLLPVESDDTPIHICSEILAEETGTRPDLRDQPLPGVPAWYTDGSSFIMDGRRQAGAAIVDNKRTVWASNLPEGTSAQKAELIALTQALRLAEGKSINIYTDSRYAFATAHVHGAIYKQRGWLTSAGKDIKNKEEILALLEAIHLPKRVAIIHCPGHQRGTDPVATGNRKADEAAKQAAQSTRILTETTKNAGKRTADGSEFEKRTADGSEFESPKKKAKVE

SEQ ID NO: 1665 - protein, 2131 aa, synthetic construct
MPAAKRVKLDGGDKKYSIGLDIGTNSVGWAVITDEYKVPSKKFKVLGNTDRHSIKKNLIGALLFDSGETAEATRLKRTARRRYTRRKNRICYLQEIFSNEMAKVDDSFFHRLEESFLVEEDKKHERHPIFGNIVDEVAYHEKYPTIYHLRKKLVDSTDKADLRLIYLALAHMIKFRGHFLIEGDLNPDNSDVDKLFIQLVQTYNQLFEENPINASGVDAKAILSARLSKSRRLENLIAQLPGEKKNGLFGNLIALSLGLTPNFKSNFDLAEDAKLQLSKDTYDDDLDNLLAQIGDQYADLFLAAKNLSDAILLSDILRVNTEITKAPLSASMIKRYDEHHQDLTLLKALVRQQLPEKYKEIFFDQSKNGYAGYIDGGASQEEFYKFIKPILEKMDGTEELLVKLNREDLLRKQRTFDNGSIPHQIHLGELHAILRRQEDFYPFLKDNREKIEKILTFRIPYYVGPLARGNSRFAWMTRKSEETITPWNFEEVVDKGASAQSFIERMTNFDKNLPNEKVLPKHSLLYEYFTVYNELTKVKYVTEGMRKPAFLSGEQKKAIVDLLFKTNRKVTVKQLKEDYFKKIECFDSVEISGVEDRFNASLGTYHDLLKIIKDKDFLDNEENEDILEDIVLTLTLFEDREMIEERLKTYAHLFDDKVMKQLKRRRYTGWGRLSRKLINGIRDKQSGKTILDFLKSDGFANRNFMQLIHDDSLTFKEDIQKAQVSGQGDSLHEHIANLAGSPAIKKGILQTVKVVDELVKVMGRHKPENIVIEMARENQTTQKGQKNSRERMKRIEEGIKELGSQILKEHPVENTQLQNEKLYLYYLQNGRDMYVDQELDINRLSDYDVDHIVPQSFLKDDSIDNKVLTRSDKARGKSDNVPSEEVVKKMKNYWRQLLNAKLITQRKFDNLTKAERGGLSELDKAGFIKRQLVETRQITKHVAQILDSRMNTKYDENDKLIREVKVITLKSKLVSDFRKDFQFYKVREINNYHHAHDAYLNAVVGTALIKKYPKLESEFVYGDYKVYDVRKMIAKSEQEIGKATAKYFFYSNIMNFFKTEITLANGEIRKRPLIETNGETGEIVWDKGRDFATVRKVLSMPQVNIVKKTEVQTGGFSKESILPKRNSDKLIARKKDWDPKKYGGFDSPTVAYSVLVVAKVEKGKSKKLKSVKELLGITIMERSSFEKNPIDFLEAKGYKEVKKDLIIKLPKYSLFELENGRKRMLASAGELQKGNELALPSKYVNFLYLASHYEKLKGSPEDNEQKQLFVEQHKHYLDEIIEQISEFSKRVILADANLDKVLSAYNKHRDKPIREQAENIIHLFTLTNLGAPAAFKYFDTTIDRKRYTSTKEVLDATLIHQSITGLYETRIDLSQLGGDGGGGSGGSGGSGGSGGSGGLLGRDLLTKLKAQIQFSTEGPQVTWEDRPAMCLVLNLEEEYRLHEKPVPPSIDPSWLQLFPMVWAEKAGMGLANQVPPVVVELKSDASPVAVRQYPMSKEAREGIRPHIQRFLDLGILVPCQSPWNTPLLPVKKPGTNDYRPVQDLREVNKRVQDIHPTVPNPYNLLSSLPPSHTWYSVLDLKDAFFCLKLHPNSQPLFAFEWRDPEKGNTGQLTWTRLPQGFKNSPTLFNEALHRDLASFRALNPQVVMLQYVDDLLVAAPTYRDCKEGTRRLLQELSKLGYRVSAKKAQLCREEVTYLGYLLKGGKRWLTPARKATVMKIPTPTTPRQVREFLGKAGFCRLFIPGFASLAAPLYPLTRPKVPFTWTEAHQEAFGRIKEALLSAPALALPDLTKPFALYVDEKEGVARGVLTQTLGPWRRPVAYLSKKLDPVASGWPTCLKAIAAVALLLKDADKLTLGQNVLVIAPHNLESIVRQPPDRWMTNARMTHYQSLLLNERVSFAPPAILNPATLLPVESDDTPIHICSEILAEETGTRPDLRDQPLPGVPAWYTDGSSFIMDGRRQAGAAIVDNKRTVWASNLPEGTSAQKAELIALTQALRLAEGKSINIYTDSRYAFATAHVHGAIYKQRGWLTSAGKDIKNKEEILALLEAIHLPKRVAIIHCPGHQRGTDPVATGNRKADEAAKQAAQSTRILTETTKNAGKRTADGSEFEKRTADGSEFESPKKKAKVE

SEQ ID NO: 1666 - protein, 2127 aa, synthetic construct
MPAAKRVKLDGGDKKYSIGLDIGTNSVGWAVITDEYKVPSKKFKVLGNTDRHSIKKNLIGALLFDSGETAEATRLKRTARRRYTRRKNRICYLQEIFSNEMAKVDDSFFHRLEESFLVEEDKKHERHPIFGNIVDEVAYHEKYPTIYHLRKKLVDSTDKADLRLIYLALAHMIKFRGHFLIEGDLNPDNSDVDKLFIQLVQTYNQLFEENPINASGVDAKAILSARLSKSRRLENLIAQLPGEKKNGLFGNLIALSLGLTPNFKSNFDLAEDAKLQLSKDTYDDDLDNLLAQIGDQYADLFLAAKNLSDAILLSDILRVNTEITKAPLSASMIKRYDEHHQDLTLLKALVRQQLPEKYKEIFFDQSKNGYAGYIDGGASQEEFYKFIKPILEKMDGTEELLVKLNREDLLRKQRTFDNGSIPHQIHLGELHAILRRQEDFYPFLKDNREKIEKILTFRIPYYVGPLARGNSRFAWMTRKSEETITPWNFEEVVDKGASAQSFIERMTNFDKNLPNEKVLPKHSLLYEYFTVYNELTKVKYVTEGMRKPAFLSGEQKKAIVDLLFKTNRKVTVKQLKEDYFKKIECFDSVEISGVEDRFNASLGTYHDLLKIIKDKDFLDNEENEDILEDIVLTLTLFEDREMIEERLKTYAHLFDDKVMKQLKRRRYTGWGRLSRKLINGIRDKQSGKTILDFLKSDGFANRNFMQLIHDDSLTFKEDIQKAQVSGQGDSLHEHIANLAGSPAIKKGILQTVKVVDELVKVMGRHKPENIVIEMARENQTTQKGQKNSRERMKRIEEGIKELGSQILKEHPVENTQLQNEKLYLYYLQNGRDMYVDQELDINRLSDYDVDHIVPQSFLKDDSIDNKVLTRSDKARGKSDNVPSEEVVKKMKNYWRQLLNAKLITQRKFDNLTKAERGGLSELDKAGFIKRQLVETRQITKHVAQILDSRMNTKYDENDKLIREVKVITLKSKLVSDFRKDFQFYKVREINNYHHAHDAYLNAVVGTALIKKYPKLESEFVYGDYKVYDVRKMIAKSEQEIGKATAKYFFYSNIMNFFKTEITLANGEIRKRPLIETNGETGEIVWDKGRDFATVRKVLSMPQVNIVKKTEVQTGGFSKESILPKRNSDKLIARKKDWDPKKYGGFDSPTVAYSVLVVAKVEKGKSKKLKSVKELLGITIMERSSFEKNPIDFLEAKGYKEVKKDLIIKLPKYSLFELENGRKRMLASAGELQKGNELALPSKYVNFLYLASHYEKLKGSPEDNEQKQLFVEQHKHYLDEIIEQISEFSKRVILADANLDKVLSAYNKHRDKPIREQAENIIHLFTLTNLGAPAAFKYFDTTIDRKRYTSTKEVLDATLIHQSITGLYETRIDLSQLGGDGGGGSPAPEAAAKGGLLGRDLLTKLKAQIQFSTEGPQVTWEDRPAMCLVLNLEEEYRLHEKPVPPSIDPSWLQLFPMVWAEKAGMGLANQVPPVVVELKSDASPVAVRQYPMSKEAREGIRPHIQRFLDLGILVPCQSPWNTPLLPVKKPGTNDYRPVQDLREVNKRVQDIHPTVPNPYNLLSSLPPSHTWYSVLDLKDAFFCLKLHPNSQPLFAFEWRDPEKGNTGQLTWTRLPQGFKNSPTLFNEALHRDLASFRALNPQVVMLQYVDDLLVAAPTYRDCKEGTRRLLQELSKLGYRVSAKKAQLCREEVTYLGYLLKGGKRWLTPARKATVMKIPTPTTPRQVREFLGKAGFCRLFIPGFASLAAPLYPLTRPKVPFTWTEAHQEAFGRIKEALLSAPALALPDLTKPFALYVDEKEGVARGVLTQTLGPWRRPVAYLSKKLDPVASGWPTCLKAIAAVALLLKDADKLTLGQNVLVIAPHNLESIVRQPPDRWMTNARMTHYQSLLLNERVSFAPPAILNPATLLPVESDDTPIHICSEILAEETGTRPDLRDQPLPGVPAWYTDGSSFIMDGRRQAGAAIVDNKRTVWASNLPEGTSAQKAELIALTQALRLAEGKSINIYTDSRYAFATAHVHGAIYKQRGWLTSAGKDIKNKEEILALLEAIHLPKRVAIIHCPGHQRGTDPVATGNRKADEAAKQAAQSTRILTETTKNAGKRTADGSEFEKRTADGSEFESPKKKAKVE

SEQ ID NO: 1667 - protein, 2134 aa, synthetic construct
MPAAKRVKLDGGDKKYSIGLDIGTNSVGWAVITDEYKVPSKKFKVLGNTDRHSIKKNLIGALLFDSGETAEATRLKRTARRRYTRRKNRICYLQEIFSNEMAKVDDSFFHRLEESFLVEEDKKHERHPIFGNIVDEVAYHEKYPTIYHLRKKLVDSTDKADLRLIYLALAHMIKFRGHFLIEGDLNPDNSDVDKLFIQLVQTYNQLFEENPINASGVDAKAILSARLSKSRRLENLIAQLPGEKKNGLFGNLIALSLGLTPNFKSNFDLAEDAKLQLSKDTYDDDLDNLLAQIGDQYADLFLAAKNLSDAILLSDILRVNTEITKAPLSASMIKRYDEHHQDLTLLKALVRQQLPEKYKEIFFDQSKNGYAGYIDGGASQEEFYKFIKPILEKMDGTEELLVKLNREDLLRKQRTFDNGSIPHQIHLGELHAILRRQEDFYPFLKDNREKIEKILTFRIPYYVGPLARGNSRFAWMTRKSEETITPWNFEEVVDKGASAQSFIERMTNFDKNLPNEKVLPKHSLLYEYFTVYNELTKVKYVTEGMRKPAFLSGEQKKAIVDLLFKTNRKVTVKQLKEDYFKKIECFDSVEISGVEDRFNASLGTYHDLLKIIKDKDFLDNEENEDILEDIVLTLTLFEDREMIEERLKTYAHLFDDKVMKQLKRRRYTGWGRLSRKLINGIRDKQSGKTILDFLKSDGFANRNFMQLIHDDSLTFKEDIQKAQVSGQGDSLHEHIANLAGSPAIKKGILQTVKVVDELVKVMGRHKPENIVIEMARENQTTQKGQKNSRERMKRIEEGIKELGSQILKEHPVENTQLQNEKLYLYYLQNGRDMYVDQELDINRLSDYDVDHIVPQSFLKDDSIDNKVLTRSDKARGKSDNVPSEEVVKKMKNYWRQLLNAKLITQRKFDNLTKAERGGLSELDKAGFIKRQLVETRQITKHVAQILDSRMNTKYDENDKLIREVKVITLKSKLVSDFRKDFQFYKVREINNYHHAHDAYLNAVVGTALIKKYPKLESEFVYGDYKVYDVRKMIAKSEQEIGKATAKYFFYSNIMNFFKTEITLANGEIRKRPLIETNGETGEIVWDKGRDFATVRKVLSMPQVNIVKKTEVQTGGFSKESILPKRNSDKLIARKKDWDPKKYGGFDSPTVAYSVLVVAKVEKGKSKKLKSVKELLGITIMERSSFEKNPIDFLEAKGYKEVKKDLIIKLPKYSLFELENGRKRMLASAGELQKGNELALPSKYVNFLYLASHYEKLKGSPEDNEQKQLFVEQHKHYLDEIIEQISEFSKRVILADANLDKVLSAYNKHRDKPIREQAENIIHLFTLTNLGAPAAFKYFDTTIDRKRYTSTKEVLDATLIHQSITGLYETRIDLSQLGGDGGGSSGSSGSSGSSGSSGSSGGLLGRDLLTKLKAQIQFSTEGPQVTWEDRPAMCLVLNLEEEYRLHEKPVPPSIDPSWLQLFPMVWAEKAGMGLANQVPPVVVELKSDASPVAVRQYPMSKEAREGIRPHIQRFLDLGILVPCQSPWNTPLLPVKKPGTNDYRPVQDLREVNKRVQDIHPTVPNPYNLLSSLPPSHTWYSVLDLKDAFFCLKLHPNSQPLFAFEWRDPEKGNTGQLTWTRLPQGFKNSPTLFNEALHRDLASFRALNPQVVMLQYVDDLLVAAPTYRDCKEGTRRLLQELSKLGYRVSAKKAQLCREEVTYLGYLLKGGKRWLTPARKATVMKIPTPTTPRQVREFLGKAGFCRLFIPGFASLAAPLYPLTRPKVPFTWTEAHQEAFGRIKEALLSAPALALPDLTKPFALYVDEKEGVARGVLTQTLGPWRRPVAYLSKKLDPVASGWPTCLKAIAAVALLLKDADKLTLGQNVLVIAPHNLESIVRQPPDRWMTNARMTHYQSLLLNERVSFAPPAILNPATLLPVESDDTPIHICSEILAEETGTRPDLRDQPLPGVPAWYTDGSSFIMDGRRQAGAAIVDNKRTVWASNLPEGTSAQKAELIALTQALRLAEGKSINIYTDSRYAFATAHVHGAIYKQRGWLTSAGKDIKNKEEILALLEAIHLPKRVAIIHCPGHQRGTDPVATGNRKADEAAKQAAQSTRILTETTKNAGKRTADGSEFEKRTADGSEFESPKKKAKVE

SEQ ID NO: 1668 - protein, 2122 aa, synthetic construct
MPAAKRVKLDGGDKKYSIGLDIGTNSVGWAVITDEYKVPSKKFKVLGNTDRHSIKKNLIGALLFDSGETAEATRLKRTARRRYTRRKNRICYLQEIFSNEMAKVDDSFFHRLEESFLVEEDKKHERHPIFGNIVDEVAYHEKYPTIYHLRKKLVDSTDKADLRLIYLALAHMIKFRGHFLIEGDLNPDNSDVDKLFIQLVQTYNQLFEENPINASGVDAKAILSARLSKSRRLENLIAQLPGEKKNGLFGNLIALSLGLTPNFKSNFDLAEDAKLQLSKDTYDDDLDNLLAQIGDQYADLFLAAKNLSDAILLSDILRVNTEITKAPLSASMIKRYDEHHQDLTLLKALVRQQLPEKYKEIFFDQSKNGYAGYIDGGASQEEFYKFIKPILEKMDGTEELLVKLNREDLLRKQRTFDNGSIPHQIHLGELHAILRRQEDFYPFLKDNREKIEKILTFRIPYYVGPLARGNSRFAWMTRKSEETITPWNFEEVVDKGASAQSFIERMTNFDKNLPNEKVLPKHSLLYEYFTVYNELTKVKYVTEGMRKPAFLSGEQKKAIVDLLFKTNRKVTVKQLKEDYFKKIECFDSVEISGVEDRFNASLGTYHDLLKIIKDKDFLDNEENEDILEDIVLTLTLFEDREMIEERLKTYAHLFDDKVMKQLKRRRYTGWGRLSRKLINGIRDKQSGKTILDFLKSDGFANRNFMQLIHDDSLTFKEDIQKAQVSGQGDSLHEHIANLAGSPAIKKGILQTVKVVDELVKVMGRHKPENIVIEMARENQTTQKGQKNSRERMKRIEEGIKELGSQILKEHPVENTQLQNEKLYLYYLQNGRDMYVDQELDINRLSDYDVDHIVPQSFLKDDSIDNKVLTRSDKARGKSDNVPSEEVVKKMKNYWRQLLNAKLITQRKFDNLTKAERGGLSELDKAGFIKRQLVETRQITKHVAQILDSRMNTKYDENDKLIREVKVITLKSKLVSDFRKDFQFYKVREINNYHHAHDAYLNAVVGTALIKKYPKLESEFVYGDYKVYDVRKMIAKSEQEIGKATAKYFFYSNIMNFFKTEITLANGEIRKRPLIETNGETGEIVWDKGRDFATVRKVLSMPQVNIVKKTEVQTGGFSKESILPKRNSDKLIARKKDWDPKKYGGFDSPTVAYSVLVVAKVEKGKSKKLKSVKELLGITIMERSSFEKNPIDFLEAKGYKEVKKDLIIKLPKYSLFELENGRKRMLASAGELQKGNELALPSKYVNFLYLASHYEKLKGSPEDNEQKQLFVEQHKHYLDEIIEQISEFSKRVILADANLDKVLSAYNKHRDKPIREQAENIIHLFTLTNLGAPAAFKYFDTTIDRKRYTSTKEVLDATLIHQSITGLYETRIDLSQLGGDGGGGSGGGGGLLGRDLLTKLKAQIQFSTEGPQVTWEDRPAMCLVLNLEEEYRLHEKPVPPSIDPSWLQLFPMVWAEKAGMGLANQVPPVVVELKSDASPVAVRQYPMSKEAREGIRPHIQRFLDLGILVPCQSPWNTPLLPVKKPGTNDYRPVQDLREVNKRVQDIHPTVPNPYNLLSSLPPSHTWYSVLDLKDAFFCLKLHPNSQPLFAFEWRDPEKGNTGQLTWTRLPQGFKNSPTLFNEALHRDLASFRALNPQVVMLQYVDDLLVAAPTYRDCKEGTRRLLQELSKLGYRVSAKKAQLCREEVTYLGYLLKGGKRWLTPARKATVMKIPTPTTPRQVREFLGKAGFCRLFIPGFASLAAPLYPLTRPKVPFTWTEAHQEAFGRIKEALLSAPALALPDLTKPFALYVDEKEGVARGVLTQTLGPWRRPVAYLSKKLDPVASGWPTCLKAIAAVALLLKDADKLTLGQNVLVIAPHNLESIVRQPPDRWMTNARMTHYQSLLLNERVSFAPPAILNPATLLPVESDDTPIHICSEILAEETGTRPDLRDQPLPGVPAWYTDGSSFIMDGRRQAGAAIVDNKRTVWASNLPEGTSAQKAELIALTQALRLAEGKSINIYTDSRYAFATAHVHGAIYKQRGWLTSAGKDIKNKEEILALLEAIHLPKRVAIIHCPGHQRGTDPVATGNRKADEAAKQAAQSTRILTETTKNAGKRTADGSEFEKRTADGSEFESPKKKAKVE

SEQ ID NO: 1669 - protein, 2124 aa, synthetic construct
MPAAKRVKLDGGDKKYSIGLDIGTNSVGWAVITDEYKVPSKKFKVLGNTDRHSIKKNLIGALLFDSGETAEATRLKRTARRRYTRRKNRICYLQEIFSNEMAKVDDSFFHRLEESFLVEEDKKHERHPIFGNIVDEVAYHEKYPTIYHLRKKLVDSTDKADLRLIYLALAHMIKFRGHFLIEGDLNPDNSDVDKLFIQLVQTYNQLFEENPINASGVDAKAILSARLSKSRRLENLIAQLPGEKKNGLFGNLIALSLGLTPNFKSNFDLAEDAKLQLSKDTYDDDLDNLLAQIGDQYADLFLAAKNLSDAILLSDILRVNTEITKAPLSASMIKRYDEHHQDLTLLKALVRQQLPEKYKEIFFDQSKNGYAGYIDGGASQEEFYKFIKPILEKMDGTEELLVKLNREDLLRKQRTFDNGSIPHQIHLGELHAILRRQEDFYPFLKDNREKIEKILTFRIPYYVGPLARGNSRFAWMTRKSEETITPWNFEEVVDKGASAQSFIERMTNFDKNLPNEKVLPKHSLLYEYFTVYNELTKVKYVTEGMRKPAFLSGEQKKAIVDLLFKTNRKVTVKQLKEDYFKKIECFDSVEISGVEDRFNASLGTYHDLLKIIKDKDFLDNEENEDILEDIVLTLTLFEDREMIEERLKTYAHLFDDKVMKQLKRRRYTGWGRLSRKLINGIRDKQSGKTILDFLKSDGFANRNFMQLIHDDSLTFKEDIQKAQVSGQGDSLHEHIANLAGSPAIKKGILQTVKVVDELVKVMGRHKPENIVIEMARENQTTQKGQKNSRERMKRIEEGIKELGSQILKEHPVENTQLQNEKLYLYYLQNGRDMYVDQELDINRLSDYDVDHIVPQSFLKDDSIDNKVLTRSDKARGKSDNVPSEEVVKKMKNYWRQLLNAKLITQRKFDNLTKAERGGLSELDKAGFIKRQLVETRQITKHVAQILDSRMNTKYDENDKLIREVKVITLKSKLVSDFRKDFQFYKVREINNYHHAHDAYLNAVVGTALIKKYPKLESEFVYGDYKVYDVRKMIAKSEQEIGKATAKYFFYSNIMNFFKTEITLANGEIRKRPLIETNGETGEIVWDKGRDFATVRKVLSMPQVNIVKKTEVQTGGFSKESILPKRNSDKLIARKKDWDPKKYGGFDSPTVAYSVLVVAKVEKGKSKKLKSVKELLGITIMERSSFEKNPIDFLEAKGYKEVKKDLIIKLPKYSLFELENGRKRMLASAGELQKGNELALPSKYVNFLYLASHYEKLKGSPEDNEQKQLFVEQHKHYLDEIIEQISEFSKRVILADANLDKVLSAYNKHRDKPIREQAENIIHLFTLTNLGAPAAFKYFDTTIDRKRYTSTKEVLDATLIHQSITGLYETRIDLSQLGGDGGPAPEAAAKGGLLGRDLLTKLKAQIQFSTEGPQVTWEDRPAMCLVLNLEEEYRLHEKPVPPSIDPSWLQLFPMVWAEKAGMGLANQVPPVVVELKSDASPVAVRQYPMSKEAREGIRPHIQRFLDLGILVPCQSPWNTPLLPVKKPGTNDYRPVQDLREVNKRVQDIHPTVPNPYNLLSSLPPSHTWYSVLDLKDAFFCLKLHPNSQPLFAFEWRDPEKGNTGQLTWTRLPQGFKNSPTLFNEALHRDLASFRALNPQVVMLQYVDDLLVAAPTYRDCKEGTRRLLQELSKLGYRVSAKKAQLCREEVTYLGYLLKGGKRWLTPARKATVMKIPTPTTPRQVREFLGKAGFCRLFIPGFASLAAPLYPLTRPKVPFTWTEAHQEAFGRIKEALLSAPALALPDLTKPFALYVDEKEGVARGVLTQTLGPWRRPVAYLSKKLDPVASGWPTCLKAIAAVALLLKDADKLTLGQNVLVIAPHNLESIVRQPPDRWMTNARMTHYQSLLLNERVSFAPPAILNPATLLPVESDDTPIHICSEILAEETGTRPDLRDQPLPGVPAWYTDGSSFIMDGRRQAGAAIVDNKRTVWASNLPEGTSAQKAELIALTQALRLAEGKSINIYTDSRYAFATAHVHGAIYKQRGWLTSAGKDIKNKEEILALLEAIHLPKRVAIIHCPGHQRGTDPVATGNRKADEAAKQAAQSTRILTETTKNAGKRTADGSEFEKRTADGSEFESPKKKAKVE

SEQ ID NO: 1670 - protein, 2162 aa, synthetic construct
MPAAKRVKLDGGDKKYSIGLDIGTNSVGWAVITDEYKVPSKKFKVLGNTDRHSIKKNLIGALLFDSGETAEATRLKRTARRRYTRRKNRICYLQEIFSNEMAKVDDSFFHRLEESFLVEEDKKHERHPIFGNIVDEVAYHEKYPTIYHLRKKLVDSTDKADLRLIYLALAHMIKFRGHFLIEGDLNPDNSDVDKLFIQLVQTYNQLFEENPINASGVDAKAILSARLSKSRRLENLIAQLPGEKKNGLFGNLIALSLGLTPNFKSNFDLAEDAKLQLSKDTYDDDLDNLLAQIGDQYADLFLAAKNLSDAILLSDILRVNTEITKAPLSASMIKRYDEHHQDLTLLKALVRQQLPEKYKEIFFDQSKNGYAGYIDGGASQEEFYKFIKPILEKMDGTEELLVKLNREDLLRKQRTFDNGSIPHQIHLGELHAILRRQEDFYPFLKDNREKIEKILTFRIPYYVGPLARGNSRFAWMTRKSEETITPWNFEEVVDKGASAQSFIERMTNFDKNLPNEKVLPKHSLLYEYFTVYNELTKVKYVTEGMRKPAFLSGEQKKAIVDLLFKTNRKVTVKQLKEDYFKKIECFDSVEISGVEDRFNASLGTYHDLLKIIKDKDFLDNEENEDILEDIVLTLTLFEDREMIEERLKTYAHLFDDKVMKQLKRRRYTGWGRLSRKLINGIRDKQSGKTILDFLKSDGFANRNFMQLIHDDSLTFKEDIQKAQVSGQGDSLHEHIANLAGSPAIKKGILQTVKVVDELVKVMGRHKPENIVIEMARENQTTQKGQKNSRERMKRIEEGIKELGSQILKEHPVENTQLQNEKLYLYYLQNGRDMYVDQELDINRLSDYDVDHIVPQSFLKDDSIDNKVLTRSDKARGKSDNVPSEEVVKKMKNYWRQLLNAKLITQRKFDNLTKAERGGLSELDKAGFIKRQLVETRQITKHVAQILDSRMNTKYDENDKLIREVKVITLKSKLVSDFRKDFQFYKVREINNYHHAHDAYLNAVVGTALIKKYPKLESEFVYGDYKVYDVRKMIAKSEQEIGKATAKYFFYSNIMNFFKTEITLANGEIRKRPLIETNGETGEIVWDKGRDFATVRKVLSMPQVNIVKKTEVQTGGFSKESILPKRNSDKLIARKKDWDPKKYGGFDSPTVAYSVLVVAKVEKGKSKKLKSVKELLGITIMERSSFEKNPIDFLEAKGYKEVKKDLIIKLPKYSLFELENGRKRMLASAGELQKGNELALPSKYVNFLYLASHYEKLKGSPEDNEQKQLFVEQHKHYLDEIIEQISEFSKRVILADANLDKVLSAYNKHRDKPIREQAENIIHLFTLTNLGAPAAFKYFDTTIDRKRYTSTKEVLDATLIHQSITGLYETRIDLSQLGGDGGAEAAAKEAAAKEAAAKEAAAKALEAEAAAKEAAAKEAAAKEAAAKAGGLLGRDLLTKLKAQIQFSTEGPQVTWEDRPAMCLVLNLEEEYRLHEKPVPPSIDPSWLQLFPMVWAEKAGMGLANQVPPVVVELKSDASPVAVRQYPMSKEAREGIRPHIQRFLDLGILVPCQSPWNTPLLPVKKPGTNDYRPVQDLREVNKRVQDIHPTVPNPYNLLSSLPPSHTWYSVLDLKDAFFCLKLHPNSQPLFAFEWRDPEKGNTGQLTWTRLPQGFKNSPTLFNEALHRDLASFRALNPQVVMLQYVDDLLVAAPTYRDCKEGTRRLLQELSKLGYRVSAKKAQLCREEVTYLGYLLKGGKRWLTPARKATVMKIPTPTTPRQVREFLGKAGFCRLFIPGFASLAAPLYPLTRPKVPFTWTEAHQEAFGRIKEALLSAPALALPDLTKPFALYVDEKEGVARGVLTQTLGPWRRPVAYLSKKLDPVASGWPTCLKAIAAVALLLKDADKLTLGQNVLVIAPHNLESIVRQPPDRWMTNARMTHYQSLLLNERVSFAPPAILNPATLLPVESDDTPIHICSEILAEETGTRPDLRDQPLPGVPAWYTDGSSFIMDGRRQAGAAIVDNKRTVWASNLPEGTSAQKAELIALTQALRLAEGKSINIYTDSRYAFATAHVHGAIYKQRGWLTSAGKDIKNKEEILALLEAIHLPKRVAIIHCPGHQRGTDPVATGNRKADEAAKQAAQSTRILTETTKNAGKRTADGSEFEKRTADGSEFESPKKKAKVE

SEQ ID NO: 1671 - protein, 2124 aa, synthetic construct
MPAAKRVKLDGGDKKYSIGLDIGTNSVGWAVITDEYKVPSKKFKVLGNTDRHSIKKNLIGALLFDSGETAEATRLKRTARRRYTRRKNRICYLQEIFSNEMAKVDDSFFHRLEESFLVEEDKKHERHPIFGNIVDEVAYHEKYPTIYHLRKKLVDSTDKADLRLIYLALAHMIKFRGHFLIEGDLNPDNSDVDKLFIQLVQTYNQLFEENPINASGVDAKAILSARLSKSRRLENLIAQLPGEKKNGLFGNLIALSLGLTPNFKSNFDLAEDAKLQLSKDTYDDDLDNLLAQIGDQYADLFLAAKNLSDAILLSDILRVNTEITKAPLSASMIKRYDEHHQDLTLLKALVRQQLPEKYKEIFFDQSKNGYAGYIDGGASQEEFYKFIKPILEKMDGTEELLVKLNREDLLRKQRTFDNGSIPHQIHLGELHAILRRQEDFYPFLKDNREKIEKILTFRIPYYVGPLARGNSRFAWMTRKSEETITPWNFEEVVDKGASAQSFIERMTNFDKNLPNEKVLPKHSLLYEYFTVYNELTKVKYVTEGMRKPAFLSGEQKKAIVDLLFKTNRKVTVKQLKEDYFKKIECFDSVEISGVEDRFNASLGTYHDLLKIIKDKDFLDNEENEDILEDIVLTLTLFEDREMIEERLKTYAHLFDDKVMKQLKRRRYTGWGRLSRKLINGIRDKQSGKTILDFLKSDGFANRNFMQLIHDDSLTFKEDIQKAQVSGQGDSLHEHIANLAGSPAIKKGILQTVKVVDELVKVMGRHKPENIVIEMARENQTTQKGQKNSRERMKRIEEGIKELGSQILKEHPVENTQLQNEKLYLYYLQNGRDMYVDQELDINRLSDYDVDHIVPQSFLKDDSIDNKVLTRSDKARGKSDNVPSEEVVKKMKNYWRQLLNAKLITQRKFDNLTKAERGGLSELDKAGFIKRQLVETRQITKHVAQILDSRMNTKYDENDKLIREVKVITLKSKLVSDFRKDFQFYKVREINNYHHAHDAYLNAVVGTALIKKYPKLESEFVYGDYKVYDVRKMIAKSEQEIGKATAKYFFYSNIMNFFKTEITLANGEIRKRPLIETNGETGEIVWDKGRDFATVRKVLSMPQVNIVKKTEVQTGGFSKESILPKRNSDKLIARKKDWDPKKYGGFDSPTVAYSVLVVAKVEKGKSKKLKSVKELLGITIMERSSFEKNPIDFLEAKGYKEVKKDLIIKLPKYSLFELENGRKRMLASAGELQKGNELALPSKYVNFLYLASHYEKLKGSPEDNEQKQLFVEQHKHYLDEIIEQISEFSKRVILADANLDKVLSAYNKHRDKPIREQAENIIHLFTLTNLGAPAAFKYFDTTIDRKRYTSTKEVLDATLIHQSITGLYETRIDLSQLGGDGGEAAAKGSSGGLLGRDLLTKLKAQIQFSTEGPQVTWEDRPAMCLVLNLEEEYRLHEKPVPPSIDPSWLQLFPMVWAEKAGMGLANQVPPVVVELKSDASPVAVRQYPMSKEAREGIRPHIQRFLDLGILVPCQSPWNTPLLPVKKPGTNDYRPVQDLREVNKRVQDIHPTVPNPYNLLSSLPPSHTWYSVLDLKDAFFCLKLHPNSQPLFAFEWRDPEKGNTGQLTWTRLPQGFKNSPTLFNEALHRDLASFRALNPQVVMLQYVDDLLVAAPTYRDCKEGTRRLLQELSKLGYRVSAKKAQLCREEVTYLGYLLKGGKRWLTPARKATVMKIPTPTTPRQVREFLGKAGFCRLFIPGFASLAAPLYPLTRPKVPFTWTEAHQEAFGRIKEALLSAPALALPDLTKPFALYVDEKEGVARGVLTQTLGPWRRPVAYLSKKLDPVASGWPTCLKAIAAVALLLKDADKLTLGQNVLVIAPHNLESIVRQPPDRWMTNARMTHYQSLLLNERVSFAPPAILNPATLLPVESDDTPIHICSEILAEETGTRPDLRDQPLPGVPAWYTDGSSFIMDGRRQAGAAIVDNKRTVWASNLPEGTSAQKAELIALTQALRLAEGKSINIYTDSRYAFATAHVHGAIYKQRGWLTSAGKDIKNKEEILALLEAIHLPKRVAIIHCPGHQRGTDPVATGNRKADEAAKQAAQSTRILTETTKNAGKRTADGSEFEKRTADGSEFESPKKKAKVE

SEQ ID NO: 1672 - protein, 2127 aa, synthetic construct
MPAAKRVKLDGGDKKYSIGLDIGTNSVGWAVITDEYKVPSKKFKVLGNTDRHSIKKNLIGALLFDSGETAEATRLKRTARRRYTRRKNRICYLQEIFSNEMAKVDDSFFHRLEESFLVEEDKKHERHPIFGNIVDEVAYHEKYPTIYHLRKKLVDSTDKADLRLIYLALAHMIKFRGHFLIEGDLNPDNSDVDKLFIQLVQTYNQLFEENPINASGVDAKAILSARLSKSRRLENLIAQLPGEKKNGLFGNLIALSLGLTPNFKSNFDLAEDAKLQLSKDTYDDDLDNLLAQIGDQYADLFLAAKNLSDAILLSDILRVNTEITKAPLSASMIKRYDEHHQDLTLLKALVRQQLPEKYKEIFFDQSKNGYAGYIDGGASQEEFYKFIKPILEKMDGTEELLVKLNREDLLRKQRTFDNGSIPHQIHLGELHAILRRQEDFYPFLKDNREKIEKILTFRIPYYVGPLARGNSRFAWMTRKSEETITPWNFEEVVDKGASAQSFIERMTNFDKNLPNEKVLPKHSLLYEYFTVYNELTKVKYVTEGMRKPAFLSGEQKKAIVDLLFKTNRKVTVKQLKEDYFKKIECFDSVEISGVEDRFNASLGTYHDLLKIIKDKDFLDNEENEDILEDIVLTLTLFEDREMIEERLKTYAHLFDDKVMKQLKRRRYTGWGRLSRKLINGIRDKQSGKTILDFLKSDGFANRNFMQLIHDDSLTFKEDIQKAQVSGQGDSLHEHIANLAGSPAIKKGILQTVKVVDELVKVMGRHKPENIVIEMARENQTTQKGQKNSRERMKRIEEGIKELGSQILKEHPVENTQLQNEKLYLYYLQNGRDMYVDQELDINRLSDYDVDHIVPQSFLKDDSIDNKVLTRSDKARGKSDNVPSEEVVKKMKNYWRQLLNAKLITQRKFDNLTKAERGGLSELDKAGFIKRQLVETRQITKHVAQILDSRMNTKYDENDKLIREVKVITLKSKLVSDFRKDFQFYKVREINNYHHAHDAYLNAVVGTALIKKYPKLESEFVYGDYKVYDVRKMIAKSEQEIGKATAKYFFYSNIMNFFKTEITLANGEIRKRPLIETNGETGEIVWDKGRDFATVRKVLSMPQVNIVKKTEVQTGGFSKESILPKRNSDKLIARKKDWDPKKYGGFDSPTVAYSVLVVAKVEKGKSKKLKSVKELLGITIMERSSFEKNPIDFLEAKGYKEVKKDLIIKLPKYSLFELENGRKRMLASAGELQKGNELALPSKYVNFLYLASHYEKLKGSPEDNEQKQLFVEQHKHYLDEIIEQISEFSKRVILADANLDKVLSAYNKHRDKPIREQAENIIHLFTLTNLGAPAAFKYFDTTIDRKRYTSTKEVLDATLIHQSITGLYETRIDLSQLGGDGGGGGEAAAKPAPGGLLGRDLLTKLKAQIQFSTEGPQVTWEDRPAMCLVLNLEEEYRLHEKPVPPSIDPSWLQLFPMVWAEKAGMGLANQVPPVVVELKSDASPVAVRQYPMSKEAREGIRPHIQRFLDLGILVPCQSPWNTPLLPVKKPGTNDYRPVQDLREVNKRVQDIHPTVPNPYNLLSSLPPSHTWYSVLDLKDAFFCLKLHPNSQPLFAFEWRDPEKGNTGQLTWTRLPQGFKNSPTLFNEALHRDLASFRALNPQVVMLQYVDDLLVAAPTYRDCKEGTRRLLQELSKLGYRVSAKKAQLCREEVTYLGYLLKGGKRWLTPARKATVMKIPTPTTPRQVREFLGKAGFCRLFIPGFASLAAPLYPLTRPKVPFTWTEAHQEAFGRIKEALLSAPALALPDLTKPFALYVDEKEGVARGVLTQTLGPWRRPVAYLSKKLDPVASGWPTCLKAIAAVALLLKDADKLTLGQNVLVIAPHNLESIVRQPPDRWMTNARMTHYQSLLLNERVSFAPPAILNPATLLPVESDDTPIHICSEILAEETGTRPDLRDQPLPGVPAWYTDGSSFIMDGRRQAGAAIVDNKRTVWASNLPEGTSAQKAELIALTQALRLAEGKSINIYTDSRYAFATAHVHGAIYKQRGWLTSAGKDIKNKEEILALLEAIHLPKRVAIIHCPGHQRGTDPVATGNRKADEAAKQAAQSTRILTETTKNAGKRTADGSEFEKRTADGSEFESPKKKAKVE

SEQ ID NO: 1673 - protein, 2122 aa, synthetic construct
MPAAKRVKLDGGDKKYSIGLDIGTNSVGWAVITDEYKVPSKKFKVLGNTDRHSIKKNLIGALLFDSGETAEATRLKRTARRRYTRRKNRICYLQEIFSNEMAKVDDSFFHRLEESFLVEEDKKHERHPIFGNIVDEVAYHEKYPTIYHLRKKLVDSTDKADLRLIYLALAHMIKFRGHFLIEGDLNPDNSDVDKLFIQLVQTYNQLFEENPINASGVDAKAILSARLSKSRRLENLIAQLPGEKKNGLFGNLIALSLGLTPNFKSNFDLAEDAKLQLSKDTYDDDLDNLLAQIGDQYADLFLAAKNLSDAILLSDILRVNTEITKAPLSASMIKRYDEHHQDLTLLKALVRQQLPEKYKEIFFDQSKNGYAGYIDGGASQEEFYKFIKPILEKMDGTEELLVKLNREDLLRKQRTFDNGSIPHQIHLGELHAILRRQEDFYPFLKDNREKIEKILTFRIPYYVGPLARGNSRFAWMTRKSEETITPWNFEEVVDKGASAQSFIERMTNFDKNLPNEKVLPKHSLLYEYFTVYNELTKVKYVTEGMRKPAFLSGEQKKAIVDLLFKTNRKVTVKQLKEDYFKKIECFDSVEISGVEDRFNASLGTYHDLLKIIKDKDFLDNEENEDILEDIVLTLTLFEDREMIEERLKTYAHLFDDKVMKQLKRRRYTGWGRLSRKLINGIRDKQSGKTILDFLKSDGFANRNFMQLIHDDSLTFKEDIQKAQVSGQGDSLHEHIANLAGSPAIKKGILQTVKVVDELVKVMGRHKPENIVIEMARENQTTQKGQKNSRERMKRIEEGIKELGSQILKEHPVENTQLQNEKLYLYYLQNGRDMYVDQELDINRLSDYDVDHIVPQSFLKDDSIDNKVLTRSDKARGKSDNVPSEEVVKKMKNYWRQLLNAKLITQRKFDNLTKAERGGLSELDKAGFIKRQLVETRQITKHVAQILDSRMNTKYDENDKLIREVKVITLKSKLVSDFRKDFQFYKVREINNYHHAHDAYLNAVVGTALIKKYPKLESEFVYGDYKVYDVRKMIAKSEQEIGKATAKYFFYSNIMNFFKTEITLANGEIRKRPLIETNGETGEIVWDKGRDFATVRKVLSMPQVNIVKKTEVQTGGFSKESILPKRNSDKLIARKKDWDPKKYGGFDSPTVAYSVLVVAKVEKGKSKKLKSVKELLGITIMERSSFEKNPIDFLEAKGYKEVKKDLIIKLPKYSLFELENGRKRMLASAGELQKGNELALPSKYVNFLYLASHYEKLKGSPEDNEQKQLFVEQHKHYLDEIIEQISEFSKRVILADANLDKVLSAYNKHRDKPIREQAENIIHLFTLTNLGAPAAFKYFDTTIDRKRYTSTKEVLDATLIHQSITGLYETRIDLSQLGGDGGGGGPAPGGLLGRDLLTKLKAQIQFSTEGPQVTWEDRPAMCLVLNLEEEYRLHEKPVPPSIDPSWLQLFPMVWAEKAGMGLANQVPPVVVELKSDASPVAVRQYPMSKEAREGIRPHIQRFLDLGILVPCQSPWNTPLLPVKKPGTNDYRPVQDLREVNKRVQDIHPTVPNPYNLLSSLPPSHTWYSVLDLKDAFFCLKLHPNSQPLFAFEWRDPEKGNTGQLTWTRLPQGFKNSPTLFNEALHRDLASFRALNPQVVMLQYVDDLLVAAPTYRDCKEGTRRLLQELSKLGYRVSAKKAQLCREEVTYLGYLLKGGKRWLTPARKATVMKIPTPTTPRQVREFLGKAGFCRLFIPGFASLAAPLYPLTRPKVPFTWTEAHQEAFGRIKEALLSAPALALPDLTKPFALYVDEKEGVARGVLTQTLGPWRRPVAYLSKKLDPVASGWPTCLKAIAAVALLLKDADKLTLGQNVLVIAPHNLESIVRQPPDRWMTNARMTHYQSLLLNERVSFAPPAILNPATLLPVESDDTPIHICSEILAEETGTRPDLRDQPLPGVPAWYTDGSSFIMDGRRQAGAAIVDNKRTVWASNLPEGTSAQKAELIALTQALRLAEGKSINIYTDSRYAFATAHVHGAIYKQRGWLTSAGKDIKNKEEILALLEAIHLPKRVAIIHCPGHQRGTDPVATGNRKADEAAKQAAQSTRILTETTKNAGKRTADGSEFEKRTADGSEFESPKKKAKVE

SEQ ID NO: 1674 - protein, 2136 aa, synthetic construct
MPAAKRVKLDGGDKKYSIGLDIGTNSVGWAVITDEYKVPSKKFKVLGNTDRHSIKKNLIGALLFDSGETAEATRLKRTARRRYTRRKNRICYLQEIFSNEMAKVDDSFFHRLEESFLVEEDKKHERHPIFGNIVDEVAYHEKYPTIYHLRKKLVDSTDKADLRLIYLALAHMIKFRGHFLIEGDLNPDNSDVDKLFIQLVQTYNQLFEENPINASGVDAKAILSARLSKSRRLENLIAQLPGEKKNGLFGNLIALSLGLTPNFKSNFDLAEDAKLQLSKDTYDDDLDNLLAQIGDQYADLFLAAKNLSDAILLSDILRVNTEITKAPLSASMIKRYDEHHQDLTLLKALVRQQLPEKYKEIFFDQSKNGYAGYIDGGASQEEFYKFIKPILEKMDGTEELLVKLNREDLLRKQRTFDNGSIPHQIHLGELHAILRRQEDFYPFLKDNREKIEKILTFRIPYYVGPLARGNSRFAWMTRKSEETITPWNFEEVVDKGASAQSFIERMTNFDKNLPNEKVLPKHSLLYEYFTVYNELTKVKYVTEGMRKPAFLSGEQKKAIVDLLFKTNRKVTVKQLKEDYFKKIECFDSVEISGVEDRFNASLGTYHDLLKIIKDKDFLDNEENEDILEDIVLTLTLFEDREMIEERLKTYAHLFDDKVMKQLKRRRYTGWGRLSRKLINGIRDKQSGKTILDFLKSDGFANRNFMQLIHDDSLTFKEDIQKAQVSGQGDSLHEHIANLAGSPAIKKGILQTVKVVDELVKVMGRHKPENIVIEMARENQTTQKGQKNSRERMKRIEEGIKELGSQILKEHPVENTQLQNEKLYLYYLQNGRDMYVDQELDINRLSDYDVDHIVPQSFLKDDSIDNKVLTRSDKARGKSDNVPSEEVVKKMKNYWRQLLNAKLITQRKFDNLTKAERGGLSELDKAGFIKRQLVETRQITKHVAQILDSRMNTKYDENDKLIREVKVITLKSKLVSDFRKDFQFYKVREINNYHHAHDAYLNAVVGTALIKKYPKLESEFVYGDYKVYDVRKMIAKSEQEIGKATAKYFFYSNIMNFFKTEITLANGEIRKRPLIETNGETGEIVWDKGRDFATVRKVLSMPQVNIVKKTEVQTGGFSKESILPKRNSDKLIARKKDWDPKKYGGFDSPTVAYSVLVVAKVEKGKSKKLKSVKELLGITIMERSSFEKNPIDFLEAKGYKEVKKDLIIKLPKYSLFELENGRKRMLASAGELQKGNELALPSKYVNFLYLASHYEKLKGSPEDNEQKQLFVEQHKHYLDEIIEQISEFSKRVILADANLDKVLSAYNKHRDKPIREQAENIIHLFTLTNLGAPAAFKYFDTTIDRKRYTSTKEVLDATLIHQSITGLYETRIDLSQLGGDGGEAAAKEAAAKEAAAKEAAAKGGLLGRDLLTKLKAQIQFSTEGPQVTWEDRPAMCLVLNLEEEYRLHEKPVPPSIDPSWLQLFPMVWAEKAGMGLANQVPPVVVELKSDASPVAVRQYPMSKEAREGIRPHIQRFLDLGILVPCQSPWNTPLLPVKKPGTNDYRPVQDLREVNKRVQDIHPTVPNPYNLLSSLPPSHTWYSVLDLKDAFFCLKLHPNSQPLFAFEWRDPEKGNTGQLTWTRLPQGFKNSPTLFNEALHRDLASFRALNPQVVMLQYVDDLLVAAPTYRDCKEGTRRLLQELSKLGYRVSAKKAQLCREEVTYLGYLLKGGKRWLTPARKATVMKIPTPTTPRQVREFLGKAGFCRLFIPGFASLAAPLYPLTRPKVPFTWTEAHQEAFGRIKEALLSAPALALPDLTKPFALYVDEKEGVARGVLTQTLGPWRRPVAYLSKKLDPVASGWPTCLKAIAAVALLLKDADKLTLGQNVLVIAPHNLESIVRQPPDRWMTNARMTHYQSLLLNERVSFAPPAILNPATLLPVESDDTPIHICSEILAEETGTRPDLRDQPLPGVPAWYTDGSSFIMDGRRQAGAAIVDNKRTVWASNLPEGTSAQKAELIALTQALRLAEGKSINIYTDSRYAFATAHVHGAIYKQRGWLTSAGKDIKNKEEILALLEAIHLPKRVAIIHCPGHQRGTDPVATGNRKADEAAKQAAQSTRILTETTKNAGKRTADGSEFEKRTADGSEFESPKKKAKVE

SEQ ID NO: 1675 - protein, 2119 aa, synthetic construct
MPAAKRVKLDGGDKKYSIGLDIGTNSVGWAVITDEYKVPSKKFKVLGNTDRHSIKKNLIGALLFDSGETAEATRLKRTARRRYTRRKNRICYLQEIFSNEMAKVDDSFFHRLEESFLVEEDKKHERHPIFGNIVDEVAYHEKYPTIYHLRKKLVDSTDKADLRLIYLALAHMIKFRGHFLIEGDLNPDNSDVDKLFIQLVQTYNQLFEENPINASGVDAKAILSARLSKSRRLENLIAQLPGEKKNGLFGNLIALSLGLTPNFKSNFDLAEDAKLQLSKDTYDDDLDNLLAQIGDQYADLFLAAKNLSDAILLSDILRVNTEITKAPLSASMIKRYDEHHQDLTLLKALVRQQLPEKYKEIFFDQSKNGYAGYIDGGASQEEFYKFIKPILEKMDGTEELLVKLNREDLLRKQRTFDNGSIPHQIHLGELHAILRRQEDFYPFLKDNREKIEKILTFRIPYYVGPLARGNSRFAWMTRKSEETITPWNFEEVVDKGASAQSFIERMTNFDKNLPNEKVLPKHSLLYEYFTVYNELTKVKYVTEGMRKPAFLSGEQKKAIVDLLFKTNRKVTVKQLKEDYFKKIECFDSVEISGVEDRFNASLGTYHDLLKIIKDKDFLDNEENEDILEDIVLTLTLFEDREMIEERLKTYAHLFDDKVMKQLKRRRYTGWGRLSRKLINGIRDKQSGKTILDFLKSDGFANRNFMQLIHDDSLTFKEDIQKAQVSGQGDSLHEHIANLAGSPAIKKGILQTVKVVDELVKVMGRHKPENIVIEMARENQTTQKGQKNSRERMKRIEEGIKELGSQILKEHPVENTQLQNEKLYLYYLQNGRDMYVDQELDINRLSDYDVDHIVPQSFLKDDSIDNKVLTRSDKARGKSDNVPSEEVVKKMKNYWRQLLNAKLITQRKFDNLTKAERGGLSELDKAGFIKRQLVETRQITKHVAQILDSRMNTKYDENDKLIREVKVITLKSKLVSDFRKDFQFYKVREINNYHHAHDAYLNAVVGTALIKKYPKLESEFVYGDYKVYDVRKMIAKSEQEIGKATAKYFFYSNIMNFFKTEITLANGEIRKRPLIETNGETGEIVWDKGRDFATVRKVLSMPQVNIVKKTEVQTGGFSKESILPKRNSDKLIARKKDWDPKKYGGFDSPTVAYSVLVVAKVEKGKSKKLKSVKELLGITIMERSSFEKNPIDFLEAKGYKEVKKDLIIKLPKYSLFELENGRKRMLASAGELQKGNELALPSKYVNFLYLASHYEKLKGSPEDNEQKQLFVEQHKHYLDEIIEQISEFSKRVILADANLDKVLSAYNKHRDKPIREQAENIIHLFTLTNLGAPAAFKYFDTTIDRKRYTSTKEVLDATLIHQSITGLYETRIDLSQLGGDGGGGSGGLLGRDLLTKLKAQIQFSTEGPQVTWEDRPAMCLVLNLEEEYRLHEKPVPPSIDPSWLQLFPMVWAEKAGMGLANQVPPVVVELKSDASPVAVRQYPMSKEAREGIRPHIQRFLDLGILVPCQSPWNTPLLPVKKPGTNDYRPVQDLREVNKRVQDIHPTVPNPYNLLSSLPPSHTWYSVLDLKDAFFCLKLHPNSQPLFAFEWRDPEKGNTGQLTWTRLPQGFKNSPTLFNEALHRDLASFRALNPQVVMLQYVDDLLVAAPTYRDCKEGTRRLLQELSKLGYRVSAKKAQLCREEVTYLGYLLKGGKRWLTPARKATVMKIPTPTTPRQVREFLGKAGFCRLFIPGFASLAAPLYPLTRPKVPFTWTEAHQEAFGRIKEALLSAPALALPDLTKPFALYVDEKEGVARGVLTQTLGPWRRPVAYLSKKLDPVASGWPTCLKAIAAVALLLKDADKLTLGQNVLVIAPHNLESIVRQPPDRWMTNARMTHYQSLLLNERVSFAPPAILNPATLLPVESDDTPIHICSEILAEETGTRPDLRDQPLPGVPAWYTDGSSFIMDGRRQAGAAIVDNKRTVWASNLPEGTSAQKAELIALTQALRLAEGKSINIYTDSRYAFATAHVHGAIYKQRGWLTSAGKDIKNKEEILALLEAIHLPKRVAIIHCPGHQRGTDPVATGNRKADEAAKQAAQSTRILTETTKNAGKRTADGSEFEKRTADGSEFESPKKKAKVE

SEQ ID NO: 1676 - protein, 2122 aa, synthetic construct
MPAAKRVKLDGGDKKYSIGLDIGTNSVGWAVITDEYKVPSKKFKVLGNTDRHSIKKNLIGALLFDSGETAEATRLKRTARRRYTRRKNRICYLQEIFSNEMAKVDDSFFHRLEESFLVEEDKKHERHPIFGNIVDEVAYHEKYPTIYHLRKKLVDSTDKADLRLIYLALAHMIKFRGHFLIEGDLNPDNSDVDKLFIQLVQTYNQLFEENPINASGVDAKAILSARLSKSRRLENLIAQLPGEKKNGLFGNLIALSLGLTPNFKSNFDLAEDAKLQLSKDTYDDDLDNLLAQIGDQYADLFLAAKNLSDAILLSDILRVNTEITKAPLSASMIKRYDEHHQDLTLLKALVRQQLPEKYKEIFFDQSKNGYAGYIDGGASQEEFYKFIKPILEKMDGTEELLVKLNREDLLRKQRTFDNGSIPHQIHLGELHAILRRQEDFYPFLKDNREKIEKILTFRIPYYVGPLARGNSRFAWMTRKSEETITPWNFEEVVDKGASAQSFIERMTNFDKNLPNEKVLPKHSLLYEYFTVYNELTKVKYVTEGMRKPAFLSGEQKKAIVDLLFKTNRKVTVKQLKEDYFKKIECFDSVEISGVEDRFNASLGTYHDLLKIIKDKDFLDNEENEDILEDIVLTLTLFEDREMIEERLKTYAHLFDDKVMKQLKRRRYTGWGRLSRKLINGIRDKQSGKTILDFLKSDGFANRNFMQLIHDDSLTFKEDIQKAQVSGQGDSLHEHIANLAGSPAIKKGILQTVKVVDELVKVMGRHKPENIVIEMARENQTTQKGQKNSRERMKRIEEGIKELGSQILKEHPVENTQLQNEKLYLYYLQNGRDMYVDQELDINRLSDYDVDHIVPQSFLKDDSIDNKVLTRSDKARGKSDNVPSEEVVKKMKNYWRQLLNAKLITQRKFDNLTKAERGGLSELDKAGFIKRQLVETRQITKHVAQILDSRMNTKYDENDKLIREVKVITLKSKLVSDFRKDFQFYKVREINNYHHAHDAYLNAVVGTALIKKYPKLESEFVYGDYKVYDVRKMIAKSEQEIGKATAKYFFYSNIMNFFKTEITLANGEIRKRPLIETNGETGEIVWDKGRDFATVRKVLSMPQVNIVKKTEVQTGGFSKESILPKRNSDKLIARKKDWDPKKYGGFDSPTVAYSVLVVAKVEKGKSKKLKSVKELLGITIMERSSFEKNPIDFLEAKGYKEVKKDLIIKLPKYSLFELENGRKRMLASAGELQKGNELALPSKYVNFLYLASHYEKLKGSPEDNEQKQLFVEQHKHYLDEIIEQISEFSKRVILADANLDKVLSAYNKHRDKPIREQAENIIHLFTLTNLGAPAAFKYFDTTIDRKRYTSTKEVLDATLIHQSITGLYETRIDLSQLGGDGGGGGGSSGGLLGRDLLTKLKAQIQFSTEGPQVTWEDRPAMCLVLNLEEEYRLHEKPVPPSIDPSWLQLFPMVWAEKAGMGLANQVPPVVVELKSDASPVAVRQYPMSKEAREGIRPHIQRFLDLGILVPCQSPWNTPLLPVKKPGTNDYRPVQDLREVNKRVQDIHPTVPNPYNLLSSLPPSHTWYSVLDLKDAFFCLKLHPNSQPLFAFEWRDPEKGNTGQLTWTRLPQGFKNSPTLFNEALHRDLASFRALNPQVVMLQYVDDLLVAAPTYRDCKEGTRRLLQELSKLGYRVSAKKAQLCREEVTYLGYLLKGGKRWLTPARKATVMKIPTPTTPRQVREFLGKAGFCRLFIPGFASLAAPLYPLTRPKVPFTWTEAHQEAFGRIKEALLSAPALALPDLTKPFALYVDEKEGVARGVLTQTLGPWRRPVAYLSKKLDPVASGWPTCLKAIAAVALLLKDADKLTLGQNVLVIAPHNLESIVRQPPDRWMTNARMTHYQSLLLNERVSFAPPAILNPATLLPVESDDTPIHICSEILAEETGTRPDLRDQPLPGVPAWYTDGSSFIMDGRRQAGAAIVDNKRTVWASNLPEGTSAQKAELIALTQALRLAEGKSINIYTDSRYAFATAHVHGAIYKQRGWLTSAGKDIKNKEEILALLEAIHLPKRVAIIHCPGHQRGTDPVATGNRKADEAAKQAAQSTRILTETTKNAGKRTADGSEFEKRTADGSEFESPKKKAKVE

SEQ ID NO: 1677 - protein, 2127 aa, synthetic construct
MPAAKRVKLDGGDKKYSIGLDIGTNSVGWAVITDEYKVPSKKFKVLGNTDRHSIKKNLIGALLFDSGETAEATRLKRTARRRYTRRKNRICYLQEIFSNEMAKVDDSFFHRLEESFLVEEDKKHERHPIFGNIVDEVAYHEKYPTIYHLRKKLVDSTDKADLRLIYLALAHMIKFRGHFLIEGDLNPDNSDVDKLFIQLVQTYNQLFEENPINASGVDAKAILSARLSKSRRLENLIAQLPGEKKNGLFGNLIALSLGLTPNFKSNFDLAEDAKLQLSKDTYDDDLDNLLAQIGDQYADLFLAAKNLSDAILLSDILRVNTEITKAPLSASMIKRYDEHHQDLTLLKALVRQQLPEKYKEIFFDQSKNGYAGYIDGGASQEEFYKFIKPILEKMDGTEELLVKLNREDLLRKQRTFDNGSIPHQIHLGELHAILRRQEDFYPFLKDNREKIEKILTFRIPYYVGPLARGNSRFAWMTRKSEETITPWNFEEVVDKGASAQSFIERMTNFDKNLPNEKVLPKHSLLYEYFTVYNELTKVKYVTEGMRKPAFLSGEQKKAIVDLLFKTNRKVTVKQLKEDYFKKIECFDSVEISGVEDRFNASLGTYHDLLKIIKDKDFLDNEENEDILEDIVLTLTLFEDREMIEERLKTYAHLFDDKVMKQLKRRRYTGWGRLSRKLINGIRDKQSGKTILDFLKSDGFANRNFMQLIHDDSLTFKEDIQKAQVSGQGDSLHEHIANLAGSPAIKKGILQTVKVVDELVKVMGRHKPENIVIEMARENQTTQKGQKNSRERMKRIEEGIKELGSQILKEHPVENTQLQNEKLYLYYLQNGRDMYVDQELDINRLSDYDVDHIVPQSFLKDDSIDNKVLTRSDKARGKSDNVPSEEVVKKMKNYWRQLLNAKLITQRKFDNLTKAERGGLSELDKAGFIKRQLVETRQITKHVAQILDSRMNTKYDENDKLIREVKVITLKSKLVSDFRKDFQFYKVREINNYHHAHDAYLNAVVGTALIKKYPKLESEFVYGDYKVYDVRKMIAKSEQEIGKATAKYFFYSNIMNFFKTEITLANGEIRKRPLIETNGETGEIVWDKGRDFATVRKVLSMPQVNIVKKTEVQTGGFSKESILPKRNSDKLIARKKDWDPKKYGGFDSPTVAYSVLVVAKVEKGKSKKLKSVKELLGITIMERSSFEKNPIDFLEAKGYKEVKKDLIIKLPKYSLFELENGRKRMLASAGELQKGNELALPSKYVNFLYLASHYEKLKGSPEDNEQKQLFVEQHKHYLDEIIEQISEFSKRVILADANLDKVLSAYNKHRDKPIREQAENIIHLFTLTNLGAPAAFKYFDTTIDRKRYTSTKEVLDATLIHQSITGLYETRIDLSQLGGDGGEAAAKGGGGSSGGLLGRDLLTKLKAQIQFSTEGPQVTWEDRPAMCLVLNLEEEYRLHEKPVPPSIDPSWLQLFPMVWAEKAGMGLANQVPPVVVELKSDASPVAVRQYPMSKEAREGIRPHIQRFLDLGILVPCQSPWNTPLLPVKKPGTNDYRPVQDLREVNKRVQDIHPTVPNPYNLLSSLPPSHTWYSVLDLKDAFFCLKLHPNSQPLFAFEWRDPEKGNTGQLTWTRLPQGFKNSPTLFNEALHRDLASFRALNPQVVMLQYVDDLLVAAPTYRDCKEGTRRLLQELSKLGYRVSAKKAQLCREEVTYLGYLLKGGKRWLTPARKATVMKIPTPTTPRQVREFLGKAGFCRLFIPGFASLAAPLYPLTRPKVPFTWTEAHQEAFGRIKEALLSAPALALPDLTKPFALYVDEKEGVARGVLTQTLGPWRRPVAYLSKKLDPVASGWPTCLKAIAAVALLLKDADKLTLGQNVLVIAPHNLESIVRQPPDRWMTNARMTHYQSLLLNERVSFAPPAILNPATLLPVESDDTPIHICSEILAEETGTRPDLRDQPLPGVPAWYTDGSSFIMDGRRQAGAAIVDNKRTVWASNLPEGTSAQKAELIALTQALRLAEGKSINIYTDSRYAFATAHVHGAIYKQRGWLTSAGKDIKNKEEILALLEAIHLPKRVAIIHCPGHQRGTDPVATGNRKADEAAKQAAQSTRILTETTKNAGKRTADGSEFEKRTADGSEFESPKKKAKVE

SEQ ID NO: 1678 - protein, 2128 aa, synthetic construct
MPAAKRVKLDGGDKKYSIGLDIGTNSVGWAVITDEYKVPSKKFKVLGNTDRHSIKKNLIGALLFDSGETAEATRLKRTARRRYTRRKNRICYLQEIFSNEMAKVDDSFFHRLEESFLVEEDKKHERHPIFGNIVDEVAYHEKYPTIYHLRKKLVDSTDKADLRLIYLALAHMIKFRGHFLIEGDLNPDNSDVDKLFIQLVQTYNQLFEENPINASGVDAKAILSARLSKSRRLENLIAQLPGEKKNGLFGNLIALSLGLTPNFKSNFDLAEDAKLQLSKDTYDDDLDNLLAQIGDQYADLFLAAKNLSDAILLSDILRVNTEITKAPLSASMIKRYDEHHQDLTLLKALVRQQLPEKYKEIFFDQSKNGYAGYIDGGASQEEFYKFIKPILEKMDGTEELLVKLNREDLLRKQRTFDNGSIPHQIHLGELHAILRRQEDFYPFLKDNREKIEKILTFRIPYYVGPLARGNSRFAWMTRKSEETITPWNFEEVVDKGASAQSFIERMTNFDKNLPNEKVLPKHSLLYEYFTVYNELTKVKYVTEGMRKPAFLSGEQKKAIVDLLFKTNRKVTVKQLKEDYFKKIECFDSVEISGVEDRFNASLGTYHDLLKIIKDKDFLDNEENEDILEDIVLTLTLFEDREMIEERLKTYAHLFDDKVMKQLKRRRYTGWGRLSRKLINGIRDKQSGKTILDFLKSDGFANRNFMQLIHDDSLTFKEDIQKAQVSGQGDSLHEHIANLAGSPAIKKGILQTVKVVDELVKVMGRHKPENIVIEMARENQTTQKGQKNSRERMKRIEEGIKELGSQILKEHPVENTQLQNEKLYLYYLQNGRDMYVDQELDINRLSDYDVDHIVPQSFLKDDSIDNKVLTRSDKARGKSDNVPSEEVVKKMKNYWRQLLNAKLITQRKFDNLTKAERGGLSELDKAGFIKRQLVETRQITKHVAQILDSRMNTKYDENDKLIREVKVITLKSKLVSDFRKDFQFYKVREINNYHHAHDAYLNAVVGTALIKKYPKLESEFVYGDYKVYDVRKMIAKSEQEIGKATAKYFFYSNIMNFFKTEITLANGEIRKRPLIETNGETGEIVWDKGRDFATVRKVLSMPQVNIVKKTEVQTGGFSKESILPKRNSDKLIARKKDWDPKKYGGFDSPTVAYSVLVVAKVEKGKSKKLKSVKELLGITIMERSSFEKNPIDFLEAKGYKEVKKDLIIKLPKYSLFELENGRKRMLASAGELQKGNELALPSKYVNFLYLASHYEKLKGSPEDNEQKQLFVEQHKHYLDEIIEQISEFSKRVILADANLDKVLSAYNKHRDKPIREQAENIIHLFTLTNLGAPAAFKYFDTTIDRKRYTSTKEVLDATLIHQSITGLYETRIDLSQLGGDGGGGSGGSGGSGGSGGLLGRDLLTKLKAQIQFSTEGPQVTWEDRPAMCLVLNLEEEYRLHEKPVPPSIDPSWLQLFPMVWAEKAGMGLANQVPPVVVELKSDASPVAVRQYPMSKEAREGIRPHIQRFLDLGILVPCQSPWNTPLLPVKKPGTNDYRPVQDLREVNKRVQDIHPTVPNPYNLLSSLPPSHTWYSVLDLKDAFFCLKLHPNSQPLFAFEWRDPEKGNTGQLTWTRLPQGFKNSPTLFNEALHRDLASFRALNPQVVMLQYVDDLLVAAPTYRDCKEGTRRLLQELSKLGYRVSAKKAQLCREEVTYLGYLLKGGKRWLTPARKATVMKIPTPTTPRQVREFLGKAGFCRLFIPGFASLAAPLYPLTRPKVPFTWTEAHQEAFGRIKEALLSAPALALPDLTKPFALYVDEKEGVARGVLTQTLGPWRRPVAYLSKKLDPVASGWPTCLKAIAAVALLLKDADKLTLGQNVLVIAPHNLESIVRQPPDRWMTNARMTHYQSLLLNERVSFAPPAILNPATLLPVESDDTPIHICSEILAEETGTRPDLRDQPLPGVPAWYTDGSSFIMDGRRQAGAAIVDNKRTVWASNLPEGTSAQKAELIALTQALRLAEGKSINIYTDSRYAFATAHVHGAIYKQRGWLTSAGKDIKNKEEILALLEAIHLPKRVAIIHCPGHQRGTDPVATGNRKADEAAKQAAQSTRILTETTKNAGKRTADGSEFEKRTADGSEFESPKKKAKVE

SEQ ID NO: 1679 - protein, 2124 aa, synthetic construct
MPAAKRVKLDGGDKKYSIGLDIGTNSVGWAVITDEYKVPSKKFKVLGNTDRHSIKKNLIGALLFDSGETAEATRLKRTARRRYTRRKNRICYLQEIFSNEMAKVDDSFFHRLEESFLVEEDKKHERHPIFGNIVDEVAYHEKYPTIYHLRKKLVDSTDKADLRLIYLALAHMIKFRGHFLIEGDLNPDNSDVDKLFIQLVQTYNQLFEENPINASGVDAKAILSARLSKSRRLENLIAQLPGEKKNGLFGNLIALSLGLTPNFKSNFDLAEDAKLQLSKDTYDDDLDNLLAQIGDQYADLFLAAKNLSDAILLSDILRVNTEITKAPLSASMIKRYDEHHQDLTLLKALVRQQLPEKYKEIFFDQSKNGYAGYIDGGASQEEFYKFIKPILEKMDGTEELLVKLNREDLLRKQRTFDNGSIPHQIHLGELHAILRRQEDFYPFLKDNREKIEKILTFRIPYYVGPLARGNSRFAWMTRKSEETITPWNFEEVVDKGASAQSFIERMTNFDKNLPNEKVLPKHSLLYEYFTVYNELTKVKYVTEGMRKPAFLSGEQKKAIVDLLFKTNRKVTVKQLKEDYFKKIECFDSVEISGVEDRFNASLGTYHDLLKIIKDKDFLDNEENEDILEDIVLTLTLFEDREMIEERLKTYAHLFDDKVMKQLKRRRYTGWGRLSRKLINGIRDKQSGKTILDFLKSDGFANRNFMQLIHDDSLTFKEDIQKAQVSGQGDSLHEHIANLAGSPAIKKGILQTVKVVDELVKVMGRHKPENIVIEMARENQTTQKGQKNSRERMKRIEEGIKELGSQILKEHPVENTQLQNEKLYLYYLQNGRDMYVDQELDINRLSDYDVDHIVPQSFLKDDSIDNKVLTRSDKARGKSDNVPSEEVVKKMKNYWRQLLNAKLITQRKFDNLTKAERGGLSELDKAGFIKRQLVETRQITKHVAQILDSRMNTKYDENDKLIREVKVITLKSKLVSDFRKDFQFYKVREINNYHHAHDAYLNAVVGTALIKKYPKLESEFVYGDYKVYDVRKMIAKSEQEIGKATAKYFFYSNIMNFFKTEITLANGEIRKRPLIETNGETGEIVWDKGRDFATVRKVLSMPQVNIVKKTEVQTGGFSKESILPKRNSDKLIARKKDWDPKKYGGFDSPTVAYSVLVVAKVEKGKSKKLKSVKELLGITIMERSSFEKNPIDFLEAKGYKEVKKDLIIKLPKYSLFELENGRKRMLASAGELQKGNELALPSKYVNFLYLASHYEKLKGSPEDNEQKQLFVEQHKHYLDEIIEQISEFSKRVILADANLDKVLSAYNKHRDKPIREQAENIIHLFTLTNLGAPAAFKYFDTTIDRKRYTSTKEVLDATLIHQSITGLYETRIDLSQLGGDGGEAAAKGGSGGLLGRDLLTKLKAQIQFSTEGPQVTWEDRPAMCLVLNLEEEYRLHEKPVPPSIDPSWLQLFPMVWAEKAGMGLANQVPPVVVELKSDASPVAVRQYPMSKEAREGIRPHIQRFLDLGILVPCQSPWNTPLLPVKKPGTNDYRPVQDLREVNKRVQDIHPTVPNPYNLLSSLPPSHTWYSVLDLKDAFFCLKLHPNSQPLFAFEWRDPEKGNTGQLTWTRLPQGFKNSPTLFNEALHRDLASFRALNPQVVMLQYVDDLLVAAPTYRDCKEGTRRLLQELSKLGYRVSAKKAQLCREEVTYLGYLLKGGKRWLTPARKATVMKIPTPTTPRQVREFLGKAGFCRLFIPGFASLAAPLYPLTRPKVPFTWTEAHQEAFGRIKEALLSAPALALPDLTKPFALYVDEKEGVARGVLTQTLGPWRRPVAYLSKKLDPVASGWPTCLKAIAAVALLLKDADKLTLGQNVLVIAPHNLESIVRQPPDRWMTNARMTHYQSLLLNERVSFAPPAILNPATLLPVESDDTPIHICSEILAEETGTRPDLRDQPLPGVPAWYTDGSSFIMDGRRQAGAAIVDNKRTVWASNLPEGTSAQKAELIALTQALRLAEGKSINIYTDSRYAFATAHVHGAIYKQRGWLTSAGKDIKNKEEILALLEAIHLPKRVAIIHCPGHQRGTDPVATGNRKADEAAKQAAQSTRILTETTKNAGKRTADGSEFEKRTADGSEFESPKKKAKVE

SEQ ID NO: 1680 - protein, 2123 aa, synthetic construct
MPAAKRVKLDGGDKKYSIGLDIGTNSVGWAVITDEYKVPSKKFKVLGNTDRHSIKKNLIGALLFDSGETAEATRLKRTARRRYTRRKNRICYLQEIFSNEMAKVDDSFFHRLEESFLVEEDKKHERHPIFGNIVDEVAYHEKYPTIYHLRKKLVDSTDKADLRLIYLALAHMIKFRGHFLIEGDLNPDNSDVDKLFIQLVQTYNQLFEENPINASGVDAKAILSARLSKSRRLENLIAQLPGEKKNGLFGNLIALSLGLTPNFKSNFDLAEDAKLQLSKDTYDDDLDNLLAQIGDQYADLFLAAKNLSDAILLSDILRVNTEITKAPLSASMIKRYDEHHQDLTLLKALVRQQLPEKYKEIFFDQSKNGYAGYIDGGASQEEFYKFIKPILEKMDGTEELLVKLNREDLLRKQRTFDNGSIPHQIHLGELHAILRRQEDFYPFLKDNREKIEKILTFRIPYYVGPLARGNSRFAWMTRKSEETITPWNFEEVVDKGASAQSFIERMTNFDKNLPNEKVLPKHSLLYEYFTVYNELTKVKYVTEGMRKPAFLSGEQKKAIVDLLFKTNRKVTVKQLKEDYFKKIECFDSVEISGVEDRFNASLGTYHDLLKIIKDKDFLDNEENEDILEDIVLTLTLFEDREMIEERLKTYAHLFDDKVMKQLKRRRYTGWGRLSRKLINGIRDKQSGKTILDFLKSDGFANRNFMQLIHDDSLTFKEDIQKAQVSGQGDSLHEHIANLAGSPAIKKGILQTVKVVDELVKVMGRHKPENIVIEMARENQTTQKGQKNSRERMKRIEEGIKELGSQILKEHPVENTQLQNEKLYLYYLQNGRDMYVDQELDINRLSDYDVDHIVPQSFLKDDSIDNKVLTRSDKARGKSDNVPSEEVVKKMKNYWRQLLNAKLITQRKFDNLTKAERGGLSELDKAGFIKRQLVETRQITKHVAQILDSRMNTKYDENDKLIREVKVITLKSKLVSDFRKDFQFYKVREINNYHHAHDAYLNAVVGTALIKKYPKLESEFVYGDYKVYDVRKMIAKSEQEIGKATAKYFFYSNIMNFFKTEITLANGEIRKRPLIETNGETGEIVWDKGRDFATVRKVLSMPQVNIVKKTEVQTGGFSKESILPKRNSDKLIARKKDWDPKKYGGFDSPTVAYSVLVVAKVEKGKSKKLKSVKELLGITIMERSSFEKNPIDFLEAKGYKEVKKDLIIKLPKYSLFELENGRKRMLASAGELQKGNELALPSKYVNFLYLASHYEKLKGSPEDNEQKQLFVEQHKHYLDEIIEQISEFSKRVILADANLDKVLSAYNKHRDKPIREQAENIIHLFTLTNLGAPAAFKYFDTTIDRKRYTSTKEVLDATLIHQSITGLYETRIDLSQLGGDGGPAPAPAPGGLLGRDLLTKLKAQIQFSTEGPQVTWEDRPAMCLVLNLEEEYRLHEKPVPPSIDPSWLQLFPMVWAEKAGMGLANQVPPVVVELKSDASPVAVRQYPMSKEAREGIRPHIQRFLDLGILVPCQSPWNTPLLPVKKPGTNDYRPVQDLREVNKRVQDIHPTVPNPYNLLSSLPPSHTWYSVLDLKDAFFCLKLHPNSQPLFAFEWRDPEKGNTGQLTWTRLPQGFKNSPTLFNEALHRDLASFRALNPQVVMLQYVDDLLVAAPTYRDCKEGTRRLLQELSKLGYRVSAKKAQLCREEVTYLGYLLKGGKRWLTPARKATVMKIPTPTTPRQVREFLGKAGFCRLFIPGFASLAAPLYPLTRPKVPFTWTEAHQEAFGRIKEALLSAPALALPDLTKPFALYVDEKEGVARGVLTQTLGPWRRPVAYLSKKLDPVASGWPTCLKAIAAVALLLKDADKLTLGQNVLVIAPHNLESIVRQPPDRWMTNARMTHYQSLLLNERVSFAPPAILNPATLLPVESDDTPIHICSEILAEETGTRPDLRDQPLPGVPAWYTDGSSFIMDGRRQAGAAIVDNKRTVWASNLPEGTSAQKAELIALTQALRLAEGKSINIYTDSRYAFATAHVHGAIYKQRGWLTSAGKDIKNKEEILALLEAIHLPKRVAIIHCPGHQRGTDPVATGNRKADEAAKQAAQSTRILTETTKNAGKRTADGSEFEKRTADGSEFESPKKKAKVE

SEQ ID NO: 1681 - protein, 2131 aa, synthetic construct
MPAAKRVKLDGGDKKYSIGLDIGTNSVGWAVITDEYKVPSKKFKVLGNTDRHSIKKNLIGALLFDSGETAEATRLKRTARRRYTRRKNRICYLQEIFSNEMAKVDDSFFHRLEESFLVEEDKKHERHPIFGNIVDEVAYHEKYPTIYHLRKKLVDSTDKADLRLIYLALAHMIKFRGHFLIEGDLNPDNSDVDKLFIQLVQTYNQLFEENPINASGVDAKAILSARLSKSRRLENLIAQLPGEKKNGLFGNLIALSLGLTPNFKSNFDLAEDAKLQLSKDTYDDDLDNLLAQIGDQYADLFLAAKNLSDAILLSDILRVNTEITKAPLSASMIKRYDEHHQDLTLLKALVRQQLPEKYKEIFFDQSKNGYAGYIDGGASQEEFYKFIKPILEKMDGTEELLVKLNREDLLRKQRTFDNGSIPHQIHLGELHAILRRQEDFYPFLKDNREKIEKILTFRIPYYVGPLARGNSRFAWMTRKSEETITPWNFEEVVDKGASAQSFIERMTNFDKNLPNEKVLPKHSLLYEYFTVYNELTKVKYVTEGMRKPAFLSGEQKKAIVDLLFKTNRKVTVKQLKEDYFKKIECFDSVEISGVEDRFNASLGTYHDLLKIIKDKDFLDNEENEDILEDIVLTLTLFEDREMIEERLKTYAHLFDDKVMKQLKRRRYTGWGRLSRKLINGIRDKQSGKTILDFLKSDGFANRNFMQLIHDDSLTFKEDIQKAQVSGQGDSLHEHIANLAGSPAIKKGILQTVKVVDELVKVMGRHKPENIVIEMARENQTTQKGQKNSRERMKRIEEGIKELGSQILKEHPVENTQLQNEKLYLYYLQNGRDMYVDQELDINRLSDYDVDHIVPQSFLKDDSIDNKVLTRSDKARGKSDNVPSEEVVKKMKNYWRQLLNAKLITQRKFDNLTKAERGGLSELDKAGFIKRQLVETRQITKHVAQILDSRMNTKYDENDKLIREVKVITLKSKLVSDFRKDFQFYKVREINNYHHAHDAYLNAVVGTALIKKYPKLESEFVYGDYKVYDVRKMIAKSEQEIGKATAKYFFYSNIMNFFKTEITLANGEIRKRPLIETNGETGEIVWDKGRDFATVRKVLSMPQVNIVKKTEVQTGGFSKESILPKRNSDKLIARKKDWDPKKYGGFDSPTVAYSVLVVAKVEKGKSKKLKSVKELLGITIMERSSFEKNPIDFLEAKGYKEVKKDLIIKLPKYSLFELENGRKRMLASAGELQKGNELALPSKYVNFLYLASHYEKLKGSPEDNEQKQLFVEQHKHYLDEIIEQISEFSKRVILADANLDKVLSAYNKHRDKPIREQAENIIHLFTLTNLGAPAAFKYFDTTIDRKRYTSTKEVLDATLIHQSITGLYETRIDLSQLGGDGGGSSGSSGSSGSSGSSGGLLGRDLLTKLKAQIQFSTEGPQVTWEDRPAMCLVLNLEEEYRLHEKPVPPSIDPSWLQLFPMVWAEKAGMGLANQVPPVVVELKSDASPVAVRQYPMSKEAREGIRPHIQRFLDLGILVPCQSPWNTPLLPVKKPGTNDYRPVQDLREVNKRVQDIHPTVPNPYNLLSSLPPSHTWYSVLDLKDAFFCLKLHPNSQPLFAFEWRDPEKGNTGQLTWTRLPQGFKNSPTLFNEALHRDLASFRALNPQVVMLQYVDDLLVAAPTYRDCKEGTRRLLQELSKLGYRVSAKKAQLCREEVTYLGYLLKGGKRWLTPARKATVMKIPTPTTPRQVREFLGKAGFCRLFIPGFASLAAPLYPLTRPKVPFTWTEAHQEAFGRIKEALLSAPALALPDLTKPFALYVDEKEGVARGVLTQTLGPWRRPVAYLSKKLDPVASGWPTCLKAIAAVALLLKDADKLTLGQNVLVIAPHNLESIVRQPPDRWMTNARMTHYQSLLLNERVSFAPPAILNPATLLPVESDDTPIHICSEILAEETGTRPDLRDQPLPGVPAWYTDGSSFIMDGRRQAGAAIVDNKRTVWASNLPEGTSAQKAELIALTQALRLAEGKSINIYTDSRYAFATAHVHGAIYKQRGWLTSAGKDIKNKEEILALLEAIHLPKRVAIIHCPGHQRGTDPVATGNRKADEAAKQAAQSTRILTETTKNAGKRTADGSEFEKRTADGSEFESPKKKAKVE

SEQ ID NO: 1682 - protein, 2127 aa, synthetic construct
MPAAKRVKLDGGDKKYSIGLDIGTNSVGWAVITDEYKVPSKKFKVLGNTDRHSIKKNLIGALLFDSGETAEATRLKRTARRRYTRRKNRICYLQEIFSNEMAKVDDSFFHRLEESFLVEEDKKHERHPIFGNIVDEVAYHEKYPTIYHLRKKLVDSTDKADLRLIYLALAHMIKFRGHFLIEGDLNPDNSDVDKLFIQLVQTYNQLFEENPINASGVDAKAILSARLSKSRRLENLIAQLPGEKKNGLFGNLIALSLGLTPNFKSNFDLAEDAKLQLSKDTYDDDLDNLLAQIGDQYADLFLAAKNLSDAILLSDILRVNTEITKAPLSASMIKRYDEHHQDLTLLKALVRQQLPEKYKEIFFDQSKNGYAGYIDGGASQEEFYKFIKPILEKMDGTEELLVKLNREDLLRKQRTFDNGSIPHQIHLGELHAILRRQEDFYPFLKDNREKIEKILTFRIPYYVGPLARGNSRFAWMTRKSEETITPWNFEEVVDKGASAQSFIERMTNFDKNLPNEKVLPKHSLLYEYFTVYNELTKVKYVTEGMRKPAFLSGEQKKAIVDLLFKTNRKVTVKQLKEDYFKKIECFDSVEISGVEDRFNASLGTYHDLLKIIKDKDFLDNEENEDILEDIVLTLTLFEDREMIEERLKTYAHLFDDKVMKQLKRRRYTGWGRLSRKLINGIRDKQSGKTILDFLKSDGFANRNFMQLIHDDSLTFKEDIQKAQVSGQGDSLHEHIANLAGSPAIKKGILQTVKVVDELVKVMGRHKPENIVIEMARENQTTQKGQKNSRERMKRIEEGIKELGSQILKEHPVENTQLQNEKLYLYYLQNGRDMYVDQELDINRLSDYDVDHIVPQSFLKDDSIDNKVLTRSDKARGKSDNVPSEEVVKKMKNYWRQLLNAKLITQRKFDNLTKAERGGLSELDKAGFIKRQLVETRQITKHVAQILDSRMNTKYDENDKLIREVKVITLKSKLVSDFRKDFQFYKVREINNYHHAHDAYLNAVVGTALIKKYPKLESEFVYGDYKVYDVRKMIAKSEQEIGKATAKYFFYSNIMNFFKTEITLANGEIRKRPLIETNGETGEIVWDKGRDFATVRKVLSMPQVNIVKKTEVQTGGFSKESILPKRNSDKLIARKKDWDPKKYGGFDSPTVAYSVLVVAKVEKGKSKKLKSVKELLGITIMERSSFEKNPIDFLEAKGYKEVKKDLIIKLPKYSLFELENGRKRMLASAGELQKGNELALPSKYVNFLYLASHYEKLKGSPEDNEQKQLFVEQHKHYLDEIIEQISEFSKRVILADANLDKVLSAYNKHRDKPIREQAENIIHLFTLTNLGAPAAFKYFDTTIDRKRYTSTKEVLDATLIHQSITGLYETRIDLSQLGGDGGGGGGGSEAAAKGGLLGRDLLTKLKAQIQFSTEGPQVTWEDRPAMCLVLNLEEEYRLHEKPVPPSIDPSWLQLFPMVWAEKAGMGLANQVPPVVVELKSDASPVAVRQYPMSKEAREGIRPHIQRFLDLGILVPCQSPWNTPLLPVKKPGTNDYRPVQDLREVNKRVQDIHPTVPNPYNLLSSLPPSHTWYSVLDLKDAFFCLKLHPNSQPLFAFEWRDPEKGNTGQLTWTRLPQGFKNSPTLFNEALHRDLASFRALNPQVVMLQYVDDLLVAAPTYRDCKEGTRRLLQELSKLGYRVSAKKAQLCREEVTYLGYLLKGGKRWLTPARKATVMKIPTPTTPRQVREFLGKAGFCRLFIPGFASLAAPLYPLTRPKVPFTWTEAHQEAFGRIKEALLSAPALALPDLTKPFALYVDEKEGVARGVLTQTLGPWRRPVAYLSKKLDPVASGWPTCLKAIAAVALLLKDADKLTLGQNVLVIAPHNLESIVRQPPDRWMTNARMTHYQSLLLNERVSFAPPAILNPATLLPVESDDTPIHICSEILAEETGTRPDLRDQPLPGVPAWYTDGSSFIMDGRRQAGAAIVDNKRTVWASNLPEGTSAQKAELIALTQALRLAEGKSINIYTDSRYAFATAHVHGAIYKQRGWLTSAGKDIKNKEEILALLEAIHLPKRVAIIHCPGHQRGTDPVATGNRKADEAAKQAAQSTRILTETTKNAGKRTADGSEFEKRTADGSEFESPKKKAKVE

SEQ ID NO: 1683 - protein, 2125 aa, synthetic construct
MPAAKRVKLDGGDKKYSIGLDIGTNSVGWAVITDEYKVPSKKFKVLGNTDRHSIKKNLIGALLFDSGETAEATRLKRTARRRYTRRKNRICYLQEIFSNEMAKVDDSFFHRLEESFLVEEDKKHERHPIFGNIVDEVAYHEKYPTIYHLRKKLVDSTDKADLRLIYLALAHMIKFRGHFLIEGDLNPDNSDVDKLFIQLVQTYNQLFEENPINASGVDAKAILSARLSKSRRLENLIAQLPGEKKNGLFGNLIALSLGLTPNFKSNFDLAEDAKLQLSKDTYDDDLDNLLAQIGDQYADLFLAAKNLSDAILLSDILRVNTEITKAPLSASMIKRYDEHHQDLTLLKALVRQQLPEKYKEIFFDQSKNGYAGYIDGGASQEEFYKFIKPILEKMDGTEELLVKLNREDLLRKQRTFDNGSIPHQIHLGELHAILRRQEDFYPFLKDNREKIEKILTFRIPYYVGPLARGNSRFAWMTRKSEETITPWNFEEVVDKGASAQSFIERMTNFDKNLPNEKVLPKHSLLYEYFTVYNELTKVKYVTEGMRKPAFLSGEQKKAIVDLLFKTNRKVTVKQLKEDYFKKIECFDSVEISGVEDRFNASLGTYHDLLKIIKDKDFLDNEENEDILEDIVLTLTLFEDREMIEERLKTYAHLFDDKVMKQLKRRRYTGWGRLSRKLINGIRDKQSGKTILDFLKSDGFANRNFMQLIHDDSLTFKEDIQKAQVSGQGDSLHEHIANLAGSPAIKKGILQTVKVVDELVKVMGRHKPENIVIEMARENQTTQKGQKNSRERMKRIEEGIKELGSQILKEHPVENTQLQNEKLYLYYLQNGRDMYVDQELDINRLSDYDVDHIVPQSFLKDDSIDNKVLTRSDKARGKSDNVPSEEVVKKMKNYWRQLLNAKLITQRKFDNLTKAERGGLSELDKAGFIKRQLVETRQITKHVAQILDSRMNTKYDENDKLIREVKVITLKSKLVSDFRKDFQFYKVREINNYHHAHDAYLNAVVGTALIKKYPKLESEFVYGDYKVYDVRKMIAKSEQEIGKATAKYFFYSNIMNFFKTEITLANGEIRKRPLIETNGETGEIVWDKGRDFATVRKVLSMPQVNIVKKTEVQTGGFSKESILPKRNSDKLIARKKDWDPKKYGGFDSPTVAYSVLVVAKVEKGKSKKLKSVKELLGITIMERSSFEKNPIDFLEAKGYKEVKKDLIIKLPKYSLFELENGRKRMLASAGELQKGNELALPSKYVNFLYLASHYEKLKGSPEDNEQKQLFVEQHKHYLDEIIEQISEFSKRVILADANLDKVLSAYNKHRDKPIREQAENIIHLFTLTNLGAPAAFKYFDTTIDRKRYTSTKEVLDATLIHQSITGLYETRIDLSQLGGDGGPAPGGSGSSGGLLGRDLLTKLKAQIQFSTEGPQVTWEDRPAMCLVLNLEEEYRLHEKPVPPSIDPSWLQLFPMVWAEKAGMGLANQVPPVVVELKSDASPVAVRQYPMSKEAREGIRPHIQRFLDLGILVPCQSPWNTPLLPVKKPGTNDYRPVQDLREVNKRVQDIHPTVPNPYNLLSSLPPSHTWYSVLDLKDAFFCLKLHPNSQPLFAFEWRDPEKGNTGQLTWTRLPQGFKNSPTLFNEALHRDLASFRALNPQVVMLQYVDDLLVAAPTYRDCKEGTRRLLQELSKLGYRVSAKKAQLCREEVTYLGYLLKGGKRWLTPARKATVMKIPTPTTPRQVREFLGKAGFCRLFIPGFASLAAPLYPLTRPKVPFTWTEAHQEAFGRIKEALLSAPALALPDLTKPFALYVDEKEGVARGVLTQTLGPWRRPVAYLSKKLDPVASGWPTCLKAIAAVALLLKDADKLTLGQNVLVIAPHNLESIVRQPPDRWMTNARMTHYQSLLLNERVSFAPPAILNPATLLPVESDDTPIHICSEILAEETGTRPDLRDQPLPGVPAWYTDGSSFIMDGRRQAGAAIVDNKRTVWASNLPEGTSAQKAELIALTQALRLAEGKSINIYTDSRYAFATAHVHGAIYKQRGWLTSAGKDIKNKEEILALLEAIHLPKRVAIIHCPGHQRGTDPVATGNRKADEAAKQAAQSTRILTETTKNAGKRTADGSEFEKRTADGSEFESPKKKAKVE

SEQ ID NO: 1684 - protein, 2127 aa, synthetic construct
MPAAKRVKLDGGDKKYSIGLDIGTNSVGWAVITDEYKVPSKKFKVLGNTDRHSIKKNLIGALLFDSGETAEATRLKRTARRRYTRRKNRICYLQEIFSNEMAKVDDSFFHRLEESFLVEEDKKHERHPIFGNIVDEVAYHEKYPTIYHLRKKLVDSTDKADLRLIYLALAHMIKFRGHFLIEGDLNPDNSDVDKLFIQLVQTYNQLFEENPINASGVDAKAILSARLSKSRRLENLIAQLPGEKKNGLFGNLIALSLGLTPNFKSNFDLAEDAKLQLSKDTYDDDLDNLLAQIGDQYADLFLAAKNLSDAILLSDILRVNTEITKAPLSASMIKRYDEHHQDLTLLKALVRQQLPEKYKEIFFDQSKNGYAGYIDGGASQEEFYKFIKPILEKMDGTEELLVKLNREDLLRKQRTFDNGSIPHQIHLGELHAILRRQEDFYPFLKDNREKIEKILTFRIPYYVGPLARGNSRFAWMTRKSEETITPWNFEEVVDKGASAQSFIERMTNFDKNLPNEKVLPKHSLLYEYFTVYNELTKVKYVTEGMRKPAFLSGEQKKAIVDLLFKTNRKVTVKQLKEDYFKKIECFDSVEISGVEDRFNASLGTYHDLLKIIKDKDFLDNEENEDILEDIVLTLTLFEDREMIEERLKTYAHLFDDKVMKQLKRRRYTGWGRLSRKLINGIRDKQSGKTILDFLKSDGFANRNFMQLIHDDSLTFKEDIQKAQVSGQGDSLHEHIANLAGSPAIKKGILQTVKVVDELVKVMGRHKPENIVIEMARENQTTQKGQKNSRERMKRIEEGIKELGSQILKEHPVENTQLQNEKLYLYYLQNGRDMYVDQELDINRLSDYDVDHIVPQSFLKDDSIDNKVLTRSDKARGKSDNVPSEEVVKKMKNYWRQLLNAKLITQRKFDNLTKAERGGLSELDKAGFIKRQLVETRQITKHVAQILDSRMNTKYDENDKLIREVKVITLKSKLVSDFRKDFQFYKVREINNYHHAHDAYLNAVVGTALIKKYPKLESEFVYGDYKVYDVRKMIAKSEQEIGKATAKYFFYSNIMNFFKTEITLANGEIRKRPLIETNGETGEIVWDKGRDFATVRKVLSMPQVNIVKKTEVQTGGFSKESILPKRNSDKLIARKKDWDPKKYGGFDSPTVAYSVLVVAKVEKGKSKKLKSVKELLGITIMERSSFEKNPIDFLEAKGYKEVKKDLIIKLPKYSLFELENGRKRMLASAGELQKGNELALPSKYVNFLYLASHYEKLKGSPEDNEQKQLFVEQHKHYLDEIIEQISEFSKRVILADANLDKVLSAYNKHRDKPIREQAENIIHLFTLTNLGAPAAFKYFDTTIDRKRYTSTKEVLDATLIHQSITGLYETRIDLSQLGGDGGPAPAPAPAPAPGGLLGRDLLTKLKAQIQFSTEGPQVTWEDRPAMCLVLNLEEEYRLHEKPVPPSIDPSWLQLFPMVWAEKAGMGLANQVPPVVVELKSDASPVAVRQYPMSKEAREGIRPHIQRFLDLGILVPCQSPWNTPLLPVKKPGTNDYRPVQDLREVNKRVQDIHPTVPNPYNLLSSLPPSHTWYSVLDLKDAFFCLKLHPNSQPLFAFEWRDPEKGNTGQLTWTRLPQGFKNSPTLFNEALHRDLASFRALNPQVVMLQYVDDLLVAAPTYRDCKEGTRRLLQELSKLGYRVSAKKAQLCREEVTYLGYLLKGGKRWLTPARKATVMKIPTPTTPRQVREFLGKAGFCRLFIPGFASLAAPLYPLTRPKVPFTWTEAHQEAFGRIKEALLSAPALALPDLTKPFALYVDEKEGVARGVLTQTLGPWRRPVAYLSKKLDPVASGWPTCLKAIAAVALLLKDADKLTLGQNVLVIAPHNLESIVRQPPDRWMTNARMTHYQSLLLNERVSFAPPAILNPATLLPVESDDTPIHICSEILAEETGTRPDLRDQPLPGVPAWYTDGSSFIMDGRRQAGAAIVDNKRTVWASNLPEGTSAQKAELIALTQALRLAEGKSINIYTDSRYAFATAHVHGAIYKQRGWLTSAGKDIKNKEEILALLEAIHLPKRVAIIHCPGHQRGTDPVATGNRKADEAAKQAAQSTRILTETTKNAGKRTADGSEFEKRTADGSEFESPKKKAKVE

SEQ ID NO: 1685 - protein, 2127 aa, synthetic construct
MPAAKRVKLDGGDKKYSIGLDIGTNSVGWAVITDEYKVPSKKFKVLGNTDRHSIKKNLIGALLFDSGETAEATRLKRTARRRYTRRKNRICYLQEIFSNEMAKVDDSFFHRLEESFLVEEDKKHERHPIFGNIVDEVAYHEKYPTIYHLRKKLVDSTDKADLRLIYLALAHMIKFRGHFLIEGDLNPDNSDVDKLFIQLVQTYNQLFEENPINASGVDAKAILSARLSKSRRLENLIAQLPGEKKNGLFGNLIALSLGLTPNFKSNFDLAEDAKLQLSKDTYDDDLDNLLAQIGDQYADLFLAAKNLSDAILLSDILRVNTEITKAPLSASMIKRYDEHHQDLTLLKALVRQQLPEKYKEIFFDQSKNGYAGYIDGGASQEEFYKFIKPILEKMDGTEELLVKLNREDLLRKQRTFDNGSIPHQIHLGELHAILRRQEDFYPFLKDNREKIEKILTFRIPYYVGPLARGNSRFAWMTRKSEETITPWNFEEVVDKGASAQSFIERMTNFDKNLPNEKVLPKHSLLYEYFTVYNELTKVKYVTEGMRKPAFLSGEQKKAIVDLLFKTNRKVTVKQLKEDYFKKIECFDSVEISGVEDRFNASLGTYHDLLKIIKDKDFLDNEENEDILEDIVLTLTLFEDREMIEERLKTYAHLFDDKVMKQLKRRRYTGWGRLSRKLINGIRDKQSGKTILDFLKSDGFANRNFMQLIHDDSLTFKEDIQKAQVSGQGDSLHEHIANLAGSPAIKKGILQTVKVVDELVKVMGRHKPENIVIEMARENQTTQKGQKNSRERMKRIEEGIKELGSQILKEHPVENTQLQNEKLYLYYLQNGRDMYVDQELDINRLSDYDVDHIVPQSFLKDDSIDNKVLTRSDKARGKSDNVPSEEVVKKMKNYWRQLLNAKLITQRKFDNLTKAERGGLSELDKAGFIKRQLVETRQITKHVAQILDSRMNTKYDENDKLIREVKVITLKSKLVSDFRKDFQFYKVREINNYHHAHDAYLNAVVGTALIKKYPKLESEFVYGDYKVYDVRKMIAKSEQEIGKATAKYFFYSNIMNFFKTEITLANGEIRKRPLIETNGETGEIVWDKGRDFATVRKVLSMPQVNIVKKTEVQTGGFSKESILPKRNSDKLIARKKDWDPKKYGGFDSPTVAYSVLVVAKVEKGKSKKLKSVKELLGITIMERSSFEKNPIDFLEAKGYKEVKKDLIIKLPKYSLFELENGRKRMLASAGELQKGNELALPSKYVNFLYLASHYEKLKGSPEDNEQKQLFVEQHKHYLDEIIEQISEFSKRVILADANLDKVLSAYNKHRDKPIREQAENIIHLFTLTNLGAPAAFKYFDTTIDRKRYTSTKEVLDATLIHQSITGLYETRIDLSQLGGDGGEAAAKPAPGGGGGLLGRDLLTKLKAQIQFSTEGPQVTWEDRPAMCLVLNLEEEYRLHEKPVPPSIDPSWLQLFPMVWAEKAGMGLANQVPPVVVELKSDASPVAVRQYPMSKEAREGIRPHIQRFLDLGILVPCQSPWNTPLLPVKKPGTNDYRPVQDLREVNKRVQDIHPTVPNPYNLLSSLPPSHTWYSVLDLKDAFFCLKLHPNSQPLFAFEWRDPEKGNTGQLTWTRLPQGFKNSPTLFNEALHRDLASFRALNPQVVMLQYVDDLLVAAPTYRDCKEGTRRLLQELSKLGYRVSAKKAQLCREEVTYLGYLLKGGKRWLTPARKATVMKIPTPTTPRQVREFLGKAGFCRLFIPGFASLAAPLYPLTRPKVPFTWTEAHQEAFGRIKEALLSAPALALPDLTKPFALYVDEKEGVARGVLTQTLGPWRRPVAYLSKKLDPVASGWPTCLKAIAAVALLLKDADKLTLGQNVLVIAPHNLESIVRQPPDRWMTNARMTHYQSLLLNERVSFAPPAILNPATLLPVESDDTPIHICSEILAEETGTRPDLRDQPLPGVPAWYTDGSSFIMDGRRQAGAAIVDNKRTVWASNLPEGTSAQKAELIALTQALRLAEGKSINIYTDSRYAFATAHVHGAIYKQRGWLTSAGKDIKNKEEILALLEAIHLPKRVAIIHCPGHQRGTDPVATGNRKADEAAKQAAQSTRILTETTKNAGKRTADGSEFEKRTADGSEFESPKKKAKVE

SEQ ID NO: 1686 - protein, 2125 aa, synthetic construct
MPAAKRVKLDGGDKKYSIGLDIGTNSVGWAVITDEYKVPSKKFKVLGNTDRHSIKKNLIGALLFDSGETAEATRLKRTARRRYTRRKNRICYLQEIFSNEMAKVDDSFFHRLEESFLVEEDKKHERHPIFGNIVDEVAYHEKYPTIYHLRKKLVDSTDKADLRLIYLALAHMIKFRGHFLIEGDLNPDNSDVDKLFIQLVQTYNQLFEENPINASGVDAKAILSARLSKSRRLENLIAQLPGEKKNGLFGNLIALSLGLTPNFKSNFDLAEDAKLQLSKDTYDDDLDNLLAQIGDQYADLFLAAKNLSDAILLSDILRVNTEITKAPLSASMIKRYDEHHQDLTLLKALVRQQLPEKYKEIFFDQSKNGYAGYIDGGASQEEFYKFIKPILEKMDGTEELLVKLNREDLLRKQRTFDNGSIPHQIHLGELHAILRRQEDFYPFLKDNREKIEKILTFRIPYYVGPLARGNSRFAWMTRKSEETITPWNFEEVVDKGASAQSFIERMTNFDKNLPNEKVLPKHSLLYEYFTVYNELTKVKYVTEGMRKPAFLSGEQKKAIVDLLFKTNRKVTVKQLKEDYFKKIECFDSVEISGVEDRFNASLGTYHDLLKIIKDKDFLDNEENEDILEDIVLTLTLFEDREMIEERLKTYAHLFDDKVMKQLKRRRYTGWGRLSRKLINGIRDKQSGKTILDFLKSDGFANRNFMQLIHDDSLTFKEDIQKAQVSGQGDSLHEHIANLAGSPAIKKGILQTVKVVDELVKVMGRHKPENIVIEMARENQTTQKGQKNSRERMKRIEEGIKELGSQILKEHPVENTQLQNEKLYLYYLQNGRDMYVDQELDINRLSDYDVDHIVPQSFLKDDSIDNKVLTRSDKARGKSDNVPSEEVVKKMKNYWRQLLNAKLITQRKFDNLTKAERGGLSELDKAGFIKRQLVETRQITKHVAQILDSRMNTKYDENDKLIREVKVITLKSKLVSDFRKDFQFYKVREINNYHHAHDAYLNAVVGTALIKKYPKLESEFVYGDYKVYDVRKMIAKSEQEIGKATAKYFFYSNIMNFFKTEITLANGEIRKRPLIETNGETGEIVWDKGRDFATVRKVLSMPQVNIVKKTEVQTGGFSKESILPKRNSDKLIARKKDWDPKKYGGFDSPTVAYSVLVVAKVEKGKSKKLKSVKELLGITIMERSSFEKNPIDFLEAKGYKEVKKDLIIKLPKYSLFELENGRKRMLASAGELQKGNELALPSKYVNFLYLASHYEKLKGSPEDNEQKQLFVEQHKHYLDEIIEQISEFSKRVILADANLDKVLSAYNKHRDKPIREQAENIIHLFTLTNLGAPAAFKYFDTTIDRKRYTSTKEVLDATLIHQSITGLYETRIDLSQLGGDGGGGSGGSGGSGGLLGRDLLTKLKAQIQFSTEGPQVTWEDRPAMCLVLNLEEEYRLHEKPVPPSIDPSWLQLFPMVWAEKAGMGLANQVPPVVVELKSDASPVAVRQYPMSKEAREGIRPHIQRFLDLGILVPCQSPWNTPLLPVKKPGTNDYRPVQDLREVNKRVQDIHPTVPNPYNLLSSLPPSHTWYSVLDLKDAFFCLKLHPNSQPLFAFEWRDPEKGNTGQLTWTRLPQGFKNSPTLFNEALHRDLASFRALNPQVVMLQYVDDLLVAAPTYRDCKEGTRRLLQELSKLGYRVSAKKAQLCREEVTYLGYLLKGGKRWLTPARKATVMKIPTPTTPRQVREFLGKAGFCRLFIPGFASLAAPLYPLTRPKVPFTWTEAHQEAFGRIKEALLSAPALALPDLTKPFALYVDEKEGVARGVLTQTLGPWRRPVAYLSKKLDPVASGWPTCLKAIAAVALLLKDADKLTLGQNVLVIAPHNLESIVRQPPDRWMTNARMTHYQSLLLNERVSFAPPAILNPATLLPVESDDTPIHICSEILAEETGTRPDLRDQPLPGVPAWYTDGSSFIMDGRRQAGAAIVDNKRTVWASNLPEGTSAQKAELIALTQALRLAEGKSINIYTDSRYAFATAHVHGAIYKQRGWLTSAGKDIKNKEEILALLEAIHLPKRVAIIHCPGHQRGTDPVATGNRKADEAAKQAAQSTRILTETTKNAGKRTADGSEFEKRTADGSEFESPKKKAKVE

SEQ ID NO: 1687 - protein, 2127 aa, synthetic construct
MPAAKRVKLDGGDKKYSIGLDIGTNSVGWAVITDEYKVPSKKFKVLGNTDRHSIKKNLIGALLFDSGETAEATRLKRTARRRYTRRKNRICYLQEIFSNEMAKVDDSFFHRLEESFLVEEDKKHERHPIFGNIVDEVAYHEKYPTIYHLRKKLVDSTDKADLRLIYLALAHMIKFRGHFLIEGDLNPDNSDVDKLFIQLVQTYNQLFEENPINASGVDAKAILSARLSKSRRLENLIAQLPGEKKNGLFGNLIALSLGLTPNFKSNFDLAEDAKLQLSKDTYDDDLDNLLAQIGDQYADLFLAAKNLSDAILLSDILRVNTEITKAPLSASMIKRYDEHHQDLTLLKALVRQQLPEKYKEIFFDQSKNGYAGYIDGGASQEEFYKFIKPILEKMDGTEELLVKLNREDLLRKQRTFDNGSIPHQIHLGELHAILRRQEDFYPFLKDNREKIEKILTFRIPYYVGPLARGNSRFAWMTRKSEETITPWNFEEVVDKGASAQSFIERMTNFDKNLPNEKVLPKHSLLYEYFTVYNELTKVKYVTEGMRKPAFLSGEQKKAIVDLLFKTNRKVTVKQLKEDYFKKIECFDSVEISGVEDRFNASLGTYHDLLKIIKDKDFLDNEENEDILEDIVLTLTLFEDREMIEERLKTYAHLFDDKVMKQLKRRRYTGWGRLSRKLINGIRDKQSGKTILDFLKSDGFANRNFMQLIHDDSLTFKEDIQKAQVSGQGDSLHEHIANLAGSPAIKKGILQTVKVVDELVKVMGRHKPENIVIEMARENQTTQKGQKNSRERMKRIEEGIKELGSQILKEHPVENTQLQNEKLYLYYLQNGRDMYVDQELDINRLSDYDVDHIVPQSFLKDDSIDNKVLTRSDKARGKSDNVPSEEVVKKMKNYWRQLLNAKLITQRKFDNLTKAERGGLSELDKAGFIKRQLVETRQITKHVAQILDSRMNTKYDENDKLIREVKVITLKSKLVSDFRKDFQFYKVREINNYHHAHDAYLNAVVGTALIKKYPKLESEFVYGDYKVYDVRKMIAKSEQEIGKATAKYFFYSNIMNFFKTEITLANGEIRKRPLIETNGETGEIVWDKGRDFATVRKVLSMPQVNIVKKTEVQTGGFSKESILPKRNSDKLIARKKDWDPKKYGGFDSPTVAYSVLVVAKVEKGKSKKLKSVKELLGITIMERSSFEKNPIDFLEAKGYKEVKKDLIIKLPKYSLFELENGRKRMLASAGELQKGNELALPSKYVNFLYLASHYEKLKGSPEDNEQKQLFVEQHKHYLDEIIEQISEFSKRVILADANLDKVLSAYNKHRDKPIREQAENIIHLFTLTNLGAPAAFKYFDTTIDRKRYTSTKEVLDATLIHQSITGLYETRIDLSQLGGDGGEAAAKPAPGSSGGLLGRDLLTKLKAQIQFSTEGPQVTWEDRPAMCLVLNLEEEYRLHEKPVPPSIDPSWLQLFPMVWAEKAGMGLANQVPPVVVELKSDASPVAVRQYPMSKEAREGIRPHIQRFLDLGILVPCQSPWNTPLLPVKKPGTNDYRPVQDLREVNKRVQDIHPTVPNPYNLLSSLPPSHTWYSVLDLKDAFFCLKLHPNSQPLFAFEWRDPEKGNTGQLTWTRLPQGFKNSPTLFNEALHRDLASFRALNPQVVMLQYVDDLLVAAPTYRDCKEGTRRLLQELSKLGYRVSAKKAQLCREEVTYLGYLLKGGKRWLTPARKATVMKIPTPTTPRQVREFLGKAGFCRLFIPGFASLAAPLYPLTRPKVPFTWTEAHQEAFGRIKEALLSAPALALPDLTKPFALYVDEKEGVARGVLTQTLGPWRRPVAYLSKKLDPVASGWPTCLKAIAAVALLLKDADKLTLGQNVLVIAPHNLESIVRQPPDRWMTNARMTHYQSLLLNERVSFAPPAILNPATLLPVESDDTPIHICSEILAEETGTRPDLRDQPLPGVPAWYTDGSSFIMDGRRQAGAAIVDNKRTVWASNLPEGTSAQKAELIALTQALRLAEGKSINIYTDSRYAFATAHVHGAIYKQRGWLTSAGKDIKNKEEILALLEAIHLPKRVAIIHCPGHQRGTDPVATGNRKADEAAKQAAQSTRILTETTKNAGKRTADGSEFEKRTADGSEFESPKKKAKVE

SEQ ID NO: 1688 - protein, 2127 aa, synthetic construct
MPAAKRVKLDGGDKKYSIGLDIGTNSVGWAVITDEYKVPSKKFKVLGNTDRHSIKKNLIGALLFDSGETAEATRLKRTARRRYTRRKNRICYLQEIFSNEMAKVDDSFFHRLEESFLVEEDKKHERHPIFGNIVDEVAYHEKYPTIYHLRKKLVDSTDKADLRLIYLALAHMIKFRGHFLIEGDLNPDNSDVDKLFIQLVQTYNQLFEENPINASGVDAKAILSARLSKSRRLENLIAQLPGEKKNGLFGNLIALSLGLTPNFKSNFDLAEDAKLQLSKDTYDDDLDNLLAQIGDQYADLFLAAKNLSDAILLSDILRVNTEITKAPLSASMIKRYDEHHQDLTLLKALVRQQLPEKYKEIFFDQSKNGYAGYIDGGASQEEFYKFIKPILEKMDGTEELLVKLNREDLLRKQRTFDNGSIPHQIHLGELHAILRRQEDFYPFLKDNREKIEKILTFRIPYYVGPLARGNSRFAWMTRKSEETITPWNFEEVVDKGASAQSFIERMTNFDKNLPNEKVLPKHSLLYEYFTVYNELTKVKYVTEGMRKPAFLSGEQKKAIVDLLFKTNRKVTVKQLKEDYFKKIECFDSVEISGVEDRFNASLGTYHDLLKIIKDKDFLDNEENEDILEDIVLTLTLFEDREMIEERLKTYAHLFDDKVMKQLKRRRYTGWGRLSRKLINGIRDKQSGKTILDFLKSDGFANRNFMQLIHDDSLTFKEDIQKAQVSGQGDSLHEHIANLAGSPAIKKGILQTVKVVDELVKVMGRHKPENIVIEMARENQTTQKGQKNSRERMKRIEEGIKELGSQILKEHPVENTQLQNEKLYLYYLQNGRDMYVDQELDINRLSDYDVDHIVPQSFLKDDSIDNKVLTRSDKARGKSDNVPSEEVVKKMKNYWRQLLNAKLITQRKFDNLTKAERGGLSELDKAGFIKRQLVETRQITKHVAQILDSRMNTKYDENDKLIREVKVITLKSKLVSDFRKDFQFYKVREINNYHHAHDAYLNAVVGTALIKKYPKLESEFVYGDYKVYDVRKMIAKSEQEIGKATAKYFFYSNIMNFFKTEITLANGEIRKRPLIETNGETGEIVWDKGRDFATVRKVLSMPQVNIVKKTEVQTGGFSKESILPKRNSDKLIARKKDWDPKKYGGFDSPTVAYSVLVVAKVEKGKSKKLKSVKELLGITIMERSSFEKNPIDFLEAKGYKEVKKDLIIKLPKYSLFELENGRKRMLASAGELQKGNELALPSKYVNFLYLASHYEKLKGSPEDNEQKQLFVEQHKHYLDEIIEQISEFSKRVILADANLDKVLSAYNKHRDKPIREQAENIIHLFTLTNLGAPAAFKYFDTTIDRKRYTSTKEVLDATLIHQSITGLYETRIDLSQLGGDGGGGGEAAAKGSSGGLLGRDLLTKLKAQIQFSTEGPQVTWEDRPAMCLVLNLEEEYRLHEKPVPPSIDPSWLQLFPMVWAEKAGMGLANQVPPVVVELKSDASPVAVRQYPMSKEAREGIRPHIQRFLDLGILVPCQSPWNTPLLPVKKPGTNDYRPVQDLREVNKRVQDIHPTVPNPYNLLSSLPPSHTWYSVLDLKDAFFCLKLHPNSQPLFAFEWRDPEKGNTGQLTWTRLPQGFKNSPTLFNEALHRDLASFRALNPQVVMLQYVDDLLVAAPTYRDCKEGTRRLLQELSKLGYRVSAKKAQLCREEVTYLGYLLKGGKRWLTPARKATVMKIPTPTTPRQVREFLGKAGFCRLFIPGFASLAAPLYPLTRPKVPFTWTEAHQEAFGRIKEALLSAPALALPDLTKPFALYVDEKEGVARGVLTQTLGPWRRPVAYLSKKLDPVASGWPTCLKAIAAVALLLKDADKLTLGQNVLVIAPHNLESIVRQPPDRWMTNARMTHYQSLLLNERVSFAPPAILNPATLLPVESDDTPIHICSEILAEETGTRPDLRDQPLPGVPAWYTDGSSFIMDGRRQAGAAIVDNKRTVWASNLPEGTSAQKAELIALTQALRLAEGKSINIYTDSRYAFATAHVHGAIYKQRGWLTSAGKDIKNKEEILALLEAIHLPKRVAIIHCPGHQRGTDPVATGNRKADEAAKQAAQSTRILTETTKNAGKRTADGSEFEKRTADGSEFESPKKKAKVE

SEQ ID NO: 1689 - protein, 2121 aa, synthetic construct
MPAAKRVKLDGGDKKYSIGLDIGTNSVGWAVITDEYKVPSKKFKVLGNTDRHSIKKNLIGALLFDSGETAEATRLKRTARRRYTRRKNRICYLQEIFSNEMAKVDDSFFHRLEESFLVEEDKKHERHPIFGNIVDEVAYHEKYPTIYHLRKKLVDSTDKADLRLIYLALAHMIKFRGHFLIEGDLNPDNSDVDKLFIQLVQTYNQLFEENPINASGVDAKAILSARLSKSRRLENLIAQLPGEKKNGLFGNLIALSLGLTPNFKSNFDLAEDAKLQLSKDTYDDDLDNLLAQIGDQYADLFLAAKNLSDAILLSDILRVNTEITKAPLSASMIKRYDEHHQDLTLLKALVRQQLPEKYKEIFFDQSKNGYAGYIDGGASQEEFYKFIKPILEKMDGTEELLVKLNREDLLRKQRTFDNGSIPHQIHLGELHAILRRQEDFYPFLKDNREKIEKILTFRIPYYVGPLARGNSRFAWMTRKSEETITPWNFEEVVDKGASAQSFIERMTNFDKNLPNEKVLPKHSLLYEYFTVYNELTKVKYVTEGMRKPAFLSGEQKKAIVDLLFKTNRKVTVKQLKEDYFKKIECFDSVEISGVEDRFNASLGTYHDLLKIIKDKDFLDNEENEDILEDIVLTLTLFEDREMIEERLKTYAHLFDDKVMKQLKRRRYTGWGRLSRKLINGIRDKQSGKTILDFLKSDGFANRNFMQLIHDDSLTFKEDIQKAQVSGQGDSLHEHIANLAGSPAIKKGILQTVKVVDELVKVMGRHKPENIVIEMARENQTTQKGQKNSRERMKRIEEGIKELGSQILKEHPVENTQLQNEKLYLYYLQNGRDMYVDQELDINRLSDYDVDHIVPQSFLKDDSIDNKVLTRSDKARGKSDNVPSEEVVKKMKNYWRQLLNAKLITQRKFDNLTKAERGGLSELDKAGFIKRQLVETRQITKHVAQILDSRMNTKYDENDKLIREVKVITLKSKLVSDFRKDFQFYKVREINNYHHAHDAYLNAVVGTALIKKYPKLESEFVYGDYKVYDVRKMIAKSEQEIGKATAKYFFYSNIMNFFKTEITLANGEIRKRPLIETNGETGEIVWDKGRDFATVRKVLSMPQVNIVKKTEVQTGGFSKESILPKRNSDKLIARKKDWDPKKYGGFDSPTVAYSVLVVAKVEKGKSKKLKSVKELLGITIMERSSFEKNPIDFLEAKGYKEVKKDLIIKLPKYSLFELENGRKRMLASAGELQKGNELALPSKYVNFLYLASHYEKLKGSPEDNEQKQLFVEQHKHYLDEIIEQISEFSKRVILADANLDKVLSAYNKHRDKPIREQAENIIHLFTLTNLGAPAAFKYFDTTIDRKRYTSTKEVLDATLIHQSITGLYETRIDLSQLGGDGGEAAAKGGLLGRDLLTKLKAQIQFSTEGPQVTWEDRPAMCLVLNLEEEYRLHEKPVPPSIDPSWLQLFPMVWAEKAGMGLANQVPPVVVELKSDASPVAVRQYPMSKEAREGIRPHIQRFLDLGILVPCQSPWNTPLLPVKKPGTNDYRPVQDLREVNKRVQDIHPTVPNPYNLLSSLPPSHTWYSVLDLKDAFFCLKLHPNSQPLFAFEWRDPEKGNTGQLTWTRLPQGFKNSPTLFNEALHRDLASFRALNPQVVMLQYVDDLLVAAPTYRDCKEGTRRLLQELSKLGYRVSAKKAQLCREEVTYLGYLLKGGKRWLTPARKATVMKIPTPTTPRQVREFLGKAGFCRLFIPGFASLAAPLYPLTRPKVPFTWTEAHQEAFGRIKEALLSAPALALPDLTKPFALYVDEKEGVARGVLTQTLGPWRRPVAYLSKKLDPVASGWPTCLKAIAAVALLLKDADKLTLGQNVLVIAPHNLESIVRQPPDRWMTNARMTHYQSLLLNERVSFAPPAILNPATLLPVESDDTPIHICSEILAEETGTRPDLRDQPLPGVPAWYTDGSSFIMDGRRQAGAAIVDNKRTVWASNLPEGTSAQKAELIALTQALRLAEGKSINIYTDSRYAFATAHVHGAIYKQRGWLTSAGKDIKNKEEILALLEAIHLPKRVAIIHCPGHQRGTDPVATGNRKADEAAKQAAQSTRILTETTKNAGKRTADGSEFEKRTADGSEFESPKKKAKVE

SEQ ID NO: 1690 - protein, 2127 aa, synthetic construct
MPAAKRVKLDGGDKKYSIGLDIGTNSVGWAVITDEYKVPSKKFKVLGNTDRHSIKKNLIGALLFDSGETAEATRLKRTARRRYTRRKNRICYLQEIFSNEMAKVDDSFFHRLEESFLVEEDKKHERHPIFGNIVDEVAYHEKYPTIYHLRKKLVDSTDKADLRLIYLALAHMIKFRGHFLIEGDLNPDNSDVDKLFIQLVQTYNQLFEENPINASGVDAKAILSARLSKSRRLENLIAQLPGEKKNGLFGNLIALSLGLTPNFKSNFDLAEDAKLQLSKDTYDDDLDNLLAQIGDQYADLFLAAKNLSDAILLSDILRVNTEITKAPLSASMIKRYDEHHQDLTLLKALVRQQLPEKYKEIFFDQSKNGYAGYIDGGASQEEFYKFIKPILEKMDGTEELLVKLNREDLLRKQRTFDNGSIPHQIHLGELHAILRRQEDFYPFLKDNREKIEKILTFRIPYYVGPLARGNSRFAWMTRKSEETITPWNFEEVVDKGASAQSFIERMTNFDKNLPNEKVLPKHSLLYEYFTVYNELTKVKYVTEGMRKPAFLSGEQKKAIVDLLFKTNRKVTVKQLKEDYFKKIECFDSVEISGVEDRFNASLGTYHDLLKIIKDKDFLDNEENEDILEDIVLTLTLFEDREMIEERLKTYAHLFDDKVMKQLKRRRYTGWGRLSRKLINGIRDKQSGKTILDFLKSDGFANRNFMQLIHDDSLTFKEDIQKAQVSGQGDSLHEHIANLAGSPAIKKGILQTVKVVDELVKVMGRHKPENIVIEMARENQTTQKGQKNSRERMKRIEEGIKELGSQILKEHPVENTQLQNEKLYLYYLQNGRDMYVDQELDINRLSDYDVDHIVPQSFLKDDSIDNKVLTRSDKARGKSDNVPSEEVVKKMKNYWRQLLNAKLITQRKFDNLTKAERGGLSELDKAGFIKRQLVETRQITKHVAQILDSRMNTKYDENDKLIREVKVITLKSKLVSDFRKDFQFYKVREINNYHHAHDAYLNAVVGTALIKKYPKLESEFVYGDYKVYDVRKMIAKSEQEIGKATAKYFFYSNIMNFFKTEITLANGEIRKRPLIETNGETGEIVWDKGRDFATVRKVLSMPQVNIVKKTEVQTGGFSKESILPKRNSDKLIARKKDWDPKKYGGFDSPTVAYSVLVVAKVEKGKSKKLKSVKELLGITIMERSSFEKNPIDFLEAKGYKEVKKDLIIKLPKYSLFELENGRKRMLASAGELQKGNELALPSKYVNFLYLASHYEKLKGSPEDNEQKQLFVEQHKHYLDEIIEQISEFSKRVILADANLDKVLSAYNKHRDKPIREQAENIIHLFTLTNLGAPAAFKYFDTTIDRKRYTSTKEVLDATLIHQSITGLYETRIDLSQLGGDGGEAAAKGSSGGSGGLLGRDLLTKLKAQIQFSTEGPQVTWEDRPAMCLVLNLEEEYRLHEKPVPPSIDPSWLQLFPMVWAEKAGMGLANQVPPVVVELKSDASPVAVRQYPMSKEAREGIRPHIQRFLDLGILVPCQSPWNTPLLPVKKPGTNDYRPVQDLREVNKRVQDIHPTVPNPYNLLSSLPPSHTWYSVLDLKDAFFCLKLHPNSQPLFAFEWRDPEKGNTGQLTWTRLPQGFKNSPTLFNEALHRDLASFRALNPQVVMLQYVDDLLVAAPTYRDCKEGTRRLLQELSKLGYRVSAKKAQLCREEVTYLGYLLKGGKRWLTPARKATVMKIPTPTTPRQVREFLGKAGFCRLFIPGFASLAAPLYPLTRPKVPFTWTEAHQEAFGRIKEALLSAPALALPDLTKPFALYVDEKEGVARGVLTQTLGPWRRPVAYLSKKLDPVASGWPTCLKAIAAVALLLKDADKLTLGQNVLVIAPHNLESIVRQPPDRWMTNARMTHYQSLLLNERVSFAPPAILNPATLLPVESDDTPIHICSEILAEETGTRPDLRDQPLPGVPAWYTDGSSFIMDGRRQAGAAIVDNKRTVWASNLPEGTSAQKAELIALTQALRLAEGKSINIYTDSRYAFATAHVHGAIYKQRGWLTSAGKDIKNKEEILALLEAIHLPKRVAIIHCPGHQRGTDPVATGNRKADEAAKQAAQSTRILTETTKNAGKRTADGSEFEKRTADGSEFESPKKKAKVE

SEQ ID NO: 1691 - protein, 2125 aa, synthetic construct
MPAAKRVKLDGGDKKYSIGLDIGTNSVGWAVITDEYKVPSKKFKVLGNTDRHSIKKNLIGALLFDSGETAEATRLKRTARRRYTRRKNRICYLQEIFSNEMAKVDDSFFHRLEESFLVEEDKKHERHPIFGNIVDEVAYHEKYPTIYHLRKKLVDSTDKADLRLIYLALAHMIKFRGHFLIEGDLNPDNSDVDKLFIQLVQTYNQLFEENPINASGVDAKAILSARLSKSRRLENLIAQLPGEKKNGLFGNLIALSLGLTPNFKSNFDLAEDAKLQLSKDTYDDDLDNLLAQIGDQYADLFLAAKNLSDAILLSDILRVNTEITKAPLSASMIKRYDEHHQDLTLLKALVRQQLPEKYKEIFFDQSKNGYAGYIDGGASQEEFYKFIKPILEKMDGTEELLVKLNREDLLRKQRTFDNGSIPHQIHLGELHAILRRQEDFYPFLKDNREKIEKILTFRIPYYVGPLARGNSRFAWMTRKSEETITPWNFEEVVDKGASAQSFIERMTNFDKNLPNEKVLPKHSLLYEYFTVYNELTKVKYVTEGMRKPAFLSGEQKKAIVDLLFKTNRKVTVKQLKEDYFKKIECFDSVEISGVEDRFNASLGTYHDLLKIIKDKDFLDNEENEDILEDIVLTLTLFEDREMIEERLKTYAHLFDDKVMKQLKRRRYTGWGRLSRKLINGIRDKQSGKTILDFLKSDGFANRNFMQLIHDDSLTFKEDIQKAQVSGQGDSLHEHIANLAGSPAIKKGILQTVKVVDELVKVMGRHKPENIVIEMARENQTTQKGQKNSRERMKRIEEGIKELGSQILKEHPVENTQLQNEKLYLYYLQNGRDMYVDQELDINRLSDYDVDHIVPQSFLKDDSIDNKVLTRSDKARGKSDNVPSEEVVKKMKNYWRQLLNAKLITQRKFDNLTKAERGGLSELDKAGFIKRQLVETRQITKHVAQILDSRMNTKYDENDKLIREVKVITLKSKLVSDFRKDFQFYKVREINNYHHAHDAYLNAVVGTALIKKYPKLESEFVYGDYKVYDVRKMIAKSEQEIGKATAKYFFYSNIMNFFKTEITLANGEIRKRPLIETNGETGEIVWDKGRDFATVRKVLSMPQVNIVKKTEVQTGGFSKESILPKRNSDKLIARKKDWDPKKYGGFDSPTVAYSVLVVAKVEKGKSKKLKSVKELLGITIMERSSFEKNPIDFLEAKGYKEVKKDLIIKLPKYSLFELENGRKRMLASAGELQKGNELALPSKYVNFLYLASHYEKLKGSPEDNEQKQLFVEQHKHYLDEIIEQISEFSKRVILADANLDKVLSAYNKHRDKPIREQAENIIHLFTLTNLGAPAAFKYFDTTIDRKRYTSTKEVLDATLIHQSITGLYETRIDLSQLGGDGGPAPGGGGSSGGLLGRDLLTKLKAQIQFSTEGPQVTWEDRPAMCLVLNLEEEYRLHEKPVPPSIDPSWLQLFPMVWAEKAGMGLANQVPPVVVELKSDASPVAVRQYPMSKEAREGIRPHIQRFLDLGILVPCQSPWNTPLLPVKKPGTNDYRPVQDLREVNKRVQDIHPTVPNPYNLLSSLPPSHTWYSVLDLKDAFFCLKLHPNSQPLFAFEWRDPEKGNTGQLTWTRLPQGFKNSPTLFNEALHRDLASFRALNPQVVMLQYVDDLLVAAPTYRDCKEGTRRLLQELSKLGYRVSAKKAQLCREEVTYLGYLLKGGKRWLTPARKATVMKIPTPTTPRQVREFLGKAGFCRLFIPGFASLAAPLYPLTRPKVPFTWTEAHQEAFGRIKEALLSAPALALPDLTKPFALYVDEKEGVARGVLTQTLGPWRRPVAYLSKKLDPVASGWPTCLKAIAAVALLLKDADKLTLGQNVLVIAPHNLESIVRQPPDRWMTNARMTHYQSLLLNERVSFAPPAILNPATLLPVESDDTPIHICSEILAEETGTRPDLRDQPLPGVPAWYTDGSSFIMDGRRQAGAAIVDNKRTVWASNLPEGTSAQKAELIALTQALRLAEGKSINIYTDSRYAFATAHVHGAIYKQRGWLTSAGKDIKNKEEILALLEAIHLPKRVAIIHCPGHQRGTDPVATGNRKADEAAKQAAQSTRILTETTKNAGKRTADGSEFEKRTADGSEFESPKKKAKVE

SEQ ID NO: 1692 - protein, 2119 aa, synthetic construct
MPAAKRVKLDGGDKKYSIGLDIGTNSVGWAVITDEYKVPSKKFKVLGNTDRHSIKKNLIGALLFDSGETAEATRLKRTARRRYTRRKNRICYLQEIFSNEMAKVDDSFFHRLEESFLVEEDKKHERHPIFGNIVDEVAYHEKYPTIYHLRKKLVDSTDKADLRLIYLALAHMIKFRGHFLIEGDLNPDNSDVDKLFIQLVQTYNQLFEENPINASGVDAKAILSARLSKSRRLENLIAQLPGEKKNGLFGNLIALSLGLTPNFKSNFDLAEDAKLQLSKDTYDDDLDNLLAQIGDQYADLFLAAKNLSDAILLSDILRVNTEITKAPLSASMIKRYDEHHQDLTLLKALVRQQLPEKYKEIFFDQSKNGYAGYIDGGASQEEFYKFIKPILEKMDGTEELLVKLNREDLLRKQRTFDNGSIPHQIHLGELHAILRRQEDFYPFLKDNREKIEKILTFRIPYYVGPLARGNSRFAWMTRKSEETITPWNFEEVVDKGASAQSFIERMTNFDKNLPNEKVLPKHSLLYEYFTVYNELTKVKYVTEGMRKPAFLSGEQKKAIVDLLFKTNRKVTVKQLKEDYFKKIECFDSVEISGVEDRFNASLGTYHDLLKIIKDKDFLDNEENEDILEDIVLTLTLFEDREMIEERLKTYAHLFDDKVMKQLKRRRYTGWGRLSRKLINGIRDKQSGKTILDFLKSDGFANRNFMQLIHDDSLTFKEDIQKAQVSGQGDSLHEHIANLAGSPAIKKGILQTVKVVDELVKVMGRHKPENIVIEMARENQTTQKGQKNSRERMKRIEEGIKELGSQILKEHPVENTQLQNEKLYLYYLQNGRDMYVDQELDINRLSDYDVDHIVPQSFLKDDSIDNKVLTRSDKARGKSDNVPSEEVVKKMKNYWRQLLNAKLITQRKFDNLTKAERGGLSELDKAGFIKRQLVETRQITKHVAQILDSRMNTKYDENDKLIREVKVITLKSKLVSDFRKDFQFYKVREINNYHHAHDAYLNAVVGTALIKKYPKLESEFVYGDYKVYDVRKMIAKSEQEIGKATAKYFFYSNIMNFFKTEITLANGEIRKRPLIETNGETGEIVWDKGRDFATVRKVLSMPQVNIVKKTEVQTGGFSKESILPKRNSDKLIARKKDWDPKKYGGFDSPTVAYSVLVVAKVEKGKSKKLKSVKELLGITIMERSSFEKNPIDFLEAKGYKEVKKDLIIKLPKYSLFELENGRKRMLASAGELQKGNELALPSKYVNFLYLASHYEKLKGSPEDNEQKQLFVEQHKHYLDEIIEQISEFSKRVILADANLDKVLSAYNKHRDKPIREQAENIIHLFTLTNLGAPAAFKYFDTTIDRKRYTSTKEVLDATLIHQSITGLYETRIDLSQLGGDGGPAPGGLLGRDLLTKLKAQIQFSTEGPQVTWEDRPAMCLVLNLEEEYRLHEKPVPPSIDPSWLQLFPMVWAEKAGMGLANQVPPVVVELKSDASPVAVRQYPMSKEAREGIRPHIQRFLDLGILVPCQSPWNTPLLPVKKPGTNDYRPVQDLREVNKRVQDIHPTVPNPYNLLSSLPPSHTWYSVLDLKDAFFCLKLHPNSQPLFAFEWRDPEKGNTGQLTWTRLPQGFKNSPTLFNEALHRDLASFRALNPQVVMLQYVDDLLVAAPTYRDCKEGTRRLLQELSKLGYRVSAKKAQLCREEVTYLGYLLKGGKRWLTPARKATVMKIPTPTTPRQVREFLGKAGFCRLFIPGFASLAAPLYPLTRPKVPFTWTEAHQEAFGRIKEALLSAPALALPDLTKPFALYVDEKEGVARGVLTQTLGPWRRPVAYLSKKLDPVASGWPTCLKAIAAVALLLKDADKLTLGQNVLVIAPHNLESIVRQPPDRWMTNARMTHYQSLLLNERVSFAPPAILNPATLLPVESDDTPIHICSEILAEETGTRPDLRDQPLPGVPAWYTDGSSFIMDGRRQAGAAIVDNKRTVWASNLPEGTSAQKAELIALTQALRLAEGKSINIYTDSRYAFATAHVHGAIYKQRGWLTSAGKDIKNKEEILALLEAIHLPKRVAIIHCPGHQRGTDPVATGNRKADEAAKQAAQSTRILTETTKNAGKRTADGSEFEKRTADGSEFESPKKKAKVE

SEQ ID NO: 1693 - protein, 2128 aa, synthetic construct
MPAAKRVKLDGGDKKYSIGLDIGTNSVGWAVITDEYKVPSKKFKVLGNTDRHSIKKNLIGALLFDSGETAEATRLKRTARRRYTRRKNRICYLQEIFSNEMAKVDDSFFHRLEESFLVEEDKKHERHPIFGNIVDEVAYHEKYPTIYHLRKKLVDSTDKADLRLIYLALAHMIKFRGHFLIEGDLNPDNSDVDKLFIQLVQTYNQLFEENPINASGVDAKAILSARLSKSRRLENLIAQLPGEKKNGLFGNLIALSLGLTPNFKSNFDLAEDAKLQLSKDTYDDDLDNLLAQIGDQYADLFLAAKNLSDAILLSDILRVNTEITKAPLSASMIKRYDEHHQDLTLLKALVRQQLPEKYKEIFFDQSKNGYAGYIDGGASQEEFYKFIKPILEKMDGTEELLVKLNREDLLRKQRTFDNGSIPHQIHLGELHAILRRQEDFYPFLKDNREKIEKILTFRIPYYVGPLARGNSRFAWMTRKSEETITPWNFEEVVDKGASAQSFIERMTNFDKNLPNEKVLPKHSLLYEYFTVYNELTKVKYVTEGMRKPAFLSGEQKKAIVDLLFKTNRKVTVKQLKEDYFKKIECFDSVEISGVEDRFNASLGTYHDLLKIIKDKDFLDNEENEDILEDIVLTLTLFEDREMIEERLKTYAHLFDDKVMKQLKRRRYTGWGRLSRKLINGIRDKQSGKTILDFLKSDGFANRNFMQLIHDDSLTFKEDIQKAQVSGQGDSLHEHIANLAGSPAIKKGILQTVKVVDELVKVMGRHKPENIVIEMARENQTTQKGQKNSRERMKRIEEGIKELGSQILKEHPVENTQLQNEKLYLYYLQNGRDMYVDQELDINRLSDYDVDHIVPQSFLKDDSIDNKVLTRSDKARGKSDNVPSEEVVKKMKNYWRQLLNAKLITQRKFDNLTKAERGGLSELDKAGFIKRQLVETRQITKHVAQILDSRMNTKYDENDKLIREVKVITLKSKLVSDFRKDFQFYKVREINNYHHAHDAYLNAVVGTALIKKYPKLESEFVYGDYKVYDVRKMIAKSEQEIGKATAKYFFYSNIMNFFKTEITLANGEIRKRPLIETNGETGEIVWDKGRDFATVRKVLSMPQVNIVKKTEVQTGGFSKESILPKRNSDKLIARKKDWDPKKYGGFDSPTVAYSVLVVAKVEKGKSKKLKSVKELLGITIMERSSFEKNPIDFLEAKGYKEVKKDLIIKLPKYSLFELENGRKRMLASAGELQKGNELALPSKYVNFLYLASHYEKLKGSPEDNEQKQLFVEQHKHYLDEIIEQISEFSKRVILADANLDKVLSAYNKHRDKPIREQAENIIHLFTLTNLGAPAAFKYFDTTIDRKRYTSTKEVLDATLIHQSITGLYETRIDLSQLGGDGGGSAGSAAGSGEFGGLLGRDLLTKLKAQIQFSTEGPQVTWEDRPAMCLVLNLEEEYRLHEKPVPPSIDPSWLQLFPMVWAEKAGMGLANQVPPVVVELKSDASPVAVRQYPMSKEAREGIRPHIQRFLDLGILVPCQSPWNTPLLPVKKPGTNDYRPVQDLREVNKRVQDIHPTVPNPYNLLSSLPPSHTWYSVLDLKDAFFCLKLHPNSQPLFAFEWRDPEKGNTGQLTWTRLPQGFKNSPTLFNEALHRDLASFRALNPQVVMLQYVDDLLVAAPTYRDCKEGTRRLLQELSKLGYRVSAKKAQLCREEVTYLGYLLKGGKRWLTPARKATVMKIPTPTTPRQVREFLGKAGFCRLFIPGFASLAAPLYPLTRPKVPFTWTEAHQEAFGRIKEALLSAPALALPDLTKPFALYVDEKEGVARGVLTQTLGPWRRPVAYLSKKLDPVASGWPTCLKAIAAVALLLKDADKLTLGQNVLVIAPHNLESIVRQPPDRWMTNARMTHYQSLLLNERVSFAPPAILNPATLLPVESDDTPIHICSEILAEETGTRPDLRDQPLPGVPAWYTDGSSFIMDGRRQAGAAIVDNKRTVWASNLPEGTSAQKAELIALTQALRLAEGKSINIYTDSRYAFATAHVHGAIYKQRGWLTSAGKDIKNKEEILALLEAIHLPKRVAIIHCPGHQRGTDPVATGNRKADEAAKQAAQSTRILTETTKNAGKRTADGSEFEKRTADGSEFESPKKKAKVE

SEQ ID NO: 1694 - protein, 2125 aa, synthetic construct
MPAAKRVKLDGGDKKYSIGLDIGTNSVGWAVITDEYKVPSKKFKVLGNTDRHSIKKNLIGALLFDSGETAEATRLKRTARRRYTRRKNRICYLQEIFSNEMAKVDDSFFHRLEESFLVEEDKKHERHPIFGNIVDEVAYHEKYPTIYHLRKKLVDSTDKADLRLIYLALAHMIKFRGHFLIEGDLNPDNSDVDKLFIQLVQTYNQLFEENPINASGVDAKAILSARLSKSRRLENLIAQLPGEKKNGLFGNLIALSLGLTPNFKSNFDLAEDAKLQLSKDTYDDDLDNLLAQIGDQYADLFLAAKNLSDAILLSDILRVNTEITKAPLSASMIKRYDEHHQDLTLLKALVRQQLPEKYKEIFFDQSKNGYAGYIDGGASQEEFYKFIKPILEKMDGTEELLVKLNREDLLRKQRTFDNGSIPHQIHLGELHAILRRQEDFYPFLKDNREKIEKILTFRIPYYVGPLARGNSRFAWMTRKSEETITPWNFEEVVDKGASAQSFIERMTNFDKNLPNEKVLPKHSLLYEYFTVYNELTKVKYVTEGMRKPAFLSGEQKKAIVDLLFKTNRKVTVKQLKEDYFKKIECFDSVEISGVEDRFNASLGTYHDLLKIIKDKDFLDNEENEDILEDIVLTLTLFEDREMIEERLKTYAHLFDDKVMKQLKRRRYTGWGRLSRKLINGIRDKQSGKTILDFLKSDGFANRNFMQLIHDDSLTFKEDIQKAQVSGQGDSLHEHIANLAGSPAIKKGILQTVKVVDELVKVMGRHKPENIVIEMARENQTTQKGQKNSRERMKRIEEGIKELGSQILKEHPVENTQLQNEKLYLYYLQNGRDMYVDQELDINRLSDYDVDHIVPQSFLKDDSIDNKVLTRSDKARGKSDNVPSEEVVKKMKNYWRQLLNAKLITQRKFDNLTKAERGGLSELDKAGFIKRQLVETRQITKHVAQILDSRMNTKYDENDKLIREVKVITLKSKLVSDFRKDFQFYKVREINNYHHAHDAYLNAVVGTALIKKYPKLESEFVYGDYKVYDVRKMIAKSEQEIGKATAKYFFYSNIMNFFKTEITLANGEIRKRPLIETNGETGEIVWDKGRDFATVRKVLSMPQVNIVKKTEVQTGGFSKESILPKRNSDKLIARKKDWDPKKYGGFDSPTVAYSVLVVAKVEKGKSKKLKSVKELLGITIMERSSFEKNPIDFLEAKGYKEVKKDLIIKLPKYSLFELENGRKRMLASAGELQKGNELALPSKYVNFLYLASHYEKLKGSPEDNEQKQLFVEQHKHYLDEIIEQISEFSKRVILADANLDKVLSAYNKHRDKPIREQAENIIHLFTLTNLGAPAAFKYFDTTIDRKRYTSTKEVLDATLIHQSITGLYETRIDLSQLGGDGGGSSPAPGGGGGLLGRDLLTKLKAQIQFSTEGPQVTWEDRPAMCLVLNLEEEYRLHEKPVPPSIDPSWLQLFPMVWAEKAGMGLANQVPPVVVELKSDASPVAVRQYPMSKEAREGIRPHIQRFLDLGILVPCQSPWNTPLLPVKKPGTNDYRPVQDLREVNKRVQDIHPTVPNPYNLLSSLPPSHTWYSVLDLKDAFFCLKLHPNSQPLFAFEWRDPEKGNTGQLTWTRLPQGFKNSPTLFNEALHRDLASFRALNPQVVMLQYVDDLLVAAPTYRDCKEGTRRLLQELSKLGYRVSAKKAQLCREEVTYLGYLLKGGKRWLTPARKATVMKIPTPTTPRQVREFLGKAGFCRLFIPGFASLAAPLYPLTRPKVPFTWTEAHQEAFGRIKEALLSAPALALPDLTKPFALYVDEKEGVARGVLTQTLGPWRRPVAYLSKKLDPVASGWPTCLKAIAAVALLLKDADKLTLGQNVLVIAPHNLESIVRQPPDRWMTNARMTHYQSLLLNERVSFAPPAILNPATLLPVESDDTPIHICSEILAEETGTRPDLRDQPLPGVPAWYTDGSSFIMDGRRQAGAAIVDNKRTVWASNLPEGTSAQKAELIALTQALRLAEGKSINIYTDSRYAFATAHVHGAIYKQRGWLTSAGKDIKNKEEILALLEAIHLPKRVAIIHCPGHQRGTDPVATGNRKADEAAKQAAQSTRILTETTKNAGKRTADGSEFEKRTADGSEFESPKKKAKVE

SEQ ID NO: 1695 - protein, 2122 aa, synthetic construct
MPAAKRVKLDGGDKKYSIGLDIGTNSVGWAVITDEYKVPSKKFKVLGNTDRHSIKKNLIGALLFDSGETAEATRLKRTARRRYTRRKNRICYLQEIFSNEMAKVDDSFFHRLEESFLVEEDKKHERHPIFGNIVDEVAYHEKYPTIYHLRKKLVDSTDKADLRLIYLALAHMIKFRGHFLIEGDLNPDNSDVDKLFIQLVQTYNQLFEENPINASGVDAKAILSARLSKSRRLENLIAQLPGEKKNGLFGNLIALSLGLTPNFKSNFDLAEDAKLQLSKDTYDDDLDNLLAQIGDQYADLFLAAKNLSDAILLSDILRVNTEITKAPLSASMIKRYDEHHQDLTLLKALVRQQLPEKYKEIFFDQSKNGYAGYIDGGASQEEFYKFIKPILEKMDGTEELLVKLNREDLLRKQRTFDNGSIPHQIHLGELHAILRRQEDFYPFLKDNREKIEKILTFRIPYYVGPLARGNSRFAWMTRKSEETITPWNFEEVVDKGASAQSFIERMTNFDKNLPNEKVLPKHSLLYEYFTVYNELTKVKYVTEGMRKPAFLSGEQKKAIVDLLFKTNRKVTVKQLKEDYFKKIECFDSVEISGVEDRFNASLGTYHDLLKIIKDKDFLDNEENEDILEDIVLTLTLFEDREMIEERLKTYAHLFDDKVMKQLKRRRYTGWGRLSRKLINGIRDKQSGKTILDFLKSDGFANRNFMQLIHDDSLTFKEDIQKAQVSGQGDSLHEHIANLAGSPAIKKGILQTVKVVDELVKVMGRHKPENIVIEMARENQTTQKGQKNSRERMKRIEEGIKELGSQILKEHPVENTQLQNEKLYLYYLQNGRDMYVDQELDINRLSDYDVDHIVPQSFLKDDSIDNKVLTRSDKARGKSDNVPSEEVVKKMKNYWRQLLNAKLITQRKFDNLTKAERGGLSELDKAGFIKRQLVETRQITKHVAQILDSRMNTKYDENDKLIREVKVITLKSKLVSDFRKDFQFYKVREINNYHHAHDAYLNAVVGTALIKKYPKLESEFVYGDYKVYDVRKMIAKSEQEIGKATAKYFFYSNIMNFFKTEITLANGEIRKRPLIETNGETGEIVWDKGRDFATVRKVLSMPQVNIVKKTEVQTGGFSKESILPKRNSDKLIARKKDWDPKKYGGFDSPTVAYSVLVVAKVEKGKSKKLKSVKELLGITIMERSSFEKNPIDFLEAKGYKEVKKDLIIKLPKYSLFELENGRKRMLASAGELQKGNELALPSKYVNFLYLASHYEKLKGSPEDNEQKQLFVEQHKHYLDEIIEQISEFSKRVILADANLDKVLSAYNKHRDKPIREQAENIIHLFTLTNLGAPAAFKYFDTTIDRKRYTSTKEVLDATLIHQSITGLYETRIDLSQLGGDGGPAPGSSGGLLGRDLLTKLKAQIQFSTEGPQVTWEDRPAMCLVLNLEEEYRLHEKPVPPSIDPSWLQLFPMVWAEKAGMGLANQVPPVVVELKSDASPVAVRQYPMSKEAREGIRPHIQRFLDLGILVPCQSPWNTPLLPVKKPGTNDYRPVQDLREVNKRVQDIHPTVPNPYNLLSSLPPSHTWYSVLDLKDAFFCLKLHPNSQPLFAFEWRDPEKGNTGQLTWTRLPQGFKNSPTLFNEALHRDLASFRALNPQVVMLQYVDDLLVAAPTYRDCKEGTRRLLQELSKLGYRVSAKKAQLCREEVTYLGYLLKGGKRWLTPARKATVMKIPTPTTPRQVREFLGKAGFCRLFIPGFASLAAPLYPLTRPKVPFTWTEAHQEAFGRIKEALLSAPALALPDLTKPFALYVDEKEGVARGVLTQTLGPWRRPVAYLSKKLDPVASGWPTCLKAIAAVALLLKDADKLTLGQNVLVIAPHNLESIVRQPPDRWMTNARMTHYQSLLLNERVSFAPPAILNPATLLPVESDDTPIHICSEILAEETGTRPDLRDQPLPGVPAWYTDGSSFIMDGRRQAGAAIVDNKRTVWASNLPEGTSAQKAELIALTQALRLAEGKSINIYTDSRYAFATAHVHGAIYKQRGWLTSAGKDIKNKEEILALLEAIHLPKRVAIIHCPGHQRGTDPVATGNRKADEAAKQAAQSTRILTETTKNAGKRTADGSEFEKRTADGSEFESPKKKAKVE

SEQ ID NO: 1696 - protein, 2125 aa, synthetic construct
MPAAKRVKLDGGDKKYSIGLDIGTNSVGWAVITDEYKVPSKKFKVLGNTDRHSIKKNLIGALLFDSGETAEATRLKRTARRRYTRRKNRICYLQEIFSNEMAKVDDSFFHRLEESFLVEEDKKHERHPIFGNIVDEVAYHEKYPTIYHLRKKLVDSTDKADLRLIYLALAHMIKFRGHFLIEGDLNPDNSDVDKLFIQLVQTYNQLFEENPINASGVDAKAILSARLSKSRRLENLIAQLPGEKKNGLFGNLIALSLGLTPNFKSNFDLAEDAKLQLSKDTYDDDLDNLLAQIGDQYADLFLAAKNLSDAILLSDILRVNTEITKAPLSASMIKRYDEHHQDLTLLKALVRQQLPEKYKEIFFDQSKNGYAGYIDGGASQEEFYKFIKPILEKMDGTEELLVKLNREDLLRKQRTFDNGSIPHQIHLGELHAILRRQEDFYPFLKDNREKIEKILTFRIPYYVGPLARGNSRFAWMTRKSEETITPWNFEEVVDKGASAQSFIERMTNFDKNLPNEKVLPKHSLLYEYFTVYNELTKVKYVTEGMRKPAFLSGEQKKAIVDLLFKTNRKVTVKQLKEDYFKKIECFDSVEISGVEDRFNASLGTYHDLLKIIKDKDFLDNEENEDILEDIVLTLTLFEDREMIEERLKTYAHLFDDKVMKQLKRRRYTGWGRLSRKLINGIRDKQSGKTILDFLKSDGFANRNFMQLIHDDSLTFKEDIQKAQVSGQGDSLHEHIANLAGSPAIKKGILQTVKVVDELVKVMGRHKPENIVIEMARENQTTQKGQKNSRERMKRIEEGIKELGSQILKEHPVENTQLQNEKLYLYYLQNGRDMYVDQELDINRLSDYDVDHIVPQSFLKDDSIDNKVLTRSDKARGKSDNVPSEEVVKKMKNYWRQLLNAKLITQRKFDNLTKAERGGLSELDKAGFIKRQLVETRQITKHVAQILDSRMNTKYDENDKLIREVKVITLKSKLVSDFRKDFQFYKVREINNYHHAHDAYLNAVVGTALIKKYPKLESEFVYGDYKVYDVRKMIAKSEQEIGKATAKYFFYSNIMNFFKTEITLANGEIRKRPLIETNGETGEIVWDKGRDFATVRKVLSMPQVNIVKKTEVQTGGFSKESILPKRNSDKLIARKKDWDPKKYGGFDSPTVAYSVLVVAKVEKGKSKKLKSVKELLGITIMERSSFEKNPIDFLEAKGYKEVKKDLIIKLPKYSLFELENGRKRMLASAGELQKGNELALPSKYVNFLYLASHYEKLKGSPEDNEQKQLFVEQHKHYLDEIIEQISEFSKRVILADANLDKVLSAYNKHRDKPIREQAENIIHLFTLTNLGAPAAFKYFDTTIDRKRYTSTKEVLDATLIHQSITGLYETRIDLSQLGGDGGPAPAPAPAPGGLLGRDLLTKLKAQIQFSTEGPQVTWEDRPAMCLVLNLEEEYRLHEKPVPPSIDPSWLQLFPMVWAEKAGMGLANQVPPVVVELKSDASPVAVRQYPMSKEAREGIRPHIQRFLDLGILVPCQSPWNTPLLPVKKPGTNDYRPVQDLREVNKRVQDIHPTVPNPYNLLSSLPPSHTWYSVLDLKDAFFCLKLHPNSQPLFAFEWRDPEKGNTGQLTWTRLPQGFKNSPTLFNEALHRDLASFRALNPQVVMLQYVDDLLVAAPTYRDCKEGTRRLLQELSKLGYRVSAKKAQLCREEVTYLGYLLKGGKRWLTPARKATVMKIPTPTTPRQVREFLGKAGFCRLFIPGFASLAAPLYPLTRPKVPFTWTEAHQEAFGRIKEALLSAPALALPDLTKPFALYVDEKEGVARGVLTQTLGPWRRPVAYLSKKLDPVASGWPTCLKAIAAVALLLKDADKLTLGQNVLVIAPHNLESIVRQPPDRWMTNARMTHYQSLLLNERVSFAPPAILNPATLLPVESDDTPIHICSEILAEETGTRPDLRDQPLPGVPAWYTDGSSFIMDGRRQAGAAIVDNKRTVWASNLPEGTSAQKAELIALTQALRLAEGKSINIYTDSRYAFATAHVHGAIYKQRGWLTSAGKDIKNKEEILALLEAIHLPKRVAIIHCPGHQRGTDPVATGNRKADEAAKQAAQSTRILTETTKNAGKRTADGSEFEKRTADGSEFESPKKKAKVE

SEQ ID NO: 1697 - protein, 2119 aa, synthetic construct
MPAAKRVKLDGGDKKYSIGLDIGTNSVGWAVITDEYKVPSKKFKVLGNTDRHSIKKNLIGALLFDSGETAEATRLKRTARRRYTRRKNRICYLQEIFSNEMAKVDDSFFHRLEESFLVEEDKKHERHPIFGNIVDEVAYHEKYPTIYHLRKKLVDSTDKADLRLIYLALAHMIKFRGHFLIEGDLNPDNSDVDKLFIQLVQTYNQLFEENPINASGVDAKAILSARLSKSRRLENLIAQLPGEKKNGLFGNLIALSLGLTPNFKSNFDLAEDAKLQLSKDTYDDDLDNLLAQIGDQYADLFLAAKNLSDAILLSDILRVNTEITKAPLSASMIKRYDEHHQDLTLLKALVRQQLPEKYKEIFFDQSKNGYAGYIDGGASQEEFYKFIKPILEKMDGTEELLVKLNREDLLRKQRTFDNGSIPHQIHLGELHAILRRQEDFYPFLKDNREKIEKILTFRIPYYVGPLARGNSRFAWMTRKSEETITPWNFEEVVDKGASAQSFIERMTNFDKNLPNEKVLPKHSLLYEYFTVYNELTKVKYVTEGMRKPAFLSGEQKKAIVDLLFKTNRKVTVKQLKEDYFKKIECFDSVEISGVEDRFNASLGTYHDLLKIIKDKDFLDNEENEDILEDIVLTLTLFEDREMIEERLKTYAHLFDDKVMKQLKRRRYTGWGRLSRKLINGIRDKQSGKTILDFLKSDGFANRNFMQLIHDDSLTFKEDIQKAQVSGQGDSLHEHIANLAGSPAIKKGILQTVKVVDELVKVMGRHKPENIVIEMARENQTTQKGQKNSRERMKRIEEGIKELGSQILKEHPVENTQLQNEKLYLYYLQNGRDMYVDQELDINRLSDYDVDHIVPQSFLKDDSIDNKVLTRSDKARGKSDNVPSEEVVKKMKNYWRQLLNAKLITQRKFDNLTKAERGGLSELDKAGFIKRQLVETRQITKHVAQILDSRMNTKYDENDKLIREVKVITLKSKLVSDFRKDFQFYKVREINNYHHAHDAYLNAVVGTALIKKYPKLESEFVYGDYKVYDVRKMIAKSEQEIGKATAKYFFYSNIMNFFKTEITLANGEIRKRPLIETNGETGEIVWDKGRDFATVRKVLSMPQVNIVKKTEVQTGGFSKESILPKRNSDKLIARKKDWDPKKYGGFDSPTVAYSVLVVAKVEKGKSKKLKSVKELLGITIMERSSFEKNPIDFLEAKGYKEVKKDLIIKLPKYSLFELENGRKRMLASAGELQKGNELALPSKYVNFLYLASHYEKLKGSPEDNEQKQLFVEQHKHYLDEIIEQISEFSKRVILADANLDKVLSAYNKHRDKPIREQAENIIHLFTLTNLGAPAAFKYFDTTIDRKRYTSTKEVLDATLIHQSITGLYETRIDLSQLGGDGGGSSGGLLGRDLLTKLKAQIQFSTEGPQVTWEDRPAMCLVLNLEEEYRLHEKPVPPSIDPSWLQLFPMVWAEKAGMGLANQVPPVVVELKSDASPVAVRQYPMSKEAREGIRPHIQRFLDLGILVPCQSPWNTPLLPVKKPGTNDYRPVQDLREVNKRVQDIHPTVPNPYNLLSSLPPSHTWYSVLDLKDAFFCLKLHPNSQPLFAFEWRDPEKGNTGQLTWTRLPQGFKNSPTLFNEALHRDLASFRALNPQVVMLQYVDDLLVAAPTYRDCKEGTRRLLQELSKLGYRVSAKKAQLCREEVTYLGYLLKGGKRWLTPARKATVMKIPTPTTPRQVREFLGKAGFCRLFIPGFASLAAPLYPLTRPKVPFTWTEAHQEAFGRIKEALLSAPALALPDLTKPFALYVDEKEGVARGVLTQTLGPWRRPVAYLSKKLDPVASGWPTCLKAIAAVALLLKDADKLTLGQNVLVIAPHNLESIVRQPPDRWMTNARMTHYQSLLLNERVSFAPPAILNPATLLPVESDDTPIHICSEILAEETGTRPDLRDQPLPGVPAWYTDGSSFIMDGRRQAGAAIVDNKRTVWASNLPEGTSAQKAELIALTQALRLAEGKSINIYTDSRYAFATAHVHGAIYKQRGWLTSAGKDIKNKEEILALLEAIHLPKRVAIIHCPGHQRGTDPVATGNRKADEAAKQAAQSTRILTETTKNAGKRTADGSEFEKRTADGSEFESPKKKAKVE

SEQ ID NO: 1698 - protein, 2122 aa, synthetic construct
MPAAKRVKLDGGDKKYSIGLDIGTNSVGWAVITDEYKVPSKKFKVLGNTDRHSIKKNLIGALLFDSGETAEATRLKRTARRRYTRRKNRICYLQEIFSNEMAKVDDSFFHRLEESFLVEEDKKHERHPIFGNIVDEVAYHEKYPTIYHLRKKLVDSTDKADLRLIYLALAHMIKFRGHFLIEGDLNPDNSDVDKLFIQLVQTYNQLFEENPINASGVDAKAILSARLSKSRRLENLIAQLPGEKKNGLFGNLIALSLGLTPNFKSNFDLAEDAKLQLSKDTYDDDLDNLLAQIGDQYADLFLAAKNLSDAILLSDILRVNTEITKAPLSASMIKRYDEHHQDLTLLKALVRQQLPEKYKEIFFDQSKNGYAGYIDGGASQEEFYKFIKPILEKMDGTEELLVKLNREDLLRKQRTFDNGSIPHQIHLGELHAILRRQEDFYPFLKDNREKIEKILTFRIPYYVGPLARGNSRFAWMTRKSEETITPWNFEEVVDKGASAQSFIERMTNFDKNLPNEKVLPKHSLLYEYFTVYNELTKVKYVTEGMRKPAFLSGEQKKAIVDLLFKTNRKVTVKQLKEDYFKKIECFDSVEISGVEDRFNASLGTYHDLLKIIKDKDFLDNEENEDILEDIVLTLTLFEDREMIEERLKTYAHLFDDKVMKQLKRRRYTGWGRLSRKLINGIRDKQSGKTILDFLKSDGFANRNFMQLIHDDSLTFKEDIQKAQVSGQGDSLHEHIANLAGSPAIKKGILQTVKVVDELVKVMGRHKPENIVIEMARENQTTQKGQKNSRERMKRIEEGIKELGSQILKEHPVENTQLQNEKLYLYYLQNGRDMYVDQELDINRLSDYDVDHIVPQSFLKDDSIDNKVLTRSDKARGKSDNVPSEEVVKKMKNYWRQLLNAKLITQRKFDNLTKAERGGLSELDKAGFIKRQLVETRQITKHVAQILDSRMNTKYDENDKLIREVKVITLKSKLVSDFRKDFQFYKVREINNYHHAHDAYLNAVVGTALIKKYPKLESEFVYGDYKVYDVRKMIAKSEQEIGKATAKYFFYSNIMNFFKTEITLANGEIRKRPLIETNGETGEIVWDKGRDFATVRKVLSMPQVNIVKKTEVQTGGFSKESILPKRNSDKLIARKKDWDPKKYGGFDSPTVAYSVLVVAKVEKGKSKKLKSVKELLGITIMERSSFEKNPIDFLEAKGYKEVKKDLIIKLPKYSLFELENGRKRMLASAGELQKGNELALPSKYVNFLYLASHYEKLKGSPEDNEQKQLFVEQHKHYLDEIIEQISEFSKRVILADANLDKVLSAYNKHRDKPIREQAENIIHLFTLTNLGAPAAFKYFDTTIDRKRYTSTKEVLDATLIHQSITGLYETRIDLSQLGGDGGGSSGGGGGLLGRDLLTKLKAQIQFSTEGPQVTWEDRPAMCLVLNLEEEYRLHEKPVPPSIDPSWLQLFPMVWAEKAGMGLANQVPPVVVELKSDASPVAVRQYPMSKEAREGIRPHIQRFLDLGILVPCQSPWNTPLLPVKKPGTNDYRPVQDLREVNKRVQDIHPTVPNPYNLLSSLPPSHTWYSVLDLKDAFFCLKLHPNSQPLFAFEWRDPEKGNTGQLTWTRLPQGFKNSPTLFNEALHRDLASFRALNPQVVMLQYVDDLLVAAPTYRDCKEGTRRLLQELSKLGYRVSAKKAQLCREEVTYLGYLLKGGKRWLTPARKATVMKIPTPTTPRQVREFLGKAGFCRLFIPGFASLAAPLYPLTRPKVPFTWTEAHQEAFGRIKEALLSAPALALPDLTKPFALYVDEKEGVARGVLTQTLGPWRRPVAYLSKKLDPVASGWPTCLKAIAAVALLLKDADKLTLGQNVLVIAPHNLESIVRQPPDRWMTNARMTHYQSLLLNERVSFAPPAILNPATLLPVESDDTPIHICSEILAEETGTRPDLRDQPLPGVPAWYTDGSSFIMDGRRQAGAAIVDNKRTVWASNLPEGTSAQKAELIALTQALRLAEGKSINIYTDSRYAFATAHVHGAIYKQRGWLTSAGKDIKNKEEILALLEAIHLPKRVAIIHCPGHQRGTDPVATGNRKADEAAKQAAQSTRILTETTKNAGKRTADGSEFEKRTADGSEFESPKKKAKVE

SEQ ID NO: 1699 - protein, 2127 aa, synthetic construct
MPAAKRVKLDGGDKKYSIGLDIGTNSVGWAVITDEYKVPSKKFKVLGNTDRHSIKKNLIGALLFDSGETAEATRLKRTARRRYTRRKNRICYLQEIFSNEMAKVDDSFFHRLEESFLVEEDKKHERHPIFGNIVDEVAYHEKYPTIYHLRKKLVDSTDKADLRLIYLALAHMIKFRGHFLIEGDLNPDNSDVDKLFIQLVQTYNQLFEENPINASGVDAKAILSARLSKSRRLENLIAQLPGEKKNGLFGNLIALSLGLTPNFKSNFDLAEDAKLQLSKDTYDDDLDNLLAQIGDQYADLFLAAKNLSDAILLSDILRVNTEITKAPLSASMIKRYDEHHQDLTLLKALVRQQLPEKYKEIFFDQSKNGYAGYIDGGASQEEFYKFIKPILEKMDGTEELLVKLNREDLLRKQRTFDNGSIPHQIHLGELHAILRRQEDFYPFLKDNREKIEKILTFRIPYYVGPLARGNSRFAWMTRKSEETITPWNFEEVVDKGASAQSFIERMTNFDKNLPNEKVLPKHSLLYEYFTVYNELTKVKYVTEGMRKPAFLSGEQKKAIVDLLFKTNRKVTVKQLKEDYFKKIECFDSVEISGVEDRFNASLGTYHDLLKIIKDKDFLDNEENEDILEDIVLTLTLFEDREMIEERLKTYAHLFDDKVMKQLKRRRYTGWGRLSRKLINGIRDKQSGKTILDFLKSDGFANRNFMQLIHDDSLTFKEDIQKAQVSGQGDSLHEHIANLAGSPAIKKGILQTVKVVDELVKVMGRHKPENIVIEMARENQTTQKGQKNSRERMKRIEEGIKELGSQILKEHPVENTQLQNEKLYLYYLQNGRDMYVDQELDINRLSDYDVDHIVPQSFLKDDSIDNKVLTRSDKARGKSDNVPSEEVVKKMKNYWRQLLNAKLITQRKFDNLTKAERGGLSELDKAGFIKRQLVETRQITKHVAQILDSRMNTKYDENDKLIREVKVITLKSKLVSDFRKDFQFYKVREINNYHHAHDAYLNAVVGTALIKKYPKLESEFVYGDYKVYDVRKMIAKSEQEIGKATAKYFFYSNIMNFFKTEITLANGEIRKRPLIETNGETGEIVWDKGRDFATVRKVLSMPQVNIVKKTEVQTGGFSKESILPKRNSDKLIARKKDWDPKKYGGFDSPTVAYSVLVVAKVEKGKSKKLKSVKELLGITIMERSSFEKNPIDFLEAKGYKEVKKDLIIKLPKYSLFELENGRKRMLASAGELQKGNELALPSKYVNFLYLASHYEKLKGSPEDNEQKQLFVEQHKHYLDEIIEQISEFSKRVILADANLDKVLSAYNKHRDKPIREQAENIIHLFTLTNLGAPAAFKYFDTTIDRKRYTSTKEVLDATLIHQSITGLYETRIDLSQLGGDGGPAPEAAAKGSSGGLLGRDLLTKLKAQIQFSTEGPQVTWEDRPAMCLVLNLEEEYRLHEKPVPPSIDPSWLQLFPMVWAEKAGMGLANQVPPVVVELKSDASPVAVRQYPMSKEAREGIRPHIQRFLDLGILVPCQSPWNTPLLPVKKPGTNDYRPVQDLREVNKRVQDIHPTVPNPYNLLSSLPPSHTWYSVLDLKDAFFCLKLHPNSQPLFAFEWRDPEKGNTGQLTWTRLPQGFKNSPTLFNEALHRDLASFRALNPQVVMLQYVDDLLVAAPTYRDCKEGTRRLLQELSKLGYRVSAKKAQLCREEVTYLGYLLKGGKRWLTPARKATVMKIPTPTTPRQVREFLGKAGFCRLFIPGFASLAAPLYPLTRPKVPFTWTEAHQEAFGRIKEALLSAPALALPDLTKPFALYVDEKEGVARGVLTQTLGPWRRPVAYLSKKLDPVASGWPTCLKAIAAVALLLKDADKLTLGQNVLVIAPHNLESIVRQPPDRWMTNARMTHYQSLLLNERVSFAPPAILNPATLLPVESDDTPIHICSEILAEETGTRPDLRDQPLPGVPAWYTDGSSFIMDGRRQAGAAIVDNKRTVWASNLPEGTSAQKAELIALTQALRLAEGKSINIYTDSRYAFATAHVHGAIYKQRGWLTSAGKDIKNKEEILALLEAIHLPKRVAIIHCPGHQRGTDPVATGNRKADEAAKQAAQSTRILTETTKNAGKRTADGSEFEKRTADGSEFESPKKKAKVE

SEQ ID NO: 1700 - protein, 2127 aa, synthetic construct
MPAAKRVKLDGGDKKYSIGLDIGTNSVGWAVITDEYKVPSKKFKVLGNTDRHSIKKNLIGALLFDSGETAEATRLKRTARRRYTRRKNRICYLQEIFSNEMAKVDDSFFHRLEESFLVEEDKKHERHPIFGNIVDEVAYHEKYPTIYHLRKKLVDSTDKADLRLIYLALAHMIKFRGHFLIEGDLNPDNSDVDKLFIQLVQTYNQLFEENPINASGVDAKAILSARLSKSRRLENLIAQLPGEKKNGLFGNLIALSLGLTPNFKSNFDLAEDAKLQLSKDTYDDDLDNLLAQIGDQYADLFLAAKNLSDAILLSDILRVNTEITKAPLSASMIKRYDEHHQDLTLLKALVRQQLPEKYKEIFFDQSKNGYAGYIDGGASQEEFYKFIKPILEKMDGTEELLVKLNREDLLRKQRTFDNGSIPHQIHLGELHAILRRQEDFYPFLKDNREKIEKILTFRIPYYVGPLARGNSRFAWMTRKSEETITPWNFEEVVDKGASAQSFIERMTNFDKNLPNEKVLPKHSLLYEYFTVYNELTKVKYVTEGMRKPAFLSGEQKKAIVDLLFKTNRKVTVKQLKEDYFKKIECFDSVEISGVEDRFNASLGTYHDLLKIIKDKDFLDNEENEDILEDIVLTLTLFEDREMIEERLKTYAHLFDDKVMKQLKRRRYTGWGRLSRKLINGIRDKQSGKTILDFLKSDGFANRNFMQLIHDDSLTFKEDIQKAQVSGQGDSLHEHIANLAGSPAIKKGILQTVKVVDELVKVMGRHKPENIVIEMARENQTTQKGQKNSRERMKRIEEGIKELGSQILKEHPVENTQLQNEKLYLYYLQNGRDMYVDQELDINRLSDYDVDHIVPQSFLKDDSIDNKVLTRSDKARGKSDNVPSEEVVKKMKNYWRQLLNAKLITQRKFDNLTKAERGGLSELDKAGFIKRQLVETRQITKHVAQILDSRMNTKYDENDKLIREVKVITLKSKLVSDFRKDFQFYKVREINNYHHAHDAYLNAVVGTALIKKYPKLESEFVYGDYKVYDVRKMIAKSEQEIGKATAKYFFYSNIMNFFKTEITLANGEIRKRPLIETNGETGEIVWDKGRDFATVRKVLSMPQVNIVKKTEVQTGGFSKESILPKRNSDKLIARKKDWDPKKYGGFDSPTVAYSVLVVAKVEKGKSKKLKSVKELLGITIMERSSFEKNPIDFLEAKGYKEVKKDLIIKLPKYSLFELENGRKRMLASAGELQKGNELALPSKYVNFLYLASHYEKLKGSPEDNEQKQLFVEQHKHYLDEIIEQISEFSKRVILADANLDKVLSAYNKHRDKPIREQAENIIHLFTLTNLGAPAAFKYFDTTIDRKRYTSTKEVLDATLIHQSITGLYETRIDLSQLGGDGGEAAAKGSSGGGGGLLGRDLLTKLKAQIQFSTEGPQVTWEDRPAMCLVLNLEEEYRLHEKPVPPSIDPSWLQLFPMVWAEKAGMGLANQVPPVVVELKSDASPVAVRQYPMSKEAREGIRPHIQRFLDLGILVPCQSPWNTPLLPVKKPGTNDYRPVQDLREVNKRVQDIHPTVPNPYNLLSSLPPSHTWYSVLDLKDAFFCLKLHPNSQPLFAFEWRDPEKGNTGQLTWTRLPQGFKNSPTLFNEALHRDLASFRALNPQVVMLQYVDDLLVAAPTYRDCKEGTRRLLQELSKLGYRVSAKKAQLCREEVTYLGYLLKGGKRWLTPARKATVMKIPTPTTPRQVREFLGKAGFCRLFIPGFASLAAPLYPLTRPKVPFTWTEAHQEAFGRIKEALLSAPALALPDLTKPFALYVDEKEGVARGVLTQTLGPWRRPVAYLSKKLDPVASGWPTCLKAIAAVALLLKDADKLTLGQNVLVIAPHNLESIVRQPPDRWMTNARMTHYQSLLLNERVSFAPPAILNPATLLPVESDDTPIHICSEILAEETGTRPDLRDQPLPGVPAWYTDGSSFIMDGRRQAGAAIVDNKRTVWASNLPEGTSAQKAELIALTQALRLAEGKSINIYTDSRYAFATAHVHGAIYKQRGWLTSAGKDIKNKEEILALLEAIHLPKRVAIIHCPGHQRGTDPVATGNRKADEAAKQAAQSTRILTETTKNAGKRTADGSEFEKRTADGSEFESPKKKAKVE

SEQ ID NO: 1701 - protein, 2129 aa, synthetic construct
MPAAKRVKLDGGDKKYSIGLDIGTNSVGWAVITDEYKVPSKKFKVLGNTDRHSIKKNLIGALLFDSGETAEATRLKRTARRRYTRRKNRICYLQEIFSNEMAKVDDSFFHRLEESFLVEEDKKHERHPIFGNIVDEVAYHEKYPTIYHLRKKLVDSTDKADLRLIYLALAHMIKFRGHFLIEGDLNPDNSDVDKLFIQLVQTYNQLFEENPINASGVDAKAILSARLSKSRRLENLIAQLPGEKKNGLFGNLIALSLGLTPNFKSNFDLAEDAKLQLSKDTYDDDLDNLLAQIGDQYADLFLAAKNLSDAILLSDILRVNTEITKAPLSASMIKRYDEHHQDLTLLKALVRQQLPEKYKEIFFDQSKNGYAGYIDGGASQEEFYKFIKPILEKMDGTEELLVKLNREDLLRKQRTFDNGSIPHQIHLGELHAILRRQEDFYPFLKDNREKIEKILTFRIPYYVGPLARGNSRFAWMTRKSEETITPWNFEEVVDKGASAQSFIERMTNFDKNLPNEKVLPKHSLLYEYFTVYNELTKVKYVTEGMRKPAFLSGEQKKAIVDLLFKTNRKVTVKQLKEDYFKKIECFDSVEISGVEDRFNASLGTYHDLLKIIKDKDFLDNEENEDILEDIVLTLTLFEDREMIEERLKTYAHLFDDKVMKQLKRRRYTGWGRLSRKLINGIRDKQSGKTILDFLKSDGFANRNFMQLIHDDSLTFKEDIQKAQVSGQGDSLHEHIANLAGSPAIKKGILQTVKVVDELVKVMGRHKPENIVIEMARENQTTQKGQKNSRERMKRIEEGIKELGSQILKEHPVENTQLQNEKLYLYYLQNGRDMYVDQELDINRLSDYDVDHIVPQSFLKDDSIDNKVLTRSDKARGKSDNVPSEEVVKKMKNYWRQLLNAKLITQRKFDNLTKAERGGLSELDKAGFIKRQLVETRQITKHVAQILDSRMNTKYDENDKLIREVKVITLKSKLVSDFRKDFQFYKVREINNYHHAHDAYLNAVVGTALIKKYPKLESEFVYGDYKVYDVRKMIAKSEQEIGKATAKYFFYSNIMNFFKTEITLANGEIRKRPLIETNGETGEIVWDKGRDFATVRKVLSMPQVNIVKKTEVQTGGFSKESILPKRNSDKLIARKKDWDPKKYGGFDSPTVAYSVLVVAKVEKGKSKKLKSVKELLGITIMERSSFEKNPIDFLEAKGYKEVKKDLIIKLPKYSLFELENGRKRMLASAGELQKGNELALPSKYVNFLYLASHYEKLKGSPEDNEQKQLFVEQHKHYLDEIIEQISEFSKRVILADANLDKVLSAYNKHRDKPIREQAENIIHLFTLTNLGAPAAFKYFDTTIDRKRYTSTKEVLDATLIHQSITGLYETRIDLSQLGGDGGPAPAPAPAPAPAPGGLLGRDLLTKLKAQIQFSTEGPQVTWEDRPAMCLVLNLEEEYRLHEKPVPPSIDPSWLQLFPMVWAEKAGMGLANQVPPVVVELKSDASPVAVRQYPMSKEAREGIRPHIQRFLDLGILVPCQSPWNTPLLPVKKPGTNDYRPVQDLREVNKRVQDIHPTVPNPYNLLSSLPPSHTWYSVLDLKDAFFCLKLHPNSQPLFAFEWRDPEKGNTGQLTWTRLPQGFKNSPTLFNEALHRDLASFRALNPQVVMLQYVDDLLVAAPTYRDCKEGTRRLLQELSKLGYRVSAKKAQLCREEVTYLGYLLKGGKRWLTPARKATVMKIPTPTTPRQVREFLGKAGFCRLFIPGFASLAAPLYPLTRPKVPFTWTEAHQEAFGRIKEALLSAPALALPDLTKPFALYVDEKEGVARGVLTQTLGPWRRPVAYLSKKLDPVASGWPTCLKAIAAVALLLKDADKLTLGQNVLVIAPHNLESIVRQPPDRWMTNARMTHYQSLLLNERVSFAPPAILNPATLLPVESDDTPIHICSEILAEETGTRPDLRDQPLPGVPAWYTDGSSFIMDGRRQAGAAIVDNKRTVWASNLPEGTSAQKAELIALTQALRLAEGKSINIYTDSRYAFATAHVHGAIYKQRGWLTSAGKDIKNKEEILALLEAIHLPKRVAIIHCPGHQRGTDPVATGNRKADEAAKQAAQSTRILTETTKNAGKRTADGSEFEKRTADGSEFESPKKKAKVE

SEQ ID NO: 1702 - protein, 2127 aa, synthetic construct
MPAAKRVKLDGGDKKYSIGLDIGTNSVGWAVITDEYKVPSKKFKVLGNTDRHSIKKNLIGALLFDSGETAEATRLKRTARRRYTRRKNRICYLQEIFSNEMAKVDDSFFHRLEESFLVEEDKKHERHPIFGNIVDEVAYHEKYPTIYHLRKKLVDSTDKADLRLIYLALAHMIKFRGHFLIEGDLNPDNSDVDKLFIQLVQTYNQLFEENPINASGVDAKAILSARLSKSRRLENLIAQLPGEKKNGLFGNLIALSLGLTPNFKSNFDLAEDAKLQLSKDTYDDDLDNLLAQIGDQYADLFLAAKNLSDAILLSDILRVNTEITKAPLSASMIKRYDEHHQDLTLLKALVRQQLPEKYKEIFFDQSKNGYAGYIDGGASQEEFYKFIKPILEKMDGTEELLVKLNREDLLRKQRTFDNGSIPHQIHLGELHAILRRQEDFYPFLKDNREKIEKILTFRIPYYVGPLARGNSRFAWMTRKSEETITPWNFEEVVDKGASAQSFIERMTNFDKNLPNEKVLPKHSLLYEYFTVYNELTKVKYVTEGMRKPAFLSGEQKKAIVDLLFKTNRKVTVKQLKEDYFKKIECFDSVEISGVEDRFNASLGTYHDLLKIIKDKDFLDNEENEDILEDIVLTLTLFEDREMIEERLKTYAHLFDDKVMKQLKRRRYTGWGRLSRKLINGIRDKQSGKTILDFLKSDGFANRNFMQLIHDDSLTFKEDIQKAQVSGQGDSLHEHIANLAGSPAIKKGILQTVKVVDELVKVMGRHKPENIVIEMARENQTTQKGQKNSRERMKRIEEGIKELGSQILKEHPVENTQLQNEKLYLYYLQNGRDMYVDQELDINRLSDYDVDHIVPQSFLKDDSIDNKVLTRSDKARGKSDNVPSEEVVKKMKNYWRQLLNAKLITQRKFDNLTKAERGGLSELDKAGFIKRQLVETRQITKHVAQILDSRMNTKYDENDKLIREVKVITLKSKLVSDFRKDFQFYKVREINNYHHAHDAYLNAVVGTALIKKYPKLESEFVYGDYKVYDVRKMIAKSEQEIGKATAKYFFYSNIMNFFKTEITLANGEIRKRPLIETNGETGEIVWDKGRDFATVRKVLSMPQVNIVKKTEVQTGGFSKESILPKRNSDKLIARKKDWDPKKYGGFDSPTVAYSVLVVAKVEKGKSKKLKSVKELLGITIMERSSFEKNPIDFLEAKGYKEVKKDLIIKLPKYSLFELENGRKRMLASAGELQKGNELALPSKYVNFLYLASHYEKLKGSPEDNEQKQLFVEQHKHYLDEIIEQISEFSKRVILADANLDKVLSAYNKHRDKPIREQAENIIHLFTLTNLGAPAAFKYFDTTIDRKRYTSTKEVLDATLIHQSITGLYETRIDLSQLGGDGGGGGEAAAKGGSGGLLGRDLLTKLKAQIQFSTEGPQVTWEDRPAMCLVLNLEEEYRLHEKPVPPSIDPSWLQLFPMVWAEKAGMGLANQVPPVVVELKSDASPVAVRQYPMSKEAREGIRPHIQRFLDLGILVPCQSPWNTPLLPVKKPGTNDYRPVQDLREVNKRVQDIHPTVPNPYNLLSSLPPSHTWYSVLDLKDAFFCLKLHPNSQPLFAFEWRDPEKGNTGQLTWTRLPQGFKNSPTLFNEALHRDLASFRALNPQVVMLQYVDDLLVAAPTYRDCKEGTRRLLQELSKLGYRVSAKKAQLCREEVTYLGYLLKGGKRWLTPARKATVMKIPTPTTPRQVREFLGKAGFCRLFIPGFASLAAPLYPLTRPKVPFTWTEAHQEAFGRIKEALLSAPALALPDLTKPFALYVDEKEGVARGVLTQTLGPWRRPVAYLSKKLDPVASGWPTCLKAIAAVALLLKDADKLTLGQNVLVIAPHNLESIVRQPPDRWMTNARMTHYQSLLLNERVSFAPPAILNPATLLPVESDDTPIHICSEILAEETGTRPDLRDQPLPGVPAWYTDGSSFIMDGRRQAGAAIVDNKRTVWASNLPEGTSAQKAELIALTQALRLAEGKSINIYTDSRYAFATAHVHGAIYKQRGWLTSAGKDIKNKEEILALLEAIHLPKRVAIIHCPGHQRGTDPVATGNRKADEAAKQAAQSTRILTETTKNAGKRTADGSEFEKRTADGSEFESPKKKAKVE

SEQ ID NO: 1703 - protein, 2122 aa, synthetic construct
MPAAKRVKLDGGDKKYSIGLDIGTNSVGWAVITDEYKVPSKKFKVLGNTDRHSIKKNLIGALLFDSGETAEATRLKRTARRRYTRRKNRICYLQEIFSNEMAKVDDSFFHRLEESFLVEEDKKHERHPIFGNIVDEVAYHEKYPTIYHLRKKLVDSTDKADLRLIYLALAHMIKFRGHFLIEGDLNPDNSDVDKLFIQLVQTYNQLFEENPINASGVDAKAILSARLSKSRRLENLIAQLPGEKKNGLFGNLIALSLGLTPNFKSNFDLAEDAKLQLSKDTYDDDLDNLLAQIGDQYADLFLAAKNLSDAILLSDILRVNTEITKAPLSASMIKRYDEHHQDLTLLKALVRQQLPEKYKEIFFDQSKNGYAGYIDGGASQEEFYKFIKPILEKMDGTEELLVKLNREDLLRKQRTFDNGSIPHQIHLGELHAILRRQEDFYPFLKDNREKIEKILTFRIPYYVGPLARGNSRFAWMTRKSEETITPWNFEEVVDKGASAQSFIERMTNFDKNLPNEKVLPKHSLLYEYFTVYNELTKVKYVTEGMRKPAFLSGEQKKAIVDLLFKTNRKVTVKQLKEDYFKKIECFDSVEISGVEDRFNASLGTYHDLLKIIKDKDFLDNEENEDILEDIVLTLTLFEDREMIEERLKTYAHLFDDKVMKQLKRRRYTGWGRLSRKLINGIRDKQSGKTILDFLKSDGFANRNFMQLIHDDSLTFKEDIQKAQVSGQGDSLHEHIANLAGSPAIKKGILQTVKVVDELVKVMGRHKPENIVIEMARENQTTQKGQKNSRERMKRIEEGIKELGSQILKEHPVENTQLQNEKLYLYYLQNGRDMYVDQELDINRLSDYDVDHIVPQSFLKDDSIDNKVLTRSDKARGKSDNVPSEEVVKKMKNYWRQLLNAKLITQRKFDNLTKAERGGLSELDKAGFIKRQLVETRQITKHVAQILDSRMNTKYDENDKLIREVKVITLKSKLVSDFRKDFQFYKVREINNYHHAHDAYLNAVVGTALIKKYPKLESEFVYGDYKVYDVRKMIAKSEQEIGKATAKYFFYSNIMNFFKTEITLANGEIRKRPLIETNGETGEIVWDKGRDFATVRKVLSMPQVNIVKKTEVQTGGFSKESILPKRNSDKLIARKKDWDPKKYGGFDSPTVAYSVLVVAKVEKGKSKKLKSVKELLGITIMERSSFEKNPIDFLEAKGYKEVKKDLIIKLPKYSLFELENGRKRMLASAGELQKGNELALPSKYVNFLYLASHYEKLKGSPEDNEQKQLFVEQHKHYLDEIIEQISEFSKRVILADANLDKVLSAYNKHRDKPIREQAENIIHLFTLTNLGAPAAFKYFDTTIDRKRYTSTKEVLDATLIHQSITGLYETRIDLSQLGGDGGGGSPAPGGLLGRDLLTKLKAQIQFSTEGPQVTWEDRPAMCLVLNLEEEYRLHEKPVPPSIDPSWLQLFPMVWAEKAGMGLANQVPPVVVELKSDASPVAVRQYPMSKEAREGIRPHIQRFLDLGILVPCQSPWNTPLLPVKKPGTNDYRPVQDLREVNKRVQDIHPTVPNPYNLLSSLPPSHTWYSVLDLKDAFFCLKLHPNSQPLFAFEWRDPEKGNTGQLTWTRLPQGFKNSPTLFNEALHRDLASFRALNPQVVMLQYVDDLLVAAPTYRDCKEGTRRLLQELSKLGYRVSAKKAQLCREEVTYLGYLLKGGKRWLTPARKATVMKIPTPTTPRQVREFLGKAGFCRLFIPGFASLAAPLYPLTRPKVPFTWTEAHQEAFGRIKEALLSAPALALPDLTKPFALYVDEKEGVARGVLTQTLGPWRRPVAYLSKKLDPVASGWPTCLKAIAAVALLLKDADKLTLGQNVLVIAPHNLESIVRQPPDRWMTNARMTHYQSLLLNERVSFAPPAILNPATLLPVESDDTPIHICSEILAEETGTRPDLRDQPLPGVPAWYTDGSSFIMDGRRQAGAAIVDNKRTVWASNLPEGTSAQKAELIALTQALRLAEGKSINIYTDSRYAFATAHVHGAIYKQRGWLTSAGKDIKNKEEILALLEAIHLPKRVAIIHCPGHQRGTDPVATGNRKADEAAKQAAQSTRILTETTKNAGKRTADGSEFEKRTADGSEFESPKKKAKVE

SEQ ID NO: 1704 - protein, 2127 aa, synthetic construct
MPAAKRVKLDGGDKKYSIGLDIGTNSVGWAVITDEYKVPSKKFKVLGNTDRHSIKKNLIGALLFDSGETAEATRLKRTARRRYTRRKNRICYLQEIFSNEMAKVDDSFFHRLEESFLVEEDKKHERHPIFGNIVDEVAYHEKYPTIYHLRKKLVDSTDKADLRLIYLALAHMIKFRGHFLIEGDLNPDNSDVDKLFIQLVQTYNQLFEENPINASGVDAKAILSARLSKSRRLENLIAQLPGEKKNGLFGNLIALSLGLTPNFKSNFDLAEDAKLQLSKDTYDDDLDNLLAQIGDQYADLFLAAKNLSDAILLSDILRVNTEITKAPLSASMIKRYDEHHQDLTLLKALVRQQLPEKYKEIFFDQSKNGYAGYIDGGASQEEFYKFIKPILEKMDGTEELLVKLNREDLLRKQRTFDNGSIPHQIHLGELHAILRRQEDFYPFLKDNREKIEKILTFRIPYYVGPLARGNSRFAWMTRKSEETITPWNFEEVVDKGASAQSFIERMTNFDKNLPNEKVLPKHSLLYEYFTVYNELTKVKYVTEGMRKPAFLSGEQKKAIVDLLFKTNRKVTVKQLKEDYFKKIECFDSVEISGVEDRFNASLGTYHDLLKIIKDKDFLDNEENEDILEDIVLTLTLFEDREMIEERLKTYAHLFDDKVMKQLKRRRYTGWGRLSRKLINGIRDKQSGKTILDFLKSDGFANRNFMQLIHDDSLTFKEDIQKAQVSGQGDSLHEHIANLAGSPAIKKGILQTVKVVDELVKVMGRHKPENIVIEMARENQTTQKGQKNSRERMKRIEEGIKELGSQILKEHPVENTQLQNEKLYLYYLQNGRDMYVDQELDINRLSDYDVDHIVPQSFLKDDSIDNKVLTRSDKARGKSDNVPSEEVVKKMKNYWRQLLNAKLITQRKFDNLTKAERGGLSELDKAGFIKRQLVETRQITKHVAQILDSRMNTKYDENDKLIREVKVITLKSKLVSDFRKDFQFYKVREINNYHHAHDAYLNAVVGTALIKKYPKLESEFVYGDYKVYDVRKMIAKSEQEIGKATAKYFFYSNIMNFFKTEITLANGEIRKRPLIETNGETGEIVWDKGRDFATVRKVLSMPQVNIVKKTEVQTGGFSKESILPKRNSDKLIARKKDWDPKKYGGFDSPTVAYSVLVVAKVEKGKSKKLKSVKELLGITIMERSSFEKNPIDFLEAKGYKEVKKDLIIKLPKYSLFELENGRKRMLASAGELQKGNELALPSKYVNFLYLASHYEKLKGSPEDNEQKQLFVEQHKHYLDEIIEQISEFSKRVILADANLDKVLSAYNKHRDKPIREQAENIIHLFTLTNLGAPAAFKYFDTTIDRKRYTSTKEVLDATLIHQSITGLYETRIDLSQLGGDGGGGSEAAAKPAPGGLLGRDLLTKLKAQIQFSTEGPQVTWEDRPAMCLVLNLEEEYRLHEKPVPPSIDPSWLQLFPMVWAEKAGMGLANQVPPVVVELKSDASPVAVRQYPMSKEAREGIRPHIQRFLDLGILVPCQSPWNTPLLPVKKPGTNDYRPVQDLREVNKRVQDIHPTVPNPYNLLSSLPPSHTWYSVLDLKDAFFCLKLHPNSQPLFAFEWRDPEKGNTGQLTWTRLPQGFKNSPTLFNEALHRDLASFRALNPQVVMLQYVDDLLVAAPTYRDCKEGTRRLLQELSKLGYRVSAKKAQLCREEVTYLGYLLKGGKRWLTPARKATVMKIPTPTTPRQVREFLGKAGFCRLFIPGFASLAAPLYPLTRPKVPFTWTEAHQEAFGRIKEALLSAPALALPDLTKPFALYVDEKEGVARGVLTQTLGPWRRPVAYLSKKLDPVASGWPTCLKAIAAVALLLKDADKLTLGQNVLVIAPHNLESIVRQPPDRWMTNARMTHYQSLLLNERVSFAPPAILNPATLLPVESDDTPIHICSEILAEETGTRPDLRDQPLPGVPAWYTDGSSFIMDGRRQAGAAIVDNKRTVWASNLPEGTSAQKAELIALTQALRLAEGKSINIYTDSRYAFATAHVHGAIYKQRGWLTSAGKDIKNKEEILALLEAIHLPKRVAIIHCPGHQRGTDPVATGNRKADEAAKQAAQSTRILTETTKNAGKRTADGSEFEKRTADGSEFESPKKKAKVE

SEQ ID NO: 1705 - protein, 2121 aa, synthetic construct
MPAAKRVKLDGGDKKYSIGLDIGTNSVGWAVITDEYKVPSKKFKVLGNTDRHSIKKNLIGALLFDSGETAEATRLKRTARRRYTRRKNRICYLQEIFSNEMAKVDDSFFHRLEESFLVEEDKKHERHPIFGNIVDEVAYHEKYPTIYHLRKKLVDSTDKADLRLIYLALAHMIKFRGHFLIEGDLNPDNSDVDKLFIQLVQTYNQLFEENPINASGVDAKAILSARLSKSRRLENLIAQLPGEKKNGLFGNLIALSLGLTPNFKSNFDLAEDAKLQLSKDTYDDDLDNLLAQIGDQYADLFLAAKNLSDAILLSDILRVNTEITKAPLSASMIKRYDEHHQDLTLLKALVRQQLPEKYKEIFFDQSKNGYAGYIDGGASQEEFYKFIKPILEKMDGTEELLVKLNREDLLRKQRTFDNGSIPHQIHLGELHAILRRQEDFYPFLKDNREKIEKILTFRIPYYVGPLARGNSRFAWMTRKSEETITPWNFEEVVDKGASAQSFIERMTNFDKNLPNEKVLPKHSLLYEYFTVYNELTKVKYVTEGMRKPAFLSGEQKKAIVDLLFKTNRKVTVKQLKEDYFKKIECFDSVEISGVEDRFNASLGTYHDLLKIIKDKDFLDNEENEDILEDIVLTLTLFEDREMIEERLKTYAHLFDDKVMKQLKRRRYTGWGRLSRKLINGIRDKQSGKTILDFLKSDGFANRNFMQLIHDDSLTFKEDIQKAQVSGQGDSLHEHIANLAGSPAIKKGILQTVKVVDELVKVMGRHKPENIVIEMARENQTTQKGQKNSRERMKRIEEGIKELGSQILKEHPVENTQLQNEKLYLYYLQNGRDMYVDQELDINRLSDYDVDHIVPQSFLKDDSIDNKVLTRSDKARGKSDNVPSEEVVKKMKNYWRQLLNAKLITQRKFDNLTKAERGGLSELDKAGFIKRQLVETRQITKHVAQILDSRMNTKYDENDKLIREVKVITLKSKLVSDFRKDFQFYKVREINNYHHAHDAYLNAVVGTALIKKYPKLESEFVYGDYKVYDVRKMIAKSEQEIGKATAKYFFYSNIMNFFKTEITLANGEIRKRPLIETNGETGEIVWDKGRDFATVRKVLSMPQVNIVKKTEVQTGGFSKESILPKRNSDKLIARKKDWDPKKYGGFDSPTVAYSVLVVAKVEKGKSKKLKSVKELLGITIMERSSFEKNPIDFLEAKGYKEVKKDLIIKLPKYSLFELENGRKRMLASAGELQKGNELALPSKYVNFLYLASHYEKLKGSPEDNEQKQLFVEQHKHYLDEIIEQISEFSKRVILADANLDKVLSAYNKHRDKPIREQAENIIHLFTLTNLGAPAAFKYFDTTIDRKRYTSTKEVLDATLIHQSITGLYETRIDLSQLGGDGGGGGGSGGLLGRDLLTKLKAQIQFSTEGPQVTWEDRPAMCLVLNLEEEYRLHEKPVPPSIDPSWLQLFPMVWAEKAGMGLANQVPPVVVELKSDASPVAVRQYPMSKEAREGIRPHIQRFLDLGILVPCQSPWNTPLLPVKKPGTNDYRPVQDLREVNKRVQDIHPTVPNPYNLLSSLPPSHTWYSVLDLKDAFFCLKLHPNSQPLFAFEWRDPEKGNTGQLTWTRLPQGFKNSPTLFNEALHRDLASFRALNPQVVMLQYVDDLLVAAPTYRDCKEGTRRLLQELSKLGYRVSAKKAQLCREEVTYLGYLLKGGKRWLTPARKATVMKIPTPTTPRQVREFLGKAGFCRLFIPGFASLAAPLYPLTRPKVPFTWTEAHQEAFGRIKEALLSAPALALPDLTKPFALYVDEKEGVARGVLTQTLGPWRRPVAYLSKKLDPVASGWPTCLKAIAAVALLLKDADKLTLGQNVLVIAPHNLESIVRQPPDRWMTNARMTHYQSLLLNERVSFAPPAILNPATLLPVESDDTPIHICSEILAEETGTRPDLRDQPLPGVPAWYTDGSSFIMDGRRQAGAAIVDNKRTVWASNLPEGTSAQKAELIALTQALRLAEGKSINIYTDSRYAFATAHVHGAIYKQRGWLTSAGKDIKNKEEILALLEAIHLPKRVAIIHCPGHQRGTDPVATGNRKADEAAKQAAQSTRILTETTKNAGKRTADGSEFEKRTADGSEFESPKKKAKVE

SEQ ID NO: 1706 - protein, 2146 aa, synthetic construct
MPAAKRVKLDGGDKKYSIGLDIGTNSVGWAVITDEYKVPSKKFKVLGNTDRHSIKKNLIGALLFDSGETAEATRLKRTARRRYTRRKNRICYLQEIFSNEMAKVDDSFFHRLEESFLVEEDKKHERHPIFGNIVDEVAYHEKYPTIYHLRKKLVDSTDKADLRLIYLALAHMIKFRGHFLIEGDLNPDNSDVDKLFIQLVQTYNQLFEENPINASGVDAKAILSARLSKSRRLENLIAQLPGEKKNGLFGNLIALSLGLTPNFKSNFDLAEDAKLQLSKDTYDDDLDNLLAQIGDQYADLFLAAKNLSDAILLSDILRVNTEITKAPLSASMIKRYDEHHQDLTLLKALVRQQLPEKYKEIFFDQSKNGYAGYIDGGASQEEFYKFIKPILEKMDGTEELLVKLNREDLLRKQRTFDNGSIPHQIHLGELHAILRRQEDFYPFLKDNREKIEKILTFRIPYYVGPLARGNSRFAWMTRKSEETITPWNFEEVVDKGASAQSFIERMTNFDKNLPNEKVLPKHSLLYEYFTVYNELTKVKYVTEGMRKPAFLSGEQKKAIVDLLFKTNRKVTVKQLKEDYFKKIECFDSVEISGVEDRFNASLGTYHDLLKIIKDKDFLDNEENEDILEDIVLTLTLFEDREMIEERLKTYAHLFDDKVMKQLKRRRYTGWGRLSRKLINGIRDKQSGKTILDFLKSDGFANRNFMQLIHDDSLTFKEDIQKAQVSGQGDSLHEHIANLAGSPAIKKGILQTVKVVDELVKVMGRHKPENIVIEMARENQTTQKGQKNSRERMKRIEEGIKELGSQILKEHPVENTQLQNEKLYLYYLQNGRDMYVDQELDINRLSDYDVDHIVPQSFLKDDSIDNKVLTRSDKARGKSDNVPSEEVVKKMKNYWRQLLNAKLITQRKFDNLTKAERGGLSELDKAGFIKRQLVETRQITKHVAQILDSRMNTKYDENDKLIREVKVITLKSKLVSDFRKDFQFYKVREINNYHHAHDAYLNAVVGTALIKKYPKLESEFVYGDYKVYDVRKMIAKSEQEIGKATAKYFFYSNIMNFFKTEITLANGEIRKRPLIETNGETGEIVWDKGRDFATVRKVLSMPQVNIVKKTEVQTGGFSKESILPKRNSDKLIARKKDWDPKKYGGFDSPTVAYSVLVVAKVEKGKSKKLKSVKELLGITIMERSSFEKNPIDFLEAKGYKEVKKDLIIKLPKYSLFELENGRKRMLASAGELQKGNELALPSKYVNFLYLASHYEKLKGSPEDNEQKQLFVEQHKHYLDEIIEQISEFSKRVILADANLDKVLSAYNKHRDKPIREQAENIIHLFTLTNLGAPAAFKYFDTTIDRKRYTSTKEVLDATLIHQSITGLYETRIDLSQLGGDGGEAAAKEAAAKEAAAKEAAAKEAAAKEAAAKGGLLGRDLLTKLKAQIQFSTEGPQVTWEDRPAMCLVLNLEEEYRLHEKPVPPSIDPSWLQLFPMVWAEKAGMGLANQVPPVVVELKSDASPVAVRQYPMSKEAREGIRPHIQRFLDLGILVPCQSPWNTPLLPVKKPGTNDYRPVQDLREVNKRVQDIHPTVPNPYNLLSSLPPSHTWYSVLDLKDAFFCLKLHPNSQPLFAFEWRDPEKGNTGQLTWTRLPQGFKNSPTLFNEALHRDLASFRALNPQVVMLQYVDDLLVAAPTYRDCKEGTRRLLQELSKLGYRVSAKKAQLCREEVTYLGYLLKGGKRWLTPARKATVMKIPTPTTPRQVREFLGKAGFCRLFIPGFASLAAPLYPLTRPKVPFTWTEAHQEAFGRIKEALLSAPALALPDLTKPFALYVDEKEGVARGVLTQTLGPWRRPVAYLSKKLDPVASGWPTCLKAIAAVALLLKDADKLTLGQNVLVIAPHNLESIVRQPPDRWMTNARMTHYQSLLLNERVSFAPPAILNPATLLPVESDDTPIHICSEILAEETGTRPDLRDQPLPGVPAWYTDGSSFIMDGRRQAGAAIVDNKRTVWASNLPEGTSAQKAELIALTQALRLAEGKSINIYTDSRYAFATAHVHGAIYKQRGWLTSAGKDIKNKEEILALLEAIHLPKRVAIIHCPGHQRGTDPVATGNRKADEAAKQAAQSTRILTETTKNAGKRTADGSEFEKRTADGSEFESPKKKAKVE

SEQ ID NO: 1707 - protein, 2122 aa, synthetic construct
MPAAKRVKLDGGDKKYSIGLDIGTNSVGWAVITDEYKVPSKKFKVLGNTDRHSIKKNLIGALLFDSGETAEATRLKRTARRRYTRRKNRICYLQEIFSNEMAKVDDSFFHRLEESFLVEEDKKHERHPIFGNIVDEVAYHEKYPTIYHLRKKLVDSTDKADLRLIYLALAHMIKFRGHFLIEGDLNPDNSDVDKLFIQLVQTYNQLFEENPINASGVDAKAILSARLSKSRRLENLIAQLPGEKKNGLFGNLIALSLGLTPNFKSNFDLAEDAKLQLSKDTYDDDLDNLLAQIGDQYADLFLAAKNLSDAILLSDILRVNTEITKAPLSASMIKRYDEHHQDLTLLKALVRQQLPEKYKEIFFDQSKNGYAGYIDGGASQEEFYKFIKPILEKMDGTEELLVKLNREDLLRKQRTFDNGSIPHQIHLGELHAILRRQEDFYPFLKDNREKIEKILTFRIPYYVGPLARGNSRFAWMTRKSEETITPWNFEEVVDKGASAQSFIERMTNFDKNLPNEKVLPKHSLLYEYFTVYNELTKVKYVTEGMRKPAFLSGEQKKAIVDLLFKTNRKVTVKQLKEDYFKKIECFDSVEISGVEDRFNASLGTYHDLLKIIKDKDFLDNEENEDILEDIVLTLTLFEDREMIEERLKTYAHLFDDKVMKQLKRRRYTGWGRLSRKLINGIRDKQSGKTILDFLKSDGFANRNFMQLIHDDSLTFKEDIQKAQVSGQGDSLHEHIANLAGSPAIKKGILQTVKVVDELVKVMGRHKPENIVIEMARENQTTQKGQKNSRERMKRIEEGIKELGSQILKEHPVENTQLQNEKLYLYYLQNGRDMYVDQELDINRLSDYDVDHIVPQSFLKDDSIDNKVLTRSDKARGKSDNVPSEEVVKKMKNYWRQLLNAKLITQRKFDNLTKAERGGLSELDKAGFIKRQLVETRQITKHVAQILDSRMNTKYDENDKLIREVKVITLKSKLVSDFRKDFQFYKVREINNYHHAHDAYLNAVVGTALIKKYPKLESEFVYGDYKVYDVRKMIAKSEQEIGKATAKYFFYSNIMNFFKTEITLANGEIRKRPLIETNGETGEIVWDKGRDFATVRKVLSMPQVNIVKKTEVQTGGFSKESILPKRNSDKLIARKKDWDPKKYGGFDSPTVAYSVLVVAKVEKGKSKKLKSVKELLGITIMERSSFEKNPIDFLEAKGYKEVKKDLIIKLPKYSLFELENGRKRMLASAGELQKGNELALPSKYVNFLYLASHYEKLKGSPEDNEQKQLFVEQHKHYLDEIIEQISEFSKRVILADANLDKVLSAYNKHRDKPIREQAENIIHLFTLTNLGAPAAFKYFDTTIDRKRYTSTKEVLDATLIHQSITGLYETRIDLSQLGGDGGGGGGGGGGLLGRDLLTKLKAQIQFSTEGPQVTWEDRPAMCLVLNLEEEYRLHEKPVPPSIDPSWLQLFPMVWAEKAGMGLANQVPPVVVELKSDASPVAVRQYPMSKEAREGIRPHIQRFLDLGILVPCQSPWNTPLLPVKKPGTNDYRPVQDLREVNKRVQDIHPTVPNPYNLLSSLPPSHTWYSVLDLKDAFFCLKLHPNSQPLFAFEWRDPEKGNTGQLTWTRLPQGFKNSPTLFNEALHRDLASFRALNPQVVMLQYVDDLLVAAPTYRDCKEGTRRLLQELSKLGYRVSAKKAQLCREEVTYLGYLLKGGKRWLTPARKATVMKIPTPTTPRQVREFLGKAGFCRLFIPGFASLAAPLYPLTRPKVPFTWTEAHQEAFGRIKEALLSAPALALPDLTKPFALYVDEKEGVARGVLTQTLGPWRRPVAYLSKKLDPVASGWPTCLKAIAAVALLLKDADKLTLGQNVLVIAPHNLESIVRQPPDRWMTNARMTHYQSLLLNERVSFAPPAILNPATLLPVESDDTPIHICSEILAEETGTRPDLRDQPLPGVPAWYTDGSSFIMDGRRQAGAAIVDNKRTVWASNLPEGTSAQKAELIALTQALRLAEGKSINIYTDSRYAFATAHVHGAIYKQRGWLTSAGKDIKNKEEILALLEAIHLPKRVAIIHCPGHQRGTDPVATGNRKADEAAKQAAQSTRILTETTKNAGKRTADGSEFEKRTADGSEFESPKKKAKVE

SEQ ID NO: 1708 - protein, 2127 aa, synthetic construct
MPAAKRVKLDGGDKKYSIGLDIGTNSVGWAVITDEYKVPSKKFKVLGNTDRHSIKKNLIGALLFDSGETAEATRLKRTARRRYTRRKNRICYLQEIFSNEMAKVDDSFFHRLEESFLVEEDKKHERHPIFGNIVDEVAYHEKYPTIYHLRKKLVDSTDKADLRLIYLALAHMIKFRGHFLIEGDLNPDNSDVDKLFIQLVQTYNQLFEENPINASGVDAKAILSARLSKSRRLENLIAQLPGEKKNGLFGNLIALSLGLTPNFKSNFDLAEDAKLQLSKDTYDDDLDNLLAQIGDQYADLFLAAKNLSDAILLSDILRVNTEITKAPLSASMIKRYDEHHQDLTLLKALVRQQLPEKYKEIFFDQSKNGYAGYIDGGASQEEFYKFIKPILEKMDGTEELLVKLNREDLLRKQRTFDNGSIPHQIHLGELHAILRRQEDFYPFLKDNREKIEKILTFRIPYYVGPLARGNSRFAWMTRKSEETITPWNFEEVVDKGASAQSFIERMTNFDKNLPNEKVLPKHSLLYEYFTVYNELTKVKYVTEGMRKPAFLSGEQKKAIVDLLFKTNRKVTVKQLKEDYFKKIECFDSVEISGVEDRFNASLGTYHDLLKIIKDKDFLDNEENEDILEDIVLTLTLFEDREMIEERLKTYAHLFDDKVMKQLKRRRYTGWGRLSRKLINGIRDKQSGKTILDFLKSDGFANRNFMQLIHDDSLTFKEDIQKAQVSGQGDSLHEHIANLAGSPAIKKGILQTVKVVDELVKVMGRHKPENIVIEMARENQTTQKGQKNSRERMKRIEEGIKELGSQILKEHPVENTQLQNEKLYLYYLQNGRDMYVDQELDINRLSDYDVDHIVPQSFLKDDSIDNKVLTRSDKARGKSDNVPSEEVVKKMKNYWRQLLNAKLITQRKFDNLTKAERGGLSELDKAGFIKRQLVETRQITKHVAQILDSRMNTKYDENDKLIREVKVITLKSKLVSDFRKDFQFYKVREINNYHHAHDAYLNAVVGTALIKKYPKLESEFVYGDYKVYDVRKMIAKSEQEIGKATAKYFFYSNIMNFFKTEITLANGEIRKRPLIETNGETGEIVWDKGRDFATVRKVLSMPQVNIVKKTEVQTGGFSKESILPKRNSDKLIARKKDWDPKKYGGFDSPTVAYSVLVVAKVEKGKSKKLKSVKELLGITIMERSSFEKNPIDFLEAKGYKEVKKDLIIKLPKYSLFELENGRKRMLASAGELQKGNELALPSKYVNFLYLASHYEKLKGSPEDNEQKQLFVEQHKHYLDEIIEQISEFSKRVILADANLDKVLSAYNKHRDKPIREQAENIIHLFTLTNLGAPAAFKYFDTTIDRKRYTSTKEVLDATLIHQSITGLYETRIDLSQLGGDGGGSSGGGEAAAKGGLLGRDLLTKLKAQIQFSTEGPQVTWEDRPAMCLVLNLEEEYRLHEKPVPPSIDPSWLQLFPMVWAEKAGMGLANQVPPVVVELKSDASPVAVRQYPMSKEAREGIRPHIQRFLDLGILVPCQSPWNTPLLPVKKPGTNDYRPVQDLREVNKRVQDIHPTVPNPYNLLSSLPPSHTWYSVLDLKDAFFCLKLHPNSQPLFAFEWRDPEKGNTGQLTWTRLPQGFKNSPTLFNEALHRDLASFRALNPQVVMLQYVDDLLVAAPTYRDCKEGTRRLLQELSKLGYRVSAKKAQLCREEVTYLGYLLKGGKRWLTPARKATVMKIPTPTTPRQVREFLGKAGFCRLFIPGFASLAAPLYPLTRPKVPFTWTEAHQEAFGRIKEALLSAPALALPDLTKPFALYVDEKEGVARGVLTQTLGPWRRPVAYLSKKLDPVASGWPTCLKAIAAVALLLKDADKLTLGQNVLVIAPHNLESIVRQPPDRWMTNARMTHYQSLLLNERVSFAPPAILNPATLLPVESDDTPIHICSEILAEETGTRPDLRDQPLPGVPAWYTDGSSFIMDGRRQAGAAIVDNKRTVWASNLPEGTSAQKAELIALTQALRLAEGKSINIYTDSRYAFATAHVHGAIYKQRGWLTSAGKDIKNKEEILALLEAIHLPKRVAIIHCPGHQRGTDPVATGNRKADEAAKQAAQSTRILTETTKNAGKRTADGSEFEKRTADGSEFESPKKKAKVE

SEQ ID NO: 1709 - protein, 2124 aa, synthetic construct
MPAAKRVKLDGGDKKYSIGLDIGTNSVGWAVITDEYKVPSKKFKVLGNTDRHSIKKNLIGALLFDSGETAEATRLKRTARRRYTRRKNRICYLQEIFSNEMAKVDDSFFHRLEESFLVEEDKKHERHPIFGNIVDEVAYHEKYPTIYHLRKKLVDSTDKADLRLIYLALAHMIKFRGHFLIEGDLNPDNSDVDKLFIQLVQTYNQLFEENPINASGVDAKAILSARLSKSRRLENLIAQLPGEKKNGLFGNLIALSLGLTPNFKSNFDLAEDAKLQLSKDTYDDDLDNLLAQIGDQYADLFLAAKNLSDAILLSDILRVNTEITKAPLSASMIKRYDEHHQDLTLLKALVRQQLPEKYKEIFFDQSKNGYAGYIDGGASQEEFYKFIKPILEKMDGTEELLVKLNREDLLRKQRTFDNGSIPHQIHLGELHAILRRQEDFYPFLKDNREKIEKILTFRIPYYVGPLARGNSRFAWMTRKSEETITPWNFEEVVDKGASAQSFIERMTNFDKNLPNEKVLPKHSLLYEYFTVYNELTKVKYVTEGMRKPAFLSGEQKKAIVDLLFKTNRKVTVKQLKEDYFKKIECFDSVEISGVEDRFNASLGTYHDLLKIIKDKDFLDNEENEDILEDIVLTLTLFEDREMIEERLKTYAHLFDDKVMKQLKRRRYTGWGRLSRKLINGIRDKQSGKTILDFLKSDGFANRNFMQLIHDDSLTFKEDIQKAQVSGQGDSLHEHIANLAGSPAIKKGILQTVKVVDELVKVMGRHKPENIVIEMARENQTTQKGQKNSRERMKRIEEGIKELGSQILKEHPVENTQLQNEKLYLYYLQNGRDMYVDQELDINRLSDYDVDHIVPQSFLKDDSIDNKVLTRSDKARGKSDNVPSEEVVKKMKNYWRQLLNAKLITQRKFDNLTKAERGGLSELDKAGFIKRQLVETRQITKHVAQILDSRMNTKYDENDKLIREVKVITLKSKLVSDFRKDFQFYKVREINNYHHAHDAYLNAVVGTALIKKYPKLESEFVYGDYKVYDVRKMIAKSEQEIGKATAKYFFYSNIMNFFKTEITLANGEIRKRPLIETNGETGEIVWDKGRDFATVRKVLSMPQVNIVKKTEVQTGGFSKESILPKRNSDKLIARKKDWDPKKYGGFDSPTVAYSVLVVAKVEKGKSKKLKSVKELLGITIMERSSFEKNPIDFLEAKGYKEVKKDLIIKLPKYSLFELENGRKRMLASAGELQKGNELALPSKYVNFLYLASHYEKLKGSPEDNEQKQLFVEQHKHYLDEIIEQISEFSKRVILADANLDKVLSAYNKHRDKPIREQAENIIHLFTLTNLGAPAAFKYFDTTIDRKRYTSTKEVLDATLIHQSITGLYETRIDLSQLGGDGGGSSEAAAKGGLLGRDLLTKLKAQIQFSTEGPQVTWEDRPAMCLVLNLEEEYRLHEKPVPPSIDPSWLQLFPMVWAEKAGMGLANQVPPVVVELKSDASPVAVRQYPMSKEAREGIRPHIQRFLDLGILVPCQSPWNTPLLPVKKPGTNDYRPVQDLREVNKRVQDIHPTVPNPYNLLSSLPPSHTWYSVLDLKDAFFCLKLHPNSQPLFAFEWRDPEKGNTGQLTWTRLPQGFKNSPTLFNEALHRDLASFRALNPQVVMLQYVDDLLVAAPTYRDCKEGTRRLLQELSKLGYRVSAKKAQLCREEVTYLGYLLKGGKRWLTPARKATVMKIPTPTTPRQVREFLGKAGFCRLFIPGFASLAAPLYPLTRPKVPFTWTEAHQEAFGRIKEALLSAPALALPDLTKPFALYVDEKEGVARGVLTQTLGPWRRPVAYLSKKLDPVASGWPTCLKAIAAVALLLKDADKLTLGQNVLVIAPHNLESIVRQPPDRWMTNARMTHYQSLLLNERVSFAPPAILNPATLLPVESDDTPIHICSEILAEETGTRPDLRDQPLPGVPAWYTDGSSFIMDGRRQAGAAIVDNKRTVWASNLPEGTSAQKAELIALTQALRLAEGKSINIYTDSRYAFATAHVHGAIYKQRGWLTSAGKDIKNKEEILALLEAIHLPKRVAIIHCPGHQRGTDPVATGNRKADEAAKQAAQSTRILTETTKNAGKRTADGSEFEKRTADGSEFESPKKKAKVE

SEQ ID NO: 1710 - protein, 2125 aa, synthetic construct
MPAAKRVKLDGGDKKYSIGLDIGTNSVGWAVITDEYKVPSKKFKVLGNTDRHSIKKNLIGALLFDSGETAEATRLKRTARRRYTRRKNRICYLQEIFSNEMAKVDDSFFHRLEESFLVEEDKKHERHPIFGNIVDEVAYHEKYPTIYHLRKKLVDSTDKADLRLIYLALAHMIKFRGHFLIEGDLNPDNSDVDKLFIQLVQTYNQLFEENPINASGVDAKAILSARLSKSRRLENLIAQLPGEKKNGLFGNLIALSLGLTPNFKSNFDLAEDAKLQLSKDTYDDDLDNLLAQIGDQYADLFLAAKNLSDAILLSDILRVNTEITKAPLSASMIKRYDEHHQDLTLLKALVRQQLPEKYKEIFFDQSKNGYAGYIDGGASQEEFYKFIKPILEKMDGTEELLVKLNREDLLRKQRTFDNGSIPHQIHLGELHAILRRQEDFYPFLKDNREKIEKILTFRIPYYVGPLARGNSRFAWMTRKSEETITPWNFEEVVDKGASAQSFIERMTNFDKNLPNEKVLPKHSLLYEYFTVYNELTKVKYVTEGMRKPAFLSGEQKKAIVDLLFKTNRKVTVKQLKEDYFKKIECFDSVEISGVEDRFNASLGTYHDLLKIIKDKDFLDNEENEDILEDIVLTLTLFEDREMIEERLKTYAHLFDDKVMKQLKRRRYTGWGRLSRKLINGIRDKQSGKTILDFLKSDGFANRNFMQLIHDDSLTFKEDIQKAQVSGQGDSLHEHIANLAGSPAIKKGILQTVKVVDELVKVMGRHKPENIVIEMARENQTTQKGQKNSRERMKRIEEGIKELGSQILKEHPVENTQLQNEKLYLYYLQNGRDMYVDQELDINRLSDYDVDHIVPQSFLKDDSIDNKVLTRSDKARGKSDNVPSEEVVKKMKNYWRQLLNAKLITQRKFDNLTKAERGGLSELDKAGFIKRQLVETRQITKHVAQILDSRMNTKYDENDKLIREVKVITLKSKLVSDFRKDFQFYKVREINNYHHAHDAYLNAVVGTALIKKYPKLESEFVYGDYKVYDVRKMIAKSEQEIGKATAKYFFYSNIMNFFKTEITLANGEIRKRPLIETNGETGEIVWDKGRDFATVRKVLSMPQVNIVKKTEVQTGGFSKESILPKRNSDKLIARKKDWDPKKYGGFDSPTVAYSVLVVAKVEKGKSKKLKSVKELLGITIMERSSFEKNPIDFLEAKGYKEVKKDLIIKLPKYSLFELENGRKRMLASAGELQKGNELALPSKYVNFLYLASHYEKLKGSPEDNEQKQLFVEQHKHYLDEIIEQISEFSKRVILADANLDKVLSAYNKHRDKPIREQAENIIHLFTLTNLGAPAAFKYFDTTIDRKRYTSTKEVLDATLIHQSITGLYETRIDLSQLGGDGGGGGPAPGGSGGLLGRDLLTKLKAQIQFSTEGPQVTWEDRPAMCLVLNLEEEYRLHEKPVPPSIDPSWLQLFPMVWAEKAGMGLANQVPPVVVELKSDASPVAVRQYPMSKEAREGIRPHIQRFLDLGILVPCQSPWNTPLLPVKKPGTNDYRPVQDLREVNKRVQDIHPTVPNPYNLLSSLPPSHTWYSVLDLKDAFFCLKLHPNSQPLFAFEWRDPEKGNTGQLTWTRLPQGFKNSPTLFNEALHRDLASFRALNPQVVMLQYVDDLLVAAPTYRDCKEGTRRLLQELSKLGYRVSAKKAQLCREEVTYLGYLLKGGKRWLTPARKATVMKIPTPTTPRQVREFLGKAGFCRLFIPGFASLAAPLYPLTRPKVPFTWTEAHQEAFGRIKEALLSAPALALPDLTKPFALYVDEKEGVARGVLTQTLGPWRRPVAYLSKKLDPVASGWPTCLKAIAAVALLLKDADKLTLGQNVLVIAPHNLESIVRQPPDRWMTNARMTHYQSLLLNERVSFAPPAILNPATLLPVESDDTPIHICSEILAEETGTRPDLRDQPLPGVPAWYTDGSSFIMDGRRQAGAAIVDNKRTVWASNLPEGTSAQKAELIALTQALRLAEGKSINIYTDSRYAFATAHVHGAIYKQRGWLTSAGKDIKNKEEILALLEAIHLPKRVAIIHCPGHQRGTDPVATGNRKADEAAKQAAQSTRILTETTKNAGKRTADGSEFEKRTADGSEFESPKKKAKVE

SEQ ID NO: 1711 - protein, 2127 aa, synthetic construct
MPAAKRVKLDGGDKKYSIGLDIGTNSVGWAVITDEYKVPSKKFKVLGNTDRHSIKKNLIGALLFDSGETAEATRLKRTARRRYTRRKNRICYLQEIFSNEMAKVDDSFFHRLEESFLVEEDKKHERHPIFGNIVDEVAYHEKYPTIYHLRKKLVDSTDKADLRLIYLALAHMIKFRGHFLIEGDLNPDNSDVDKLFIQLVQTYNQLFEENPINASGVDAKAILSARLSKSRRLENLIAQLPGEKKNGLFGNLIALSLGLTPNFKSNFDLAEDAKLQLSKDTYDDDLDNLLAQIGDQYADLFLAAKNLSDAILLSDILRVNTEITKAPLSASMIKRYDEHHQDLTLLKALVRQQLPEKYKEIFFDQSKNGYAGYIDGGASQEEFYKFIKPILEKMDGTEELLVKLNREDLLRKQRTFDNGSIPHQIHLGELHAILRRQEDFYPFLKDNREKIEKILTFRIPYYVGPLARGNSRFAWMTRKSEETITPWNFEEVVDKGASAQSFIERMTNFDKNLPNEKVLPKHSLLYEYFTVYNELTKVKYVTEGMRKPAFLSGEQKKAIVDLLFKTNRKVTVKQLKEDYFKKIECFDSVEISGVEDRFNASLGTYHDLLKIIKDKDFLDNEENEDILEDIVLTLTLFEDREMIEERLKTYAHLFDDKVMKQLKRRRYTGWGRLSRKLINGIRDKQSGKTILDFLKSDGFANRNFMQLIHDDSLTFKEDIQKAQVSGQGDSLHEHIANLAGSPAIKKGILQTVKVVDELVKVMGRHKPENIVIEMARENQTTQKGQKNSRERMKRIEEGIKELGSQILKEHPVENTQLQNEKLYLYYLQNGRDMYVDQELDINRLSDYDVDHIVPQSFLKDDSIDNKVLTRSDKARGKSDNVPSEEVVKKMKNYWRQLLNAKLITQRKFDNLTKAERGGLSELDKAGFIKRQLVETRQITKHVAQILDSRMNTKYDENDKLIREVKVITLKSKLVSDFRKDFQFYKVREINNYHHAHDAYLNAVVGTALIKKYPKLESEFVYGDYKVYDVRKMIAKSEQEIGKATAKYFFYSNIMNFFKTEITLANGEIRKRPLIETNGETGEIVWDKGRDFATVRKVLSMPQVNIVKKTEVQTGGFSKESILPKRNSDKLIARKKDWDPKKYGGFDSPTVAYSVLVVAKVEKGKSKKLKSVKELLGITIMERSSFEKNPIDFLEAKGYKEVKKDLIIKLPKYSLFELENGRKRMLASAGELQKGNELALPSKYVNFLYLASHYEKLKGSPEDNEQKQLFVEQHKHYLDEIIEQISEFSKRVILADANLDKVLSAYNKHRDKPIREQAENIIHLFTLTNLGAPAAFKYFDTTIDRKRYTSTKEVLDATLIHQSITGLYETRIDLSQLGGDGGGSSEAAAKPAPGGLLGRDLLTKLKAQIQFSTEGPQVTWEDRPAMCLVLNLEEEYRLHEKPVPPSIDPSWLQLFPMVWAEKAGMGLANQVPPVVVELKSDASPVAVRQYPMSKEAREGIRPHIQRFLDLGILVPCQSPWNTPLLPVKKPGTNDYRPVQDLREVNKRVQDIHPTVPNPYNLLSSLPPSHTWYSVLDLKDAFFCLKLHPNSQPLFAFEWRDPEKGNTGQLTWTRLPQGFKNSPTLFNEALHRDLASFRALNPQVVMLQYVDDLLVAAPTYRDCKEGTRRLLQELSKLGYRVSAKKAQLCREEVTYLGYLLKGGKRWLTPARKATVMKIPTPTTPRQVREFLGKAGFCRLFIPGFASLAAPLYPLTRPKVPFTWTEAHQEAFGRIKEALLSAPALALPDLTKPFALYVDEKEGVARGVLTQTLGPWRRPVAYLSKKLDPVASGWPTCLKAIAAVALLLKDADKLTLGQNVLVIAPHNLESIVRQPPDRWMTNARMTHYQSLLLNERVSFAPPAILNPATLLPVESDDTPIHICSEILAEETGTRPDLRDQPLPGVPAWYTDGSSFIMDGRRQAGAAIVDNKRTVWASNLPEGTSAQKAELIALTQALRLAEGKSINIYTDSRYAFATAHVHGAIYKQRGWLTSAGKDIKNKEEILALLEAIHLPKRVAIIHCPGHQRGTDPVATGNRKADEAAKQAAQSTRILTETTKNAGKRTADGSEFEKRTADGSEFESPKKKAKVE

SEQ ID NO: 1712 - protein, 2131 aa, synthetic construct
MPAAKRVKLDGGDKKYSIGLDIGTNSVGWAVITDEYKVPSKKFKVLGNTDRHSIKKNLIGALLFDSGETAEATRLKRTARRRYTRRKNRICYLQEIFSNEMAKVDDSFFHRLEESFLVEEDKKHERHPIFGNIVDEVAYHEKYPTIYHLRKKLVDSTDKADLRLIYLALAHMIKFRGHFLIEGDLNPDNSDVDKLFIQLVQTYNQLFEENPINASGVDAKAILSARLSKSRRLENLIAQLPGEKKNGLFGNLIALSLGLTPNFKSNFDLAEDAKLQLSKDTYDDDLDNLLAQIGDQYADLFLAAKNLSDAILLSDILRVNTEITKAPLSASMIKRYDEHHQDLTLLKALVRQQLPEKYKEIFFDQSKNGYAGYIDGGASQEEFYKFIKPILEKMDGTEELLVKLNREDLLRKQRTFDNGSIPHQIHLGELHAILRRQEDFYPFLKDNREKIEKILTFRIPYYVGPLARGNSRFAWMTRKSEETITPWNFEEVVDKGASAQSFIERMTNFDKNLPNEKVLPKHSLLYEYFTVYNELTKVKYVTEGMRKPAFLSGEQKKAIVDLLFKTNRKVTVKQLKEDYFKKIECFDSVEISGVEDRFNASLGTYHDLLKIIKDKDFLDNEENEDILEDIVLTLTLFEDREMIEERLKTYAHLFDDKVMKQLKRRRYTGWGRLSRKLINGIRDKQSGKTILDFLKSDGFANRNFMQLIHDDSLTFKEDIQKAQVSGQGDSLHEHIANLAGSPAIKKGILQTVKVVDELVKVMGRHKPENIVIEMARENQTTQKGQKNSRERMKRIEEGIKELGSQILKEHPVENTQLQNEKLYLYYLQNGRDMYVDQELDINRLSDYDVDHIVPQSFLKDDSIDNKVLTRSDKARGKSDNVPSEEVVKKMKNYWRQLLNAKLITQRKFDNLTKAERGGLSELDKAGFIKRQLVETRQITKHVAQILDSRMNTKYDENDKLIREVKVITLKSKLVSDFRKDFQFYKVREINNYHHAHDAYLNAVVGTALIKKYPKLESEFVYGDYKVYDVRKMIAKSEQEIGKATAKYFFYSNIMNFFKTEITLANGEIRKRPLIETNGETGEIVWDKGRDFATVRKVLSMPQVNIVKKTEVQTGGFSKESILPKRNSDKLIARKKDWDPKKYGGFDSPTVAYSVLVVAKVEKGKSKKLKSVKELLGITIMERSSFEKNPIDFLEAKGYKEVKKDLIIKLPKYSLFELENGRKRMLASAGELQKGNELALPSKYVNFLYLASHYEKLKGSPEDNEQKQLFVEQHKHYLDEIIEQISEFSKRVILADANLDKVLSAYNKHRDKPIREQAENIIHLFTLTNLGAPAAFKYFDTTIDRKRYTSTKEVLDATLIHQSITGLYETRIDLSQLGGDGGEAAAKGGGGSEAAAKGGLLGRDLLTKLKAQIQFSTEGPQVTWEDRPAMCLVLNLEEEYRLHEKPVPPSIDPSWLQLFPMVWAEKAGMGLANQVPPVVVELKSDASPVAVRQYPMSKEAREGIRPHIQRFLDLGILVPCQSPWNTPLLPVKKPGTNDYRPVQDLREVNKRVQDIHPTVPNPYNLLSSLPPSHTWYSVLDLKDAFFCLKLHPNSQPLFAFEWRDPEKGNTGQLTWTRLPQGFKNSPTLFNEALHRDLASFRALNPQVVMLQYVDDLLVAAPTYRDCKEGTRRLLQELSKLGYRVSAKKAQLCREEVTYLGYLLKGGKRWLTPARKATVMKIPTPTTPRQVREFLGKAGFCRLFIPGFASLAAPLYPLTRPKVPFTWTEAHQEAFGRIKEALLSAPALALPDLTKPFALYVDEKEGVARGVLTQTLGPWRRPVAYLSKKLDPVASGWPTCLKAIAAVALLLKDADKLTLGQNVLVIAPHNLESIVRQPPDRWMTNARMTHYQSLLLNERVSFAPPAILNPATLLPVESDDTPIHICSEILAEETGTRPDLRDQPLPGVPAWYTDGSSFIMDGRRQAGAAIVDNKRTVWASNLPEGTSAQKAELIALTQALRLAEGKSINIYTDSRYAFATAHVHGAIYKQRGWLTSAGKDIKNKEEILALLEAIHLPKRVAIIHCPGHQRGTDPVATGNRKADEAAKQAAQSTRILTETTKNAGKRTADGSEFEKRTADGSEFESPKKKAKVE

SEQ ID NO: 1713 - protein, 2127 aa, synthetic construct
MPAAKRVKLDGGDKKYSIGLDIGTNSVGWAVITDEYKVPSKKFKVLGNTDRHSIKKNLIGALLFDSGETAEATRLKRTARRRYTRRKNRICYLQEIFSNEMAKVDDSFFHRLEESFLVEEDKKHERHPIFGNIVDEVAYHEKYPTIYHLRKKLVDSTDKADLRLIYLALAHMIKFRGHFLIEGDLNPDNSDVDKLFIQLVQTYNQLFEENPINASGVDAKAILSARLSKSRRLENLIAQLPGEKKNGLFGNLIALSLGLTPNFKSNFDLAEDAKLQLSKDTYDDDLDNLLAQIGDQYADLFLAAKNLSDAILLSDILRVNTEITKAPLSASMIKRYDEHHQDLTLLKALVRQQLPEKYKEIFFDQSKNGYAGYIDGGASQEEFYKFIKPILEKMDGTEELLVKLNREDLLRKQRTFDNGSIPHQIHLGELHAILRRQEDFYPFLKDNREKIEKILTFRIPYYVGPLARGNSRFAWMTRKSEETITPWNFEEVVDKGASAQSFIERMTNFDKNLPNEKVLPKHSLLYEYFTVYNELTKVKYVTEGMRKPAFLSGEQKKAIVDLLFKTNRKVTVKQLKEDYFKKIECFDSVEISGVEDRFNASLGTYHDLLKIIKDKDFLDNEENEDILEDIVLTLTLFEDREMIEERLKTYAHLFDDKVMKQLKRRRYTGWGRLSRKLINGIRDKQSGKTILDFLKSDGFANRNFMQLIHDDSLTFKEDIQKAQVSGQGDSLHEHIANLAGSPAIKKGILQTVKVVDELVKVMGRHKPENIVIEMARENQTTQKGQKNSRERMKRIEEGIKELGSQILKEHPVENTQLQNEKLYLYYLQNGRDMYVDQELDINRLSDYDVDHIVPQSFLKDDSIDNKVLTRSDKARGKSDNVPSEEVVKKMKNYWRQLLNAKLITQRKFDNLTKAERGGLSELDKAGFIKRQLVETRQITKHVAQILDSRMNTKYDENDKLIREVKVITLKSKLVSDFRKDFQFYKVREINNYHHAHDAYLNAVVGTALIKKYPKLESEFVYGDYKVYDVRKMIAKSEQEIGKATAKYFFYSNIMNFFKTEITLANGEIRKRPLIETNGETGEIVWDKGRDFATVRKVLSMPQVNIVKKTEVQTGGFSKESILPKRNSDKLIARKKDWDPKKYGGFDSPTVAYSVLVVAKVEKGKSKKLKSVKELLGITIMERSSFEKNPIDFLEAKGYKEVKKDLIIKLPKYSLFELENGRKRMLASAGELQKGNELALPSKYVNFLYLASHYEKLKGSPEDNEQKQLFVEQHKHYLDEIIEQISEFSKRVILADANLDKVLSAYNKHRDKPIREQAENIIHLFTLTNLGAPAAFKYFDTTIDRKRYTSTKEVLDATLIHQSITGLYETRIDLSQLGGDGGGSSGGSEAAAKGGLLGRDLLTKLKAQIQFSTEGPQVTWEDRPAMCLVLNLEEEYRLHEKPVPPSIDPSWLQLFPMVWAEKAGMGLANQVPPVVVELKSDASPVAVRQYPMSKEAREGIRPHIQRFLDLGILVPCQSPWNTPLLPVKKPGTNDYRPVQDLREVNKRVQDIHPTVPNPYNLLSSLPPSHTWYSVLDLKDAFFCLKLHPNSQPLFAFEWRDPEKGNTGQLTWTRLPQGFKNSPTLFNEALHRDLASFRALNPQVVMLQYVDDLLVAAPTYRDCKEGTRRLLQELSKLGYRVSAKKAQLCREEVTYLGYLLKGGKRWLTPARKATVMKIPTPTTPRQVREFLGKAGFCRLFIPGFASLAAPLYPLTRPKVPFTWTEAHQEAFGRIKEALLSAPALALPDLTKPFALYVDEKEGVARGVLTQTLGPWRRPVAYLSKKLDPVASGWPTCLKAIAAVALLLKDADKLTLGQNVLVIAPHNLESIVRQPPDRWMTNARMTHYQSLLLNERVSFAPPAILNPATLLPVESDDTPIHICSEILAEETGTRPDLRDQPLPGVPAWYTDGSSFIMDGRRQAGAAIVDNKRTVWASNLPEGTSAQKAELIALTQALRLAEGKSINIYTDSRYAFATAHVHGAIYKQRGWLTSAGKDIKNKEEILALLEAIHLPKRVAIIHCPGHQRGTDPVATGNRKADEAAKQAAQSTRILTETTKNAGKRTADGSEFEKRTADGSEFESPKKKAKVE

SEQ ID NO: 1714 - protein, 2125 aa, synthetic construct
MPAAKRVKLDGGDKKYSIGLDIGTNSVGWAVITDEYKVPSKKFKVLGNTDRHSIKKNLIGALLFDSGETAEATRLKRTARRRYTRRKNRICYLQEIFSNEMAKVDDSFFHRLEESFLVEEDKKHERHPIFGNIVDEVAYHEKYPTIYHLRKKLVDSTDKADLRLIYLALAHMIKFRGHFLIEGDLNPDNSDVDKLFIQLVQTYNQLFEENPINASGVDAKAILSARLSKSRRLENLIAQLPGEKKNGLFGNLIALSLGLTPNFKSNFDLAEDAKLQLSKDTYDDDLDNLLAQIGDQYADLFLAAKNLSDAILLSDILRVNTEITKAPLSASMIKRYDEHHQDLTLLKALVRQQLPEKYKEIFFDQSKNGYAGYIDGGASQEEFYKFIKPILEKMDGTEELLVKLNREDLLRKQRTFDNGSIPHQIHLGELHAILRRQEDFYPFLKDNREKIEKILTFRIPYYVGPLARGNSRFAWMTRKSEETITPWNFEEVVDKGASAQSFIERMTNFDKNLPNEKVLPKHSLLYEYFTVYNELTKVKYVTEGMRKPAFLSGEQKKAIVDLLFKTNRKVTVKQLKEDYFKKIECFDSVEISGVEDRFNASLGTYHDLLKIIKDKDFLDNEENEDILEDIVLTLTLFEDREMIEERLKTYAHLFDDKVMKQLKRRRYTGWGRLSRKLINGIRDKQSGKTILDFLKSDGFANRNFMQLIHDDSLTFKEDIQKAQVSGQGDSLHEHIANLAGSPAIKKGILQTVKVVDELVKVMGRHKPENIVIEMARENQTTQKGQKNSRERMKRIEEGIKELGSQILKEHPVENTQLQNEKLYLYYLQNGRDMYVDQELDINRLSDYDVDHIVPQSFLKDDSIDNKVLTRSDKARGKSDNVPSEEVVKKMKNYWRQLLNAKLITQRKFDNLTKAERGGLSELDKAGFIKRQLVETRQITKHVAQILDSRMNTKYDENDKLIREVKVITLKSKLVSDFRKDFQFYKVREINNYHHAHDAYLNAVVGTALIKKYPKLESEFVYGDYKVYDVRKMIAKSEQEIGKATAKYFFYSNIMNFFKTEITLANGEIRKRPLIETNGETGEIVWDKGRDFATVRKVLSMPQVNIVKKTEVQTGGFSKESILPKRNSDKLIARKKDWDPKKYGGFDSPTVAYSVLVVAKVEKGKSKKLKSVKELLGITIMERSSFEKNPIDFLEAKGYKEVKKDLIIKLPKYSLFELENGRKRMLASAGELQKGNELALPSKYVNFLYLASHYEKLKGSPEDNEQKQLFVEQHKHYLDEIIEQISEFSKRVILADANLDKVLSAYNKHRDKPIREQAENIIHLFTLTNLGAPAAFKYFDTTIDRKRYTSTKEVLDATLIHQSITGLYETRIDLSQLGGDGGGSSGSSGSSGGLLGRDLLTKLKAQIQFSTEGPQVTWEDRPAMCLVLNLEEEYRLHEKPVPPSIDPSWLQLFPMVWAEKAGMGLANQVPPVVVELKSDASPVAVRQYPMSKEAREGIRPHIQRFLDLGILVPCQSPWNTPLLPVKKPGTNDYRPVQDLREVNKRVQDIHPTVPNPYNLLSSLPPSHTWYSVLDLKDAFFCLKLHPNSQPLFAFEWRDPEKGNTGQLTWTRLPQGFKNSPTLFNEALHRDLASFRALNPQVVMLQYVDDLLVAAPTYRDCKEGTRRLLQELSKLGYRVSAKKAQLCREEVTYLGYLLKGGKRWLTPARKATVMKIPTPTTPRQVREFLGKAGFCRLFIPGFASLAAPLYPLTRPKVPFTWTEAHQEAFGRIKEALLSAPALALPDLTKPFALYVDEKEGVARGVLTQTLGPWRRPVAYLSKKLDPVASGWPTCLKAIAAVALLLKDADKLTLGQNVLVIAPHNLESIVRQPPDRWMTNARMTHYQSLLLNERVSFAPPAILNPATLLPVESDDTPIHICSEILAEETGTRPDLRDQPLPGVPAWYTDGSSFIMDGRRQAGAAIVDNKRTVWASNLPEGTSAQKAELIALTQALRLAEGKSINIYTDSRYAFATAHVHGAIYKQRGWLTSAGKDIKNKEEILALLEAIHLPKRVAIIHCPGHQRGTDPVATGNRKADEAAKQAAQSTRILTETTKNAGKRTADGSEFEKRTADGSEFESPKKKAKVE

SEQ ID NO: 1715 - protein, 2127 aa, synthetic construct
MPAAKRVKLDGGDKKYSIGLDIGTNSVGWAVITDEYKVPSKKFKVLGNTDRHSIKKNLIGALLFDSGETAEATRLKRTARRRYTRRKNRICYLQEIFSNEMAKVDDSFFHRLEESFLVEEDKKHERHPIFGNIVDEVAYHEKYPTIYHLRKKLVDSTDKADLRLIYLALAHMIKFRGHFLIEGDLNPDNSDVDKLFIQLVQTYNQLFEENPINASGVDAKAILSARLSKSRRLENLIAQLPGEKKNGLFGNLIALSLGLTPNFKSNFDLAEDAKLQLSKDTYDDDLDNLLAQIGDQYADLFLAAKNLSDAILLSDILRVNTEITKAPLSASMIKRYDEHHQDLTLLKALVRQQLPEKYKEIFFDQSKNGYAGYIDGGASQEEFYKFIKPILEKMDGTEELLVKLNREDLLRKQRTFDNGSIPHQIHLGELHAILRRQEDFYPFLKDNREKIEKILTFRIPYYVGPLARGNSRFAWMTRKSEETITPWNFEEVVDKGASAQSFIERMTNFDKNLPNEKVLPKHSLLYEYFTVYNELTKVKYVTEGMRKPAFLSGEQKKAIVDLLFKTNRKVTVKQLKEDYFKKIECFDSVEISGVEDRFNASLGTYHDLLKIIKDKDFLDNEENEDILEDIVLTLTLFEDREMIEERLKTYAHLFDDKVMKQLKRRRYTGWGRLSRKLINGIRDKQSGKTILDFLKSDGFANRNFMQLIHDDSLTFKEDIQKAQVSGQGDSLHEHIANLAGSPAIKKGILQTVKVVDELVKVMGRHKPENIVIEMARENQTTQKGQKNSRERMKRIEEGIKELGSQILKEHPVENTQLQNEKLYLYYLQNGRDMYVDQELDINRLSDYDVDHIVPQSFLKDDSIDNKVLTRSDKARGKSDNVPSEEVVKKMKNYWRQLLNAKLITQRKFDNLTKAERGGLSELDKAGFIKRQLVETRQITKHVAQILDSRMNTKYDENDKLIREVKVITLKSKLVSDFRKDFQFYKVREINNYHHAHDAYLNAVVGTALIKKYPKLESEFVYGDYKVYDVRKMIAKSEQEIGKATAKYFFYSNIMNFFKTEITLANGEIRKRPLIETNGETGEIVWDKGRDFATVRKVLSMPQVNIVKKTEVQTGGFSKESILPKRNSDKLIARKKDWDPKKYGGFDSPTVAYSVLVVAKVEKGKSKKLKSVKELLGITIMERSSFEKNPIDFLEAKGYKEVKKDLIIKLPKYSLFELENGRKRMLASAGELQKGNELALPSKYVNFLYLASHYEKLKGSPEDNEQKQLFVEQHKHYLDEIIEQISEFSKRVILADANLDKVLSAYNKHRDKPIREQAENIIHLFTLTNLGAPAAFKYFDTTIDRKRYTSTKEVLDATLIHQSITGLYETRIDLSQLGGDGGEAAAKGGSGSSGGLLGRDLLTKLKAQIQFSTEGPQVTWEDRPAMCLVLNLEEEYRLHEKPVPPSIDPSWLQLFPMVWAEKAGMGLANQVPPVVVELKSDASPVAVRQYPMSKEAREGIRPHIQRFLDLGILVPCQSPWNTPLLPVKKPGTNDYRPVQDLREVNKRVQDIHPTVPNPYNLLSSLPPSHTWYSVLDLKDAFFCLKLHPNSQPLFAFEWRDPEKGNTGQLTWTRLPQGFKNSPTLFNEALHRDLASFRALNPQVVMLQYVDDLLVAAPTYRDCKEGTRRLLQELSKLGYRVSAKKAQLCREEVTYLGYLLKGGKRWLTPARKATVMKIPTPTTPRQVREFLGKAGFCRLFIPGFASLAAPLYPLTRPKVPFTWTEAHQEAFGRIKEALLSAPALALPDLTKPFALYVDEKEGVARGVLTQTLGPWRRPVAYLSKKLDPVASGWPTCLKAIAAVALLLKDADKLTLGQNVLVIAPHNLESIVRQPPDRWMTNARMTHYQSLLLNERVSFAPPAILNPATLLPVESDDTPIHICSEILAEETGTRPDLRDQPLPGVPAWYTDGSSFIMDGRRQAGAAIVDNKRTVWASNLPEGTSAQKAELIALTQALRLAEGKSINIYTDSRYAFATAHVHGAIYKQRGWLTSAGKDIKNKEEILALLEAIHLPKRVAIIHCPGHQRGTDPVATGNRKADEAAKQAAQSTRILTETTKNAGKRTADGSEFEKRTADGSEFESPKKKAKVE

SEQ ID NO: 1716 - protein, 2127 aa, synthetic construct
MPAAKRVKLDGGDKKYSIGLDIGTNSVGWAVITDEYKVPSKKFKVLGNTDRHSIKKNLIGALLFDSGETAEATRLKRTARRRYTRRKNRICYLQEIFSNEMAKVDDSFFHRLEESFLVEEDKKHERHPIFGNIVDEVAYHEKYPTIYHLRKKLVDSTDKADLRLIYLALAHMIKFRGHFLIEGDLNPDNSDVDKLFIQLVQTYNQLFEENPINASGVDAKAILSARLSKSRRLENLIAQLPGEKKNGLFGNLIALSLGLTPNFKSNFDLAEDAKLQLSKDTYDDDLDNLLAQIGDQYADLFLAAKNLSDAILLSDILRVNTEITKAPLSASMIKRYDEHHQDLTLLKALVRQQLPEKYKEIFFDQSKNGYAGYIDGGASQEEFYKFIKPILEKMDGTEELLVKLNREDLLRKQRTFDNGSIPHQIHLGELHAILRRQEDFYPFLKDNREKIEKILTFRIPYYVGPLARGNSRFAWMTRKSEETITPWNFEEVVDKGASAQSFIERMTNFDKNLPNEKVLPKHSLLYEYFTVYNELTKVKYVTEGMRKPAFLSGEQKKAIVDLLFKTNRKVTVKQLKEDYFKKIECFDSVEISGVEDRFNASLGTYHDLLKIIKDKDFLDNEENEDILEDIVLTLTLFEDREMIEERLKTYAHLFDDKVMKQLKRRRYTGWGRLSRKLINGIRDKQSGKTILDFLKSDGFANRNFMQLIHDDSLTFKEDIQKAQVSGQGDSLHEHIANLAGSPAIKKGILQTVKVVDELVKVMGRHKPENIVIEMARENQTTQKGQKNSRERMKRIEEGIKELGSQILKEHPVENTQLQNEKLYLYYLQNGRDMYVDQELDINRLSDYDVDHIVPQSFLKDDSIDNKVLTRSDKARGKSDNVPSEEVVKKMKNYWRQLLNAKLITQRKFDNLTKAERGGLSELDKAGFIKRQLVETRQITKHVAQILDSRMNTKYDENDKLIREVKVITLKSKLVSDFRKDFQFYKVREINNYHHAHDAYLNAVVGTALIKKYPKLESEFVYGDYKVYDVRKMIAKSEQEIGKATAKYFFYSNIMNFFKTEITLANGEIRKRPLIETNGETGEIVWDKGRDFATVRKVLSMPQVNIVKKTEVQTGGFSKESILPKRNSDKLIARKKDWDPKKYGGFDSPTVAYSVLVVAKVEKGKSKKLKSVKELLGITIMERSSFEKNPIDFLEAKGYKEVKKDLIIKLPKYSLFELENGRKRMLASAGELQKGNELALPSKYVNFLYLASHYEKLKGSPEDNEQKQLFVEQHKHYLDEIIEQISEFSKRVILADANLDKVLSAYNKHRDKPIREQAENIIHLFTLTNLGAPAAFKYFDTTIDRKRYTSTKEVLDATLIHQSITGLYETRIDLSQLGGDGGGGSGSSEAAAKGGLLGRDLLTKLKAQIQFSTEGPQVTWEDRPAMCLVLNLEEEYRLHEKPVPPSIDPSWLQLFPMVWAEKAGMGLANQVPPVVVELKSDASPVAVRQYPMSKEAREGIRPHIQRFLDLGILVPCQSPWNTPLLPVKKPGTNDYRPVQDLREVNKRVQDIHPTVPNPYNLLSSLPPSHTWYSVLDLKDAFFCLKLHPNSQPLFAFEWRDPEKGNTGQLTWTRLPQGFKNSPTLFNEALHRDLASFRALNPQVVMLQYVDDLLVAAPTYRDCKEGTRRLLQELSKLGYRVSAKKAQLCREEVTYLGYLLKGGKRWLTPARKATVMKIPTPTTPRQVREFLGKAGFCRLFIPGFASLAAPLYPLTRPKVPFTWTEAHQEAFGRIKEALLSAPALALPDLTKPFALYVDEKEGVARGVLTQTLGPWRRPVAYLSKKLDPVASGWPTCLKAIAAVALLLKDADKLTLGQNVLVIAPHNLESIVRQPPDRWMTNARMTHYQSLLLNERVSFAPPAILNPATLLPVESDDTPIHICSEILAEETGTRPDLRDQPLPGVPAWYTDGSSFIMDGRRQAGAAIVDNKRTVWASNLPEGTSAQKAELIALTQALRLAEGKSINIYTDSRYAFATAHVHGAIYKQRGWLTSAGKDIKNKEEILALLEAIHLPKRVAIIHCPGHQRGTDPVATGNRKADEAAKQAAQSTRILTETTKNAGKRTADGSEFEKRTADGSEFESPKKKAKVE

SEQ ID NO: 1717 - protein, 2127 aa, synthetic construct
MPAAKRVKLDGGDKKYSIGLDIGTNSVGWAVITDEYKVPSKKFKVLGNTDRHSIKKNLIGALLFDSGETAEATRLKRTARRRYTRRKNRICYLQEIFSNEMAKVDDSFFHRLEESFLVEEDKKHERHPIFGNIVDEVAYHEKYPTIYHLRKKLVDSTDKADLRLIYLALAHMIKFRGHFLIEGDLNPDNSDVDKLFIQLVQTYNQLFEENPINASGVDAKAILSARLSKSRRLENLIAQLPGEKKNGLFGNLIALSLGLTPNFKSNFDLAEDAKLQLSKDTYDDDLDNLLAQIGDQYADLFLAAKNLSDAILLSDILRVNTEITKAPLSASMIKRYDEHHQDLTLLKALVRQQLPEKYKEIFFDQSKNGYAGYIDGGASQEEFYKFIKPILEKMDGTEELLVKLNREDLLRKQRTFDNGSIPHQIHLGELHAILRRQEDFYPFLKDNREKIEKILTFRIPYYVGPLARGNSRFAWMTRKSEETITPWNFEEVVDKGASAQSFIERMTNFDKNLPNEKVLPKHSLLYEYFTVYNELTKVKYVTEGMRKPAFLSGEQKKAIVDLLFKTNRKVTVKQLKEDYFKKIECFDSVEISGVEDRFNASLGTYHDLLKIIKDKDFLDNEENEDILEDIVLTLTLFEDREMIEERLKTYAHLFDDKVMKQLKRRRYTGWGRLSRKLINGIRDKQSGKTILDFLKSDGFANRNFMQLIHDDSLTFKEDIQKAQVSGQGDSLHEHIANLAGSPAIKKGILQTVKVVDELVKVMGRHKPENIVIEMARENQTTQKGQKNSRERMKRIEEGIKELGSQILKEHPVENTQLQNEKLYLYYLQNGRDMYVDQELDINRLSDYDVDHIVPQSFLKDDSIDNKVLTRSDKARGKSDNVPSEEVVKKMKNYWRQLLNAKLITQRKFDNLTKAERGGLSELDKAGFIKRQLVETRQITKHVAQILDSRMNTKYDENDKLIREVKVITLKSKLVSDFRKDFQFYKVREINNYHHAHDAYLNAVVGTALIKKYPKLESEFVYGDYKVYDVRKMIAKSEQEIGKATAKYFFYSNIMNFFKTEITLANGEIRKRPLIETNGETGEIVWDKGRDFATVRKVLSMPQVNIVKKTEVQTGGFSKESILPKRNSDKLIARKKDWDPKKYGGFDSPTVAYSVLVVAKVEKGKSKKLKSVKELLGITIMERSSFEKNPIDFLEAKGYKEVKKDLIIKLPKYSLFELENGRKRMLASAGELQKGNELALPSKYVNFLYLASHYEKLKGSPEDNEQKQLFVEQHKHYLDEIIEQISEFSKRVILADANLDKVLSAYNKHRDKPIREQAENIIHLFTLTNLGAPAAFKYFDTTIDRKRYTSTKEVLDATLIHQSITGLYETRIDLSQLGGDGGGGSEAAAKGGGGGLLGRDLLTKLKAQIQFSTEGPQVTWEDRPAMCLVLNLEEEYRLHEKPVPPSIDPSWLQLFPMVWAEKAGMGLANQVPPVVVELKSDASPVAVRQYPMSKEAREGIRPHIQRFLDLGILVPCQSPWNTPLLPVKKPGTNDYRPVQDLREVNKRVQDIHPTVPNPYNLLSSLPPSHTWYSVLDLKDAFFCLKLHPNSQPLFAFEWRDPEKGNTGQLTWTRLPQGFKNSPTLFNEALHRDLASFRALNPQVVMLQYVDDLLVAAPTYRDCKEGTRRLLQELSKLGYRVSAKKAQLCREEVTYLGYLLKGGKRWLTPARKATVMKIPTPTTPRQVREFLGKAGFCRLFIPGFASLAAPLYPLTRPKVPFTWTEAHQEAFGRIKEALLSAPALALPDLTKPFALYVDEKEGVARGVLTQTLGPWRRPVAYLSKKLDPVASGWPTCLKAIAAVALLLKDADKLTLGQNVLVIAPHNLESIVRQPPDRWMTNARMTHYQSLLLNERVSFAPPAILNPATLLPVESDDTPIHICSEILAEETGTRPDLRDQPLPGVPAWYTDGSSFIMDGRRQAGAAIVDNKRTVWASNLPEGTSAQKAELIALTQALRLAEGKSINIYTDSRYAFATAHVHGAIYKQRGWLTSAGKDIKNKEEILALLEAIHLPKRVAIIHCPGHQRGTDPVATGNRKADEAAKQAAQSTRILTETTKNAGKRTADGSEFEKRTADGSEFESPKKKAKVE

SEQ ID NO: 1718 - protein, 2127 aa, synthetic construct
MPAAKRVKLDGGDKKYSIGLDIGTNSVGWAVITDEYKVPSKKFKVLGNTDRHSIKKNLIGALLFDSGETAEATRLKRTARRRYTRRKNRICYLQEIFSNEMAKVDDSFFHRLEESFLVEEDKKHERHPIFGNIVDEVAYHEKYPTIYHLRKKLVDSTDKADLRLIYLALAHMIKFRGHFLIEGDLNPDNSDVDKLFIQLVQTYNQLFEENPINASGVDAKAILSARLSKSRRLENLIAQLPGEKKNGLFGNLIALSLGLTPNFKSNFDLAEDAKLQLSKDTYDDDLDNLLAQIGDQYADLFLAAKNLSDAILLSDILRVNTEITKAPLSASMIKRYDEHHQDLTLLKALVRQQLPEKYKEIFFDQSKNGYAGYIDGGASQEEFYKFIKPILEKMDGTEELLVKLNREDLLRKQRTFDNGSIPHQIHLGELHAILRRQEDFYPFLKDNREKIEKILTFRIPYYVGPLARGNSRFAWMTRKSEETITPWNFEEVVDKGASAQSFIERMTNFDKNLPNEKVLPKHSLLYEYFTVYNELTKVKYVTEGMRKPAFLSGEQKKAIVDLLFKTNRKVTVKQLKEDYFKKIECFDSVEISGVEDRFNASLGTYHDLLKIIKDKDFLDNEENEDILEDIVLTLTLFEDREMIEERLKTYAHLFDDKVMKQLKRRRYTGWGRLSRKLINGIRDKQSGKTILDFLKSDGFANRNFMQLIHDDSLTFKEDIQKAQVSGQGDSLHEHIANLAGSPAIKKGILQTVKVVDELVKVMGRHKPENIVIEMARENQTTQKGQKNSRERMKRIEEGIKELGSQILKEHPVENTQLQNEKLYLYYLQNGRDMYVDQELDINRLSDYDVDHIVPQSFLKDDSIDNKVLTRSDKARGKSDNVPSEEVVKKMKNYWRQLLNAKLITQRKFDNLTKAERGGLSELDKAGFIKRQLVETRQITKHVAQILDSRMNTKYDENDKLIREVKVITLKSKLVSDFRKDFQFYKVREINNYHHAHDAYLNAVVGTALIKKYPKLESEFVYGDYKVYDVRKMIAKSEQEIGKATAKYFFYSNIMNFFKTEITLANGEIRKRPLIETNGETGEIVWDKGRDFATVRKVLSMPQVNIVKKTEVQTGGFSKESILPKRNSDKLIARKKDWDPKKYGGFDSPTVAYSVLVVAKVEKGKSKKLKSVKELLGITIMERSSFEKNPIDFLEAKGYKEVKKDLIIKLPKYSLFELENGRKRMLASAGELQKGNELALPSKYVNFLYLASHYEKLKGSPEDNEQKQLFVEQHKHYLDEIIEQISEFSKRVILADANLDKVLSAYNKHRDKPIREQAENIIHLFTLTNLGAPAAFKYFDTTIDRKRYTSTKEVLDATLIHQSITGLYETRIDLSQLGGDGGPAPGGSEAAAKGGLLGRDLLTKLKAQIQFSTEGPQVTWEDRPAMCLVLNLEEEYRLHEKPVPPSIDPSWLQLFPMVWAEKAGMGLANQVPPVVVELKSDASPVAVRQYPMSKEAREGIRPHIQRFLDLGILVPCQSPWNTPLLPVKKPGTNDYRPVQDLREVNKRVQDIHPTVPNPYNLLSSLPPSHTWYSVLDLKDAFFCLKLHPNSQPLFAFEWRDPEKGNTGQLTWTRLPQGFKNSPTLFNEALHRDLASFRALNPQVVMLQYVDDLLVAAPTYRDCKEGTRRLLQELSKLGYRVSAKKAQLCREEVTYLGYLLKGGKRWLTPARKATVMKIPTPTTPRQVREFLGKAGFCRLFIPGFASLAAPLYPLTRPKVPFTWTEAHQEAFGRIKEALLSAPALALPDLTKPFALYVDEKEGVARGVLTQTLGPWRRPVAYLSKKLDPVASGWPTCLKAIAAVALLLKDADKLTLGQNVLVIAPHNLESIVRQPPDRWMTNARMTHYQSLLLNERVSFAPPAILNPATLLPVESDDTPIHICSEILAEETGTRPDLRDQPLPGVPAWYTDGSSFIMDGRRQAGAAIVDNKRTVWASNLPEGTSAQKAELIALTQALRLAEGKSINIYTDSRYAFATAHVHGAIYKQRGWLTSAGKDIKNKEEILALLEAIHLPKRVAIIHCPGHQRGTDPVATGNRKADEAAKQAAQSTRILTETTKNAGKRTADGSEFEKRTADGSEFESPKKKAKVE

SEQ ID NO: 1719 - protein, 2125 aa, synthetic construct
MPAAKRVKLDGGDKKYSIGLDIGTNSVGWAVITDEYKVPSKKFKVLGNTDRHSIKKNLIGALLFDSGETAEATRLKRTARRRYTRRKNRICYLQEIFSNEMAKVDDSFFHRLEESFLVEEDKKHERHPIFGNIVDEVAYHEKYPTIYHLRKKLVDSTDKADLRLIYLALAHMIKFRGHFLIEGDLNPDNSDVDKLFIQLVQTYNQLFEENPINASGVDAKAILSARLSKSRRLENLIAQLPGEKKNGLFGNLIALSLGLTPNFKSNFDLAEDAKLQLSKDTYDDDLDNLLAQIGDQYADLFLAAKNLSDAILLSDILRVNTEITKAPLSASMIKRYDEHHQDLTLLKALVRQQLPEKYKEIFFDQSKNGYAGYIDGGASQEEFYKFIKPILEKMDGTEELLVKLNREDLLRKQRTFDNGSIPHQIHLGELHAILRRQEDFYPFLKDNREKIEKILTFRIPYYVGPLARGNSRFAWMTRKSEETITPWNFEEVVDKGASAQSFIERMTNFDKNLPNEKVLPKHSLLYEYFTVYNELTKVKYVTEGMRKPAFLSGEQKKAIVDLLFKTNRKVTVKQLKEDYFKKIECFDSVEISGVEDRFNASLGTYHDLLKIIKDKDFLDNEENEDILEDIVLTLTLFEDREMIEERLKTYAHLFDDKVMKQLKRRRYTGWGRLSRKLINGIRDKQSGKTILDFLKSDGFANRNFMQLIHDDSLTFKEDIQKAQVSGQGDSLHEHIANLAGSPAIKKGILQTVKVVDELVKVMGRHKPENIVIEMARENQTTQKGQKNSRERMKRIEEGIKELGSQILKEHPVENTQLQNEKLYLYYLQNGRDMYVDQELDINRLSDYDVDHIVPQSFLKDDSIDNKVLTRSDKARGKSDNVPSEEVVKKMKNYWRQLLNAKLITQRKFDNLTKAERGGLSELDKAGFIKRQLVETRQITKHVAQILDSRMNTKYDENDKLIREVKVITLKSKLVSDFRKDFQFYKVREINNYHHAHDAYLNAVVGTALIKKYPKLESEFVYGDYKVYDVRKMIAKSEQEIGKATAKYFFYSNIMNFFKTEITLANGEIRKRPLIETNGETGEIVWDKGRDFATVRKVLSMPQVNIVKKTEVQTGGFSKESILPKRNSDKLIARKKDWDPKKYGGFDSPTVAYSVLVVAKVEKGKSKKLKSVKELLGITIMERSSFEKNPIDFLEAKGYKEVKKDLIIKLPKYSLFELENGRKRMLASAGELQKGNELALPSKYVNFLYLASHYEKLKGSPEDNEQKQLFVEQHKHYLDEIIEQISEFSKRVILADANLDKVLSAYNKHRDKPIREQAENIIHLFTLTNLGAPAAFKYFDTTIDRKRYTSTKEVLDATLIHQSITGLYETRIDLSQLGGDGGPAPGSSGGGGGLLGRDLLTKLKAQIQFSTEGPQVTWEDRPAMCLVLNLEEEYRLHEKPVPPSIDPSWLQLFPMVWAEKAGMGLANQVPPVVVELKSDASPVAVRQYPMSKEAREGIRPHIQRFLDLGILVPCQSPWNTPLLPVKKPGTNDYRPVQDLREVNKRVQDIHPTVPNPYNLLSSLPPSHTWYSVLDLKDAFFCLKLHPNSQPLFAFEWRDPEKGNTGQLTWTRLPQGFKNSPTLFNEALHRDLASFRALNPQVVMLQYVDDLLVAAPTYRDCKEGTRRLLQELSKLGYRVSAKKAQLCREEVTYLGYLLKGGKRWLTPARKATVMKIPTPTTPRQVREFLGKAGFCRLFIPGFASLAAPLYPLTRPKVPFTWTEAHQEAFGRIKEALLSAPALALPDLTKPFALYVDEKEGVARGVLTQTLGPWRRPVAYLSKKLDPVASGWPTCLKAIAAVALLLKDADKLTLGQNVLVIAPHNLESIVRQPPDRWMTNARMTHYQSLLLNERVSFAPPAILNPATLLPVESDDTPIHICSEILAEETGTRPDLRDQPLPGVPAWYTDGSSFIMDGRRQAGAAIVDNKRTVWASNLPEGTSAQKAELIALTQALRLAEGKSINIYTDSRYAFATAHVHGAIYKQRGWLTSAGKDIKNKEEILALLEAIHLPKRVAIIHCPGHQRGTDPVATGNRKADEAAKQAAQSTRILTETTKNAGKRTADGSEFEKRTADGSEFESPKKKAKVE

SEQ ID NO: 1720 - protein, 2126 aa, synthetic construct
MPAAKRVKLDGGDKKYSIGLDIGTNSVGWAVITDEYKVPSKKFKVLGNTDRHSIKKNLIGALLFDSGETAEATRLKRTARRRYTRRKNRICYLQEIFSNEMAKVDDSFFHRLEESFLVEEDKKHERHPIFGNIVDEVAYHEKYPTIYHLRKKLVDSTDKADLRLIYLALAHMIKFRGHFLIEGDLNPDNSDVDKLFIQLVQTYNQLFEENPINASGVDAKAILSARLSKSRRLENLIAQLPGEKKNGLFGNLIALSLGLTPNFKSNFDLAEDAKLQLSKDTYDDDLDNLLAQIGDQYADLFLAAKNLSDAILLSDILRVNTEITKAPLSASMIKRYDEHHQDLTLLKALVRQQLPEKYKEIFFDQSKNGYAGYIDGGASQEEFYKFIKPILEKMDGTEELLVKLNREDLLRKQRTFDNGSIPHQIHLGELHAILRRQEDFYPFLKDNREKIEKILTFRIPYYVGPLARGNSRFAWMTRKSEETITPWNFEEVVDKGASAQSFIERMTNFDKNLPNEKVLPKHSLLYEYFTVYNELTKVKYVTEGMRKPAFLSGEQKKAIVDLLFKTNRKVTVKQLKEDYFKKIECFDSVEISGVEDRFNASLGTYHDLLKIIKDKDFLDNEENEDILEDIVLTLTLFEDREMIEERLKTYAHLFDDKVMKQLKRRRYTGWGRLSRKLINGIRDKQSGKTILDFLKSDGFANRNFMQLIHDDSLTFKEDIQKAQVSGQGDSLHEHIANLAGSPAIKKGILQTVKVVDELVKVMGRHKPENIVIEMARENQTTQKGQKNSRERMKRIEEGIKELGSQILKEHPVENTQLQNEKLYLYYLQNGRDMYVDQELDINRLSDYDVDHIVPQSFLKDDSIDNKVLTRSDKARGKSDNVPSEEVVKKMKNYWRQLLNAKLITQRKFDNLTKAERGGLSELDKAGFIKRQLVETRQITKHVAQILDSRMNTKYDENDKLIREVKVITLKSKLVSDFRKDFQFYKVREINNYHHAHDAYLNAVVGTALIKKYPKLESEFVYGDYKVYDVRKMIAKSEQEIGKATAKYFFYSNIMNFFKTEITLANGEIRKRPLIETNGETGEIVWDKGRDFATVRKVLSMPQVNIVKKTEVQTGGFSKESILPKRNSDKLIARKKDWDPKKYGGFDSPTVAYSVLVVAKVEKGKSKKLKSVKELLGITIMERSSFEKNPIDFLEAKGYKEVKKDLIIKLPKYSLFELENGRKRMLASAGELQKGNELALPSKYVNFLYLASHYEKLKGSPEDNEQKQLFVEQHKHYLDEIIEQISEFSKRVILADANLDKVLSAYNKHRDKPIREQAENIIHLFTLTNLGAPAAFKYFDTTIDRKRYTSTKEVLDATLIHQSITGLYETRIDLSQLGGDGGGGGGSGGGGSGGLLGRDLLTKLKAQIQFSTEGPQVTWEDRPAMCLVLNLEEEYRLHEKPVPPSIDPSWLQLFPMVWAEKAGMGLANQVPPVVVELKSDASPVAVRQYPMSKEAREGIRPHIQRFLDLGILVPCQSPWNTPLLPVKKPGTNDYRPVQDLREVNKRVQDIHPTVPNPYNLLSSLPPSHTWYSVLDLKDAFFCLKLHPNSQPLFAFEWRDPEKGNTGQLTWTRLPQGFKNSPTLFNEALHRDLASFRALNPQVVMLQYVDDLLVAAPTYRDCKEGTRRLLQELSKLGYRVSAKKAQLCREEVTYLGYLLKGGKRWLTPARKATVMKIPTPTTPRQVREFLGKAGFCRLFIPGFASLAAPLYPLTRPKVPFTWTEAHQEAFGRIKEALLSAPALALPDLTKPFALYVDEKEGVARGVLTQTLGPWRRPVAYLSKKLDPVASGWPTCLKAIAAVALLLKDADKLTLGQNVLVIAPHNLESIVRQPPDRWMTNARMTHYQSLLLNERVSFAPPAILNPATLLPVESDDTPIHICSEILAEETGTRPDLRDQPLPGVPAWYTDGSSFIMDGRRQAGAAIVDNKRTVWASNLPEGTSAQKAELIALTQALRLAEGKSINIYTDSRYAFATAHVHGAIYKQRGWLTSAGKDIKNKEEILALLEAIHLPKRVAIIHCPGHQRGTDPVATGNRKADEAAKQAAQSTRILTETTKNAGKRTADGSEFEKRTADGSEFESPKKKAKVE

SEQ ID NO: 1721 - protein, 2127 aa, synthetic construct
MPAAKRVKLDGGDKKYSIGLDIGTNSVGWAVITDEYKVPSKKFKVLGNTDRHSIKKNLIGALLFDSGETAEATRLKRTARRRYTRRKNRICYLQEIFSNEMAKVDDSFFHRLEESFLVEEDKKHERHPIFGNIVDEVAYHEKYPTIYHLRKKLVDSTDKADLRLIYLALAHMIKFRGHFLIEGDLNPDNSDVDKLFIQLVQTYNQLFEENPINASGVDAKAILSARLSKSRRLENLIAQLPGEKKNGLFGNLIALSLGLTPNFKSNFDLAEDAKLQLSKDTYDDDLDNLLAQIGDQYADLFLAAKNLSDAILLSDILRVNTEITKAPLSASMIKRYDEHHQDLTLLKALVRQQLPEKYKEIFFDQSKNGYAGYIDGGASQEEFYKFIKPILEKMDGTEELLVKLNREDLLRKQRTFDNGSIPHQIHLGELHAILRRQEDFYPFLKDNREKIEKILTFRIPYYVGPLARGNSRFAWMTRKSEETITPWNFEEVVDKGASAQSFIERMTNFDKNLPNEKVLPKHSLLYEYFTVYNELTKVKYVTEGMRKPAFLSGEQKKAIVDLLFKTNRKVTVKQLKEDYFKKIECFDSVEISGVEDRFNASLGTYHDLLKIIKDKDFLDNEENEDILEDIVLTLTLFEDREMIEERLKTYAHLFDDKVMKQLKRRRYTGWGRLSRKLINGIRDKQSGKTILDFLKSDGFANRNFMQLIHDDSLTFKEDIQKAQVSGQGDSLHEHIANLAGSPAIKKGILQTVKVVDELVKVMGRHKPENIVIEMARENQTTQKGQKNSRERMKRIEEGIKELGSQILKEHPVENTQLQNEKLYLYYLQNGRDMYVDQELDINRLSDYDVDHIVPQSFLKDDSIDNKVLTRSDKARGKSDNVPSEEVVKKMKNYWRQLLNAKLITQRKFDNLTKAERGGLSELDKAGFIKRQLVETRQITKHVAQILDSRMNTKYDENDKLIREVKVITLKSKLVSDFRKDFQFYKVREINNYHHAHDAYLNAVVGTALIKKYPKLESEFVYGDYKVYDVRKMIAKSEQEIGKATAKYFFYSNIMNFFKTEITLANGEIRKRPLIETNGETGEIVWDKGRDFATVRKVLSMPQVNIVKKTEVQTGGFSKESILPKRNSDKLIARKKDWDPKKYGGFDSPTVAYSVLVVAKVEKGKSKKLKSVKELLGITIMERSSFEKNPIDFLEAKGYKEVKKDLIIKLPKYSLFELENGRKRMLASAGELQKGNELALPSKYVNFLYLASHYEKLKGSPEDNEQKQLFVEQHKHYLDEIIEQISEFSKRVILADANLDKVLSAYNKHRDKPIREQAENIIHLFTLTNLGAPAAFKYFDTTIDRKRYTSTKEVLDATLIHQSITGLYETRIDLSQLGGDGGGSSPAPEAAAKGGLLGRDLLTKLKAQIQFSTEGPQVTWEDRPAMCLVLNLEEEYRLHEKPVPPSIDPSWLQLFPMVWAEKAGMGLANQVPPVVVELKSDASPVAVRQYPMSKEAREGIRPHIQRFLDLGILVPCQSPWNTPLLPVKKPGTNDYRPVQDLREVNKRVQDIHPTVPNPYNLLSSLPPSHTWYSVLDLKDAFFCLKLHPNSQPLFAFEWRDPEKGNTGQLTWTRLPQGFKNSPTLFNEALHRDLASFRALNPQVVMLQYVDDLLVAAPTYRDCKEGTRRLLQELSKLGYRVSAKKAQLCREEVTYLGYLLKGGKRWLTPARKATVMKIPTPTTPRQVREFLGKAGFCRLFIPGFASLAAPLYPLTRPKVPFTWTEAHQEAFGRIKEALLSAPALALPDLTKPFALYVDEKEGVARGVLTQTLGPWRRPVAYLSKKLDPVASGWPTCLKAIAAVALLLKDADKLTLGQNVLVIAPHNLESIVRQPPDRWMTNARMTHYQSLLLNERVSFAPPAILNPATLLPVESDDTPIHICSEILAEETGTRPDLRDQPLPGVPAWYTDGSSFIMDGRRQAGAAIVDNKRTVWASNLPEGTSAQKAELIALTQALRLAEGKSINIYTDSRYAFATAHVHGAIYKQRGWLTSAGKDIKNKEEILALLEAIHLPKRVAIIHCPGHQRGTDPVATGNRKADEAAKQAAQSTRILTETTKNAGKRTADGSEFEKRTADGSEFESPKKKAKVE

SEQ ID NO: 1722 - protein, 2127 aa, synthetic construct
MPAAKRVKLDGGDKKYSIGLDIGTNSVGWAVITDEYKVPSKKFKVLGNTDRHSIKKNLIGALLFDSGETAEATRLKRTARRRYTRRKNRICYLQEIFSNEMAKVDDSFFHRLEESFLVEEDKKHERHPIFGNIVDEVAYHEKYPTIYHLRKKLVDSTDKADLRLIYLALAHMIKFRGHFLIEGDLNPDNSDVDKLFIQLVQTYNQLFEENPINASGVDAKAILSARLSKSRRLENLIAQLPGEKKNGLFGNLIALSLGLTPNFKSNFDLAEDAKLQLSKDTYDDDLDNLLAQIGDQYADLFLAAKNLSDAILLSDILRVNTEITKAPLSASMIKRYDEHHQDLTLLKALVRQQLPEKYKEIFFDQSKNGYAGYIDGGASQEEFYKFIKPILEKMDGTEELLVKLNREDLLRKQRTFDNGSIPHQIHLGELHAILRRQEDFYPFLKDNREKIEKILTFRIPYYVGPLARGNSRFAWMTRKSEETITPWNFEEVVDKGASAQSFIERMTNFDKNLPNEKVLPKHSLLYEYFTVYNELTKVKYVTEGMRKPAFLSGEQKKAIVDLLFKTNRKVTVKQLKEDYFKKIECFDSVEISGVEDRFNASLGTYHDLLKIIKDKDFLDNEENEDILEDIVLTLTLFEDREMIEERLKTYAHLFDDKVMKQLKRRRYTGWGRLSRKLINGIRDKQSGKTILDFLKSDGFANRNFMQLIHDDSLTFKEDIQKAQVSGQGDSLHEHIANLAGSPAIKKGILQTVKVVDELVKVMGRHKPENIVIEMARENQTTQKGQKNSRERMKRIEEGIKELGSQILKEHPVENTQLQNEKLYLYYLQNGRDMYVDQELDINRLSDYDVDHIVPQSFLKDDSIDNKVLTRSDKARGKSDNVPSEEVVKKMKNYWRQLLNAKLITQRKFDNLTKAERGGLSELDKAGFIKRQLVETRQITKHVAQILDSRMNTKYDENDKLIREVKVITLKSKLVSDFRKDFQFYKVREINNYHHAHDAYLNAVVGTALIKKYPKLESEFVYGDYKVYDVRKMIAKSEQEIGKATAKYFFYSNIMNFFKTEITLANGEIRKRPLIETNGETGEIVWDKGRDFATVRKVLSMPQVNIVKKTEVQTGGFSKESILPKRNSDKLIARKKDWDPKKYGGFDSPTVAYSVLVVAKVEKGKSKKLKSVKELLGITIMERSSFEKNPIDFLEAKGYKEVKKDLIIKLPKYSLFELENGRKRMLASAGELQKGNELALPSKYVNFLYLASHYEKLKGSPEDNEQKQLFVEQHKHYLDEIIEQISEFSKRVILADANLDKVLSAYNKHRDKPIREQAENIIHLFTLTNLGAPAAFKYFDTTIDRKRYTSTKEVLDATLIHQSITGLYETRIDLSQLGGDGGGGSEAAAKGSSGGLLGRDLLTKLKAQIQFSTEGPQVTWEDRPAMCLVLNLEEEYRLHEKPVPPSIDPSWLQLFPMVWAEKAGMGLANQVPPVVVELKSDASPVAVRQYPMSKEAREGIRPHIQRFLDLGILVPCQSPWNTPLLPVKKPGTNDYRPVQDLREVNKRVQDIHPTVPNPYNLLSSLPPSHTWYSVLDLKDAFFCLKLHPNSQPLFAFEWRDPEKGNTGQLTWTRLPQGFKNSPTLFNEALHRDLASFRALNPQVVMLQYVDDLLVAAPTYRDCKEGTRRLLQELSKLGYRVSAKKAQLCREEVTYLGYLLKGGKRWLTPARKATVMKIPTPTTPRQVREFLGKAGFCRLFIPGFASLAAPLYPLTRPKVPFTWTEAHQEAFGRIKEALLSAPALALPDLTKPFALYVDEKEGVARGVLTQTLGPWRRPVAYLSKKLDPVASGWPTCLKAIAAVALLLKDADKLTLGQNVLVIAPHNLESIVRQPPDRWMTNARMTHYQSLLLNERVSFAPPAILNPATLLPVESDDTPIHICSEILAEETGTRPDLRDQPLPGVPAWYTDGSSFIMDGRRQAGAAIVDNKRTVWASNLPEGTSAQKAELIALTQALRLAEGKSINIYTDSRYAFATAHVHGAIYKQRGWLTSAGKDIKNKEEILALLEAIHLPKRVAIIHCPGHQRGTDPVATGNRKADEAAKQAAQSTRILTETTKNAGKRTADGSEFEKRTADGSEFESPKKKAKVE

SEQ ID NO: 1723 - protein, 2127 aa, synthetic construct
MPAAKRVKLDGGDKKYSIGLDIGTNSVGWAVITDEYKVPSKKFKVLGNTDRHSIKKNLIGALLFDSGETAEATRLKRTARRRYTRRKNRICYLQEIFSNEMAKVDDSFFHRLEESFLVEEDKKHERHPIFGNIVDEVAYHEKYPTIYHLRKKLVDSTDKADLRLIYLALAHMIKFRGHFLIEGDLNPDNSDVDKLFIQLVQTYNQLFEENPINASGVDAKAILSARLSKSRRLENLIAQLPGEKKNGLFGNLIALSLGLTPNFKSNFDLAEDAKLQLSKDTYDDDLDNLLAQIGDQYADLFLAAKNLSDAILLSDILRVNTEITKAPLSASMIKRYDEHHQDLTLLKALVRQQLPEKYKEIFFDQSKNGYAGYIDGGASQEEFYKFIKPILEKMDGTEELLVKLNREDLLRKQRTFDNGSIPHQIHLGELHAILRRQEDFYPFLKDNREKIEKILTFRIPYYVGPLARGNSRFAWMTRKSEETITPWNFEEVVDKGASAQSFIERMTNFDKNLPNEKVLPKHSLLYEYFTVYNELTKVKYVTEGMRKPAFLSGEQKKAIVDLLFKTNRKVTVKQLKEDYFKKIECFDSVEISGVEDRFNASLGTYHDLLKIIKDKDFLDNEENEDILEDIVLTLTLFEDREMIEERLKTYAHLFDDKVMKQLKRRRYTGWGRLSRKLINGIRDKQSGKTILDFLKSDGFANRNFMQLIHDDSLTFKEDIQKAQVSGQGDSLHEHIANLAGSPAIKKGILQTVKVVDELVKVMGRHKPENIVIEMARENQTTQKGQKNSRERMKRIEEGIKELGSQILKEHPVENTQLQNEKLYLYYLQNGRDMYVDQELDINRLSDYDVDHIVPQSFLKDDSIDNKVLTRSDKARGKSDNVPSEEVVKKMKNYWRQLLNAKLITQRKFDNLTKAERGGLSELDKAGFIKRQLVETRQITKHVAQILDSRMNTKYDENDKLIREVKVITLKSKLVSDFRKDFQFYKVREINNYHHAHDAYLNAVVGTALIKKYPKLESEFVYGDYKVYDVRKMIAKSEQEIGKATAKYFFYSNIMNFFKTEITLANGEIRKRPLIETNGETGEIVWDKGRDFATVRKVLSMPQVNIVKKTEVQTGGFSKESILPKRNSDKLIARKKDWDPKKYGGFDSPTVAYSVLVVAKVEKGKSKKLKSVKELLGITIMERSSFEKNPIDFLEAKGYKEVKKDLIIKLPKYSLFELENGRKRMLASAGELQKGNELALPSKYVNFLYLASHYEKLKGSPEDNEQKQLFVEQHKHYLDEIIEQISEFSKRVILADANLDKVLSAYNKHRDKPIREQAENIIHLFTLTNLGAPAAFKYFDTTIDRKRYTSTKEVLDATLIHQSITGLYETRIDLSQLGGDGGEAAAKPAPGGSGGLLGRDLLTKLKAQIQFSTEGPQVTWEDRPAMCLVLNLEEEYRLHEKPVPPSIDPSWLQLFPMVWAEKAGMGLANQVPPVVVELKSDASPVAVRQYPMSKEAREGIRPHIQRFLDLGILVPCQSPWNTPLLPVKKPGTNDYRPVQDLREVNKRVQDIHPTVPNPYNLLSSLPPSHTWYSVLDLKDAFFCLKLHPNSQPLFAFEWRDPEKGNTGQLTWTRLPQGFKNSPTLFNEALHRDLASFRALNPQVVMLQYVDDLLVAAPTYRDCKEGTRRLLQELSKLGYRVSAKKAQLCREEVTYLGYLLKGGKRWLTPARKATVMKIPTPTTPRQVREFLGKAGFCRLFIPGFASLAAPLYPLTRPKVPFTWTEAHQEAFGRIKEALLSAPALALPDLTKPFALYVDEKEGVARGVLTQTLGPWRRPVAYLSKKLDPVASGWPTCLKAIAAVALLLKDADKLTLGQNVLVIAPHNLESIVRQPPDRWMTNARMTHYQSLLLNERVSFAPPAILNPATLLPVESDDTPIHICSEILAEETGTRPDLRDQPLPGVPAWYTDGSSFIMDGRRQAGAAIVDNKRTVWASNLPEGTSAQKAELIALTQALRLAEGKSINIYTDSRYAFATAHVHGAIYKQRGWLTSAGKDIKNKEEILALLEAIHLPKRVAIIHCPGHQRGTDPVATGNRKADEAAKQAAQSTRILTETTKNAGKRTADGSEFEKRTADGSEFESPKKKAKVE

SEQ ID NO: 1724 - protein, 2125 aa, synthetic construct
MPAAKRVKLDGGDKKYSIGLDIGTNSVGWAVITDEYKVPSKKFKVLGNTDRHSIKKNLIGALLFDSGETAEATRLKRTARRRYTRRKNRICYLQEIFSNEMAKVDDSFFHRLEESFLVEEDKKHERHPIFGNIVDEVAYHEKYPTIYHLRKKLVDSTDKADLRLIYLALAHMIKFRGHFLIEGDLNPDNSDVDKLFIQLVQTYNQLFEENPINASGVDAKAILSARLSKSRRLENLIAQLPGEKKNGLFGNLIALSLGLTPNFKSNFDLAEDAKLQLSKDTYDDDLDNLLAQIGDQYADLFLAAKNLSDAILLSDILRVNTEITKAPLSASMIKRYDEHHQDLTLLKALVRQQLPEKYKEIFFDQSKNGYAGYIDGGASQEEFYKFIKPILEKMDGTEELLVKLNREDLLRKQRTFDNGSIPHQIHLGELHAILRRQEDFYPFLKDNREKIEKILTFRIPYYVGPLARGNSRFAWMTRKSEETITPWNFEEVVDKGASAQSFIERMTNFDKNLPNEKVLPKHSLLYEYFTVYNELTKVKYVTEGMRKPAFLSGEQKKAIVDLLFKTNRKVTVKQLKEDYFKKIECFDSVEISGVEDRFNASLGTYHDLLKIIKDKDFLDNEENEDILEDIVLTLTLFEDREMIEERLKTYAHLFDDKVMKQLKRRRYTGWGRLSRKLINGIRDKQSGKTILDFLKSDGFANRNFMQLIHDDSLTFKEDIQKAQVSGQGDSLHEHIANLAGSPAIKKGILQTVKVVDELVKVMGRHKPENIVIEMARENQTTQKGQKNSRERMKRIEEGIKELGSQILKEHPVENTQLQNEKLYLYYLQNGRDMYVDQELDINRLSDYDVDHIVPQSFLKDDSIDNKVLTRSDKARGKSDNVPSEEVVKKMKNYWRQLLNAKLITQRKFDNLTKAERGGLSELDKAGFIKRQLVETRQITKHVAQILDSRMNTKYDENDKLIREVKVITLKSKLVSDFRKDFQFYKVREINNYHHAHDAYLNAVVGTALIKKYPKLESEFVYGDYKVYDVRKMIAKSEQEIGKATAKYFFYSNIMNFFKTEITLANGEIRKRPLIETNGETGEIVWDKGRDFATVRKVLSMPQVNIVKKTEVQTGGFSKESILPKRNSDKLIARKKDWDPKKYGGFDSPTVAYSVLVVAKVEKGKSKKLKSVKELLGITIMERSSFEKNPIDFLEAKGYKEVKKDLIIKLPKYSLFELENGRKRMLASAGELQKGNELALPSKYVNFLYLASHYEKLKGSPEDNEQKQLFVEQHKHYLDEIIEQISEFSKRVILADANLDKVLSAYNKHRDKPIREQAENIIHLFTLTNLGAPAAFKYFDTTIDRKRYTSTKEVLDATLIHQSITGLYETRIDLSQLGGDGGGGSGSSGGGGGLLGRDLLTKLKAQIQFSTEGPQVTWEDRPAMCLVLNLEEEYRLHEKPVPPSIDPSWLQLFPMVWAEKAGMGLANQVPPVVVELKSDASPVAVRQYPMSKEAREGIRPHIQRFLDLGILVPCQSPWNTPLLPVKKPGTNDYRPVQDLREVNKRVQDIHPTVPNPYNLLSSLPPSHTWYSVLDLKDAFFCLKLHPNSQPLFAFEWRDPEKGNTGQLTWTRLPQGFKNSPTLFNEALHRDLASFRALNPQVVMLQYVDDLLVAAPTYRDCKEGTRRLLQELSKLGYRVSAKKAQLCREEVTYLGYLLKGGKRWLTPARKATVMKIPTPTTPRQVREFLGKAGFCRLFIPGFASLAAPLYPLTRPKVPFTWTEAHQEAFGRIKEALLSAPALALPDLTKPFALYVDEKEGVARGVLTQTLGPWRRPVAYLSKKLDPVASGWPTCLKAIAAVALLLKDADKLTLGQNVLVIAPHNLESIVRQPPDRWMTNARMTHYQSLLLNERVSFAPPAILNPATLLPVESDDTPIHICSEILAEETGTRPDLRDQPLPGVPAWYTDGSSFIMDGRRQAGAAIVDNKRTVWASNLPEGTSAQKAELIALTQALRLAEGKSINIYTDSRYAFATAHVHGAIYKQRGWLTSAGKDIKNKEEILALLEAIHLPKRVAIIHCPGHQRGTDPVATGNRKADEAAKQAAQSTRILTETTKNAGKRTADGSEFEKRTADGSEFESPKKKAKVE

SEQ ID NO: 1725 - protein, 2127 aa, synthetic construct
MPAAKRVKLDGGDKKYSIGLDIGTNSVGWAVITDEYKVPSKKFKVLGNTDRHSIKKNLIGALLFDSGETAEATRLKRTARRRYTRRKNRICYLQEIFSNEMAKVDDSFFHRLEESFLVEEDKKHERHPIFGNIVDEVAYHEKYPTIYHLRKKLVDSTDKADLRLIYLALAHMIKFRGHFLIEGDLNPDNSDVDKLFIQLVQTYNQLFEENPINASGVDAKAILSARLSKSRRLENLIAQLPGEKKNGLFGNLIALSLGLTPNFKSNFDLAEDAKLQLSKDTYDDDLDNLLAQIGDQYADLFLAAKNLSDAILLSDILRVNTEITKAPLSASMIKRYDEHHQDLTLLKALVRQQLPEKYKEIFFDQSKNGYAGYIDGGASQEEFYKFIKPILEKMDGTEELLVKLNREDLLRKQRTFDNGSIPHQIHLGELHAILRRQEDFYPFLKDNREKIEKILTFRIPYYVGPLARGNSRFAWMTRKSEETITPWNFEEVVDKGASAQSFIERMTNFDKNLPNEKVLPKHSLLYEYFTVYNELTKVKYVTEGMRKPAFLSGEQKKAIVDLLFKTNRKVTVKQLKEDYFKKIECFDSVEISGVEDRFNASLGTYHDLLKIIKDKDFLDNEENEDILEDIVLTLTLFEDREMIEERLKTYAHLFDDKVMKQLKRRRYTGWGRLSRKLINGIRDKQSGKTILDFLKSDGFANRNFMQLIHDDSLTFKEDIQKAQVSGQGDSLHEHIANLAGSPAIKKGILQTVKVVDELVKVMGRHKPENIVIEMARENQTTQKGQKNSRERMKRIEEGIKELGSQILKEHPVENTQLQNEKLYLYYLQNGRDMYVDQELDINRLSDYDVDHIVPQSFLKDDSIDNKVLTRSDKARGKSDNVPSEEVVKKMKNYWRQLLNAKLITQRKFDNLTKAERGGLSELDKAGFIKRQLVETRQITKHVAQILDSRMNTKYDENDKLIREVKVITLKSKLVSDFRKDFQFYKVREINNYHHAHDAYLNAVVGTALIKKYPKLESEFVYGDYKVYDVRKMIAKSEQEIGKATAKYFFYSNIMNFFKTEITLANGEIRKRPLIETNGETGEIVWDKGRDFATVRKVLSMPQVNIVKKTEVQTGGFSKESILPKRNSDKLIARKKDWDPKKYGGFDSPTVAYSVLVVAKVEKGKSKKLKSVKELLGITIMERSSFEKNPIDFLEAKGYKEVKKDLIIKLPKYSLFELENGRKRMLASAGELQKGNELALPSKYVNFLYLASHYEKLKGSPEDNEQKQLFVEQHKHYLDEIIEQISEFSKRVILADANLDKVLSAYNKHRDKPIREQAENIIHLFTLTNLGAPAAFKYFDTTIDRKRYTSTKEVLDATLIHQSITGLYETRIDLSQLGGDGGGSSEAAAKGGSGGLLGRDLLTKLKAQIQFSTEGPQVTWEDRPAMCLVLNLEEEYRLHEKPVPPSIDPSWLQLFPMVWAEKAGMGLANQVPPVVVELKSDASPVAVRQYPMSKEAREGIRPHIQRFLDLGILVPCQSPWNTPLLPVKKPGTNDYRPVQDLREVNKRVQDIHPTVPNPYNLLSSLPPSHTWYSVLDLKDAFFCLKLHPNSQPLFAFEWRDPEKGNTGQLTWTRLPQGFKNSPTLFNEALHRDLASFRALNPQVVMLQYVDDLLVAAPTYRDCKEGTRRLLQELSKLGYRVSAKKAQLCREEVTYLGYLLKGGKRWLTPARKATVMKIPTPTTPRQVREFLGKAGFCRLFIPGFASLAAPLYPLTRPKVPFTWTEAHQEAFGRIKEALLSAPALALPDLTKPFALYVDEKEGVARGVLTQTLGPWRRPVAYLSKKLDPVASGWPTCLKAIAAVALLLKDADKLTLGQNVLVIAPHNLESIVRQPPDRWMTNARMTHYQSLLLNERVSFAPPAILNPATLLPVESDDTPIHICSEILAEETGTRPDLRDQPLPGVPAWYTDGSSFIMDGRRQAGAAIVDNKRTVWASNLPEGTSAQKAELIALTQALRLAEGKSINIYTDSRYAFATAHVHGAIYKQRGWLTSAGKDIKNKEEILALLEAIHLPKRVAIIHCPGHQRGTDPVATGNRKADEAAKQAAQSTRILTETTKNAGKRTADGSEFEKRTADGSEFESPKKKAKVE

SEQ ID NO: 1726 - protein, 2127 aa, synthetic construct
MPAAKRVKLDGGDKKYSIGLDIGTNSVGWAVITDEYKVPSKKFKVLGNTDRHSIKKNLIGALLFDSGETAEATRLKRTARRRYTRRKNRICYLQEIFSNEMAKVDDSFFHRLEESFLVEEDKKHERHPIFGNIVDEVAYHEKYPTIYHLRKKLVDSTDKADLRLIYLALAHMIKFRGHFLIEGDLNPDNSDVDKLFIQLVQTYNQLFEENPINASGVDAKAILSARLSKSRRLENLIAQLPGEKKNGLFGNLIALSLGLTPNFKSNFDLAEDAKLQLSKDTYDDDLDNLLAQIGDQYADLFLAAKNLSDAILLSDILRVNTEITKAPLSASMIKRYDEHHQDLTLLKALVRQQLPEKYKEIFFDQSKNGYAGYIDGGASQEEFYKFIKPILEKMDGTEELLVKLNREDLLRKQRTFDNGSIPHQIHLGELHAILRRQEDFYPFLKDNREKIEKILTFRIPYYVGPLARGNSRFAWMTRKSEETITPWNFEEVVDKGASAQSFIERMTNFDKNLPNEKVLPKHSLLYEYFTVYNELTKVKYVTEGMRKPAFLSGEQKKAIVDLLFKTNRKVTVKQLKEDYFKKIECFDSVEISGVEDRFNASLGTYHDLLKIIKDKDFLDNEENEDILEDIVLTLTLFEDREMIEERLKTYAHLFDDKVMKQLKRRRYTGWGRLSRKLINGIRDKQSGKTILDFLKSDGFANRNFMQLIHDDSLTFKEDIQKAQVSGQGDSLHEHIANLAGSPAIKKGILQTVKVVDELVKVMGRHKPENIVIEMARENQTTQKGQKNSRERMKRIEEGIKELGSQILKEHPVENTQLQNEKLYLYYLQNGRDMYVDQELDINRLSDYDVDHIVPQSFLKDDSIDNKVLTRSDKARGKSDNVPSEEVVKKMKNYWRQLLNAKLITQRKFDNLTKAERGGLSELDKAGFIKRQLVETRQITKHVAQILDSRMNTKYDENDKLIREVKVITLKSKLVSDFRKDFQFYKVREINNYHHAHDAYLNAVVGTALIKKYPKLESEFVYGDYKVYDVRKMIAKSEQEIGKATAKYFFYSNIMNFFKTEITLANGEIRKRPLIETNGETGEIVWDKGRDFATVRKVLSMPQVNIVKKTEVQTGGFSKESILPKRNSDKLIARKKDWDPKKYGGFDSPTVAYSVLVVAKVEKGKSKKLKSVKELLGITIMERSSFEKNPIDFLEAKGYKEVKKDLIIKLPKYSLFELENGRKRMLASAGELQKGNELALPSKYVNFLYLASHYEKLKGSPEDNEQKQLFVEQHKHYLDEIIEQISEFSKRVILADANLDKVLSAYNKHRDKPIREQAENIIHLFTLTNLGAPAAFKYFDTTIDRKRYTSTKEVLDATLIHQSITGLYETRIDLSQLGGDGGGGGGSSEAAAKGGLLGRDLLTKLKAQIQFSTEGPQVTWEDRPAMCLVLNLEEEYRLHEKPVPPSIDPSWLQLFPMVWAEKAGMGLANQVPPVVVELKSDASPVAVRQYPMSKEAREGIRPHIQRFLDLGILVPCQSPWNTPLLPVKKPGTNDYRPVQDLREVNKRVQDIHPTVPNPYNLLSSLPPSHTWYSVLDLKDAFFCLKLHPNSQPLFAFEWRDPEKGNTGQLTWTRLPQGFKNSPTLFNEALHRDLASFRALNPQVVMLQYVDDLLVAAPTYRDCKEGTRRLLQELSKLGYRVSAKKAQLCREEVTYLGYLLKGGKRWLTPARKATVMKIPTPTTPRQVREFLGKAGFCRLFIPGFASLAAPLYPLTRPKVPFTWTEAHQEAFGRIKEALLSAPALALPDLTKPFALYVDEKEGVARGVLTQTLGPWRRPVAYLSKKLDPVASGWPTCLKAIAAVALLLKDADKLTLGQNVLVIAPHNLESIVRQPPDRWMTNARMTHYQSLLLNERVSFAPPAILNPATLLPVESDDTPIHICSEILAEETGTRPDLRDQPLPGVPAWYTDGSSFIMDGRRQAGAAIVDNKRTVWASNLPEGTSAQKAELIALTQALRLAEGKSINIYTDSRYAFATAHVHGAIYKQRGWLTSAGKDIKNKEEILALLEAIHLPKRVAIIHCPGHQRGTDPVATGNRKADEAAKQAAQSTRILTETTKNAGKRTADGSEFEKRTADGSEFESPKKKAKVE

SEQ ID NO: 1727 - protein, 2121 aa, synthetic construct
MPAAKRVKLDGGDKKYSIGLDIGTNSVGWAVITDEYKVPSKKFKVLGNTDRHSIKKNLIGALLFDSGETAEATRLKRTARRRYTRRKNRICYLQEIFSNEMAKVDDSFFHRLEESFLVEEDKKHERHPIFGNIVDEVAYHEKYPTIYHLRKKLVDSTDKADLRLIYLALAHMIKFRGHFLIEGDLNPDNSDVDKLFIQLVQTYNQLFEENPINASGVDAKAILSARLSKSRRLENLIAQLPGEKKNGLFGNLIALSLGLTPNFKSNFDLAEDAKLQLSKDTYDDDLDNLLAQIGDQYADLFLAAKNLSDAILLSDILRVNTEITKAPLSASMIKRYDEHHQDLTLLKALVRQQLPEKYKEIFFDQSKNGYAGYIDGGASQEEFYKFIKPILEKMDGTEELLVKLNREDLLRKQRTFDNGSIPHQIHLGELHAILRRQEDFYPFLKDNREKIEKILTFRIPYYVGPLARGNSRFAWMTRKSEETITPWNFEEVVDKGASAQSFIERMTNFDKNLPNEKVLPKHSLLYEYFTVYNELTKVKYVTEGMRKPAFLSGEQKKAIVDLLFKTNRKVTVKQLKEDYFKKIECFDSVEISGVEDRFNASLGTYHDLLKIIKDKDFLDNEENEDILEDIVLTLTLFEDREMIEERLKTYAHLFDDKVMKQLKRRRYTGWGRLSRKLINGIRDKQSGKTILDFLKSDGFANRNFMQLIHDDSLTFKEDIQKAQVSGQGDSLHEHIANLAGSPAIKKGILQTVKVVDELVKVMGRHKPENIVIEMARENQTTQKGQKNSRERMKRIEEGIKELGSQILKEHPVENTQLQNEKLYLYYLQNGRDMYVDQELDINRLSDYDVDHIVPQSFLKDDSIDNKVLTRSDKARGKSDNVPSEEVVKKMKNYWRQLLNAKLITQRKFDNLTKAERGGLSELDKAGFIKRQLVETRQITKHVAQILDSRMNTKYDENDKLIREVKVITLKSKLVSDFRKDFQFYKVREINNYHHAHDAYLNAVVGTALIKKYPKLESEFVYGDYKVYDVRKMIAKSEQEIGKATAKYFFYSNIMNFFKTEITLANGEIRKRPLIETNGETGEIVWDKGRDFATVRKVLSMPQVNIVKKTEVQTGGFSKESILPKRNSDKLIARKKDWDPKKYGGFDSPTVAYSVLVVAKVEKGKSKKLKSVKELLGITIMERSSFEKNPIDFLEAKGYKEVKKDLIIKLPKYSLFELENGRKRMLASAGELQKGNELALPSKYVNFLYLASHYEKLKGSPEDNEQKQLFVEQHKHYLDEIIEQISEFSKRVILADANLDKVLSAYNKHRDKPIREQAENIIHLFTLTNLGAPAAFKYFDTTIDRKRYTSTKEVLDATLIHQSITGLYETRIDLSQLGGDGGPAPAPGGLLGRDLLTKLKAQIQFSTEGPQVTWEDRPAMCLVLNLEEEYRLHEKPVPPSIDPSWLQLFPMVWAEKAGMGLANQVPPVVVELKSDASPVAVRQYPMSKEAREGIRPHIQRFLDLGILVPCQSPWNTPLLPVKKPGTNDYRPVQDLREVNKRVQDIHPTVPNPYNLLSSLPPSHTWYSVLDLKDAFFCLKLHPNSQPLFAFEWRDPEKGNTGQLTWTRLPQGFKNSPTLFNEALHRDLASFRALNPQVVMLQYVDDLLVAAPTYRDCKEGTRRLLQELSKLGYRVSAKKAQLCREEVTYLGYLLKGGKRWLTPARKATVMKIPTPTTPRQVREFLGKAGFCRLFIPGFASLAAPLYPLTRPKVPFTWTEAHQEAFGRIKEALLSAPALALPDLTKPFALYVDEKEGVARGVLTQTLGPWRRPVAYLSKKLDPVASGWPTCLKAIAAVALLLKDADKLTLGQNVLVIAPHNLESIVRQPPDRWMTNARMTHYQSLLLNERVSFAPPAILNPATLLPVESDDTPIHICSEILAEETGTRPDLRDQPLPGVPAWYTDGSSFIMDGRRQAGAAIVDNKRTVWASNLPEGTSAQKAELIALTQALRLAEGKSINIYTDSRYAFATAHVHGAIYKQRGWLTSAGKDIKNKEEILALLEAIHLPKRVAIIHCPGHQRGTDPVATGNRKADEAAKQAAQSTRILTETTKNAGKRTADGSEFEKRTADGSEFESPKKKAKVE

SEQ ID NO: 1728 - protein, 2122 aa, synthetic construct
MPAAKRVKLDGGDKKYSIGLDIGTNSVGWAVITDEYKVPSKKFKVLGNTDRHSIKKNLIGALLFDSGETAEATRLKRTARRRYTRRKNRICYLQEIFSNEMAKVDDSFFHRLEESFLVEEDKKHERHPIFGNIVDEVAYHEKYPTIYHLRKKLVDSTDKADLRLIYLALAHMIKFRGHFLIEGDLNPDNSDVDKLFIQLVQTYNQLFEENPINASGVDAKAILSARLSKSRRLENLIAQLPGEKKNGLFGNLIALSLGLTPNFKSNFDLAEDAKLQLSKDTYDDDLDNLLAQIGDQYADLFLAAKNLSDAILLSDILRVNTEITKAPLSASMIKRYDEHHQDLTLLKALVRQQLPEKYKEIFFDQSKNGYAGYIDGGASQEEFYKFIKPILEKMDGTEELLVKLNREDLLRKQRTFDNGSIPHQIHLGELHAILRRQEDFYPFLKDNREKIEKILTFRIPYYVGPLARGNSRFAWMTRKSEETITPWNFEEVVDKGASAQSFIERMTNFDKNLPNEKVLPKHSLLYEYFTVYNELTKVKYVTEGMRKPAFLSGEQKKAIVDLLFKTNRKVTVKQLKEDYFKKIECFDSVEISGVEDRFNASLGTYHDLLKIIKDKDFLDNEENEDILEDIVLTLTLFEDREMIEERLKTYAHLFDDKVMKQLKRRRYTGWGRLSRKLINGIRDKQSGKTILDFLKSDGFANRNFMQLIHDDSLTFKEDIQKAQVSGQGDSLHEHIANLAGSPAIKKGILQTVKVVDELVKVMGRHKPENIVIEMARENQTTQKGQKNSRERMKRIEEGIKELGSQILKEHPVENTQLQNEKLYLYYLQNGRDMYVDQELDINRLSDYDVDHIVPQSFLKDDSIDNKVLTRSDKARGKSDNVPSEEVVKKMKNYWRQLLNAKLITQRKFDNLTKAERGGLSELDKAGFIKRQLVETRQITKHVAQILDSRMNTKYDENDKLIREVKVITLKSKLVSDFRKDFQFYKVREINNYHHAHDAYLNAVVGTALIKKYPKLESEFVYGDYKVYDVRKMIAKSEQEIGKATAKYFFYSNIMNFFKTEITLANGEIRKRPLIETNGETGEIVWDKGRDFATVRKVLSMPQVNIVKKTEVQTGGFSKESILPKRNSDKLIARKKDWDPKKYGGFDSPTVAYSVLVVAKVEKGKSKKLKSVKELLGITIMERSSFEKNPIDFLEAKGYKEVKKDLIIKLPKYSLFELENGRKRMLASAGELQKGNELALPSKYVNFLYLASHYEKLKGSPEDNEQKQLFVEQHKHYLDEIIEQISEFSKRVILADANLDKVLSAYNKHRDKPIREQAENIIHLFTLTNLGAPAAFKYFDTTIDRKRYTSTKEVLDATLIHQSITGLYETRIDLSQLGGDGGPAPGGSGGLLGRDLLTKLKAQIQFSTEGPQVTWEDRPAMCLVLNLEEEYRLHEKPVPPSIDPSWLQLFPMVWAEKAGMGLANQVPPVVVELKSDASPVAVRQYPMSKEAREGIRPHIQRFLDLGILVPCQSPWNTPLLPVKKPGTNDYRPVQDLREVNKRVQDIHPTVPNPYNLLSSLPPSHTWYSVLDLKDAFFCLKLHPNSQPLFAFEWRDPEKGNTGQLTWTRLPQGFKNSPTLFNEALHRDLASFRALNPQVVMLQYVDDLLVAAPTYRDCKEGTRRLLQELSKLGYRVSAKKAQLCREEVTYLGYLLKGGKRWLTPARKATVMKIPTPTTPRQVREFLGKAGFCRLFIPGFASLAAPLYPLTRPKVPFTWTEAHQEAFGRIKEALLSAPALALPDLTKPFALYVDEKEGVARGVLTQTLGPWRRPVAYLSKKLDPVASGWPTCLKAIAAVALLLKDADKLTLGQNVLVIAPHNLESIVRQPPDRWMTNARMTHYQSLLLNERVSFAPPAILNPATLLPVESDDTPIHICSEILAEETGTRPDLRDQPLPGVPAWYTDGSSFIMDGRRQAGAAIVDNKRTVWASNLPEGTSAQKAELIALTQALRLAEGKSINIYTDSRYAFATAHVHGAIYKQRGWLTSAGKDIKNKEEILALLEAIHLPKRVAIIHCPGHQRGTDPVATGNRKADEAAKQAAQSTRILTETTKNAGKRTADGSEFEKRTADGSEFESPKKKAKVE

SEQ ID NO: 1729 - protein, 2131 aa, synthetic construct
MPAAKRVKLDGGDKKYSIGLDIGTNSVGWAVITDEYKVPSKKFKVLGNTDRHSIKKNLIGALLFDSGETAEATRLKRTARRRYTRRKNRICYLQEIFSNEMAKVDDSFFHRLEESFLVEEDKKHERHPIFGNIVDEVAYHEKYPTIYHLRKKLVDSTDKADLRLIYLALAHMIKFRGHFLIEGDLNPDNSDVDKLFIQLVQTYNQLFEENPINASGVDAKAILSARLSKSRRLENLIAQLPGEKKNGLFGNLIALSLGLTPNFKSNFDLAEDAKLQLSKDTYDDDLDNLLAQIGDQYADLFLAAKNLSDAILLSDILRVNTEITKAPLSASMIKRYDEHHQDLTLLKALVRQQLPEKYKEIFFDQSKNGYAGYIDGGASQEEFYKFIKPILEKMDGTEELLVKLNREDLLRKQRTFDNGSIPHQIHLGELHAILRRQEDFYPFLKDNREKIEKILTFRIPYYVGPLARGNSRFAWMTRKSEETITPWNFEEVVDKGASAQSFIERMTNFDKNLPNEKVLPKHSLLYEYFTVYNELTKVKYVTEGMRKPAFLSGEQKKAIVDLLFKTNRKVTVKQLKEDYFKKIECFDSVEISGVEDRFNASLGTYHDLLKIIKDKDFLDNEENEDILEDIVLTLTLFEDREMIEERLKTYAHLFDDKVMKQLKRRRYTGWGRLSRKLINGIRDKQSGKTILDFLKSDGFANRNFMQLIHDDSLTFKEDIQKAQVSGQGDSLHEHIANLAGSPAIKKGILQTVKVVDELVKVMGRHKPENIVIEMARENQTTQKGQKNSRERMKRIEEGIKELGSQILKEHPVENTQLQNEKLYLYYLQNGRDMYVDQELDINRLSDYDVDHIVPQSFLKDDSIDNKVLTRSDKARGKSDNVPSEEVVKKMKNYWRQLLNAKLITQRKFDNLTKAERGGLSELDKAGFIKRQLVETRQITKHVAQILDSRMNTKYDENDKLIREVKVITLKSKLVSDFRKDFQFYKVREINNYHHAHDAYLNAVVGTALIKKYPKLESEFVYGDYKVYDVRKMIAKSEQEIGKATAKYFFYSNIMNFFKTEITLANGEIRKRPLIETNGETGEIVWDKGRDFATVRKVLSMPQVNIVKKTEVQTGGFSKESILPKRNSDKLIARKKDWDPKKYGGFDSPTVAYSVLVVAKVEKGKSKKLKSVKELLGITIMERSSFEKNPIDFLEAKGYKEVKKDLIIKLPKYSLFELENGRKRMLASAGELQKGNELALPSKYVNFLYLASHYEKLKGSPEDNEQKQLFVEQHKHYLDEIIEQISEFSKRVILADANLDKVLSAYNKHRDKPIREQAENIIHLFTLTNLGAPAAFKYFDTTIDRKRYTSTKEVLDATLIHQSITGLYETRIDLSQLGGDGGGGGGSGGGGSGGGGSGGLLGRDLLTKLKAQIQFSTEGPQVTWEDRPAMCLVLNLEEEYRLHEKPVPPSIDPSWLQLFPMVWAEKAGMGLANQVPPVVVELKSDASPVAVRQYPMSKEAREGIRPHIQRFLDLGILVPCQSPWNTPLLPVKKPGTNDYRPVQDLREVNKRVQDIHPTVPNPYNLLSSLPPSHTWYSVLDLKDAFFCLKLHPNSQPLFAFEWRDPEKGNTGQLTWTRLPQGFKNSPTLFNEALHRDLASFRALNPQVVMLQYVDDLLVAAPTYRDCKEGTRRLLQELSKLGYRVSAKKAQLCREEVTYLGYLLKGGKRWLTPARKATVMKIPTPTTPRQVREFLGKAGFCRLFIPGFASLAAPLYPLTRPKVPFTWTEAHQEAFGRIKEALLSAPALALPDLTKPFALYVDEKEGVARGVLTQTLGPWRRPVAYLSKKLDPVASGWPTCLKAIAAVALLLKDADKLTLGQNVLVIAPHNLESIVRQPPDRWMTNARMTHYQSLLLNERVSFAPPAILNPATLLPVESDDTPIHICSEILAEETGTRPDLRDQPLPGVPAWYTDGSSFIMDGRRQAGAAIVDNKRTVWASNLPEGTSAQKAELIALTQALRLAEGKSINIYTDSRYAFATAHVHGAIYKQRGWLTSAGKDIKNKEEILALLEAIHLPKRVAIIHCPGHQRGTDPVATGNRKADEAAKQAAQSTRILTETTKNAGKRTADGSEFEKRTADGSEFESPKKKAKVE

SEQ ID NO: 1730 - protein, 2125 aa, synthetic construct
MPAAKRVKLDGGDKKYSIGLDIGTNSVGWAVITDEYKVPSKKFKVLGNTDRHSIKKNLIGALLFDSGETAEATRLKRTARRRYTRRKNRICYLQEIFSNEMAKVDDSFFHRLEESFLVEEDKKHERHPIFGNIVDEVAYHEKYPTIYHLRKKLVDSTDKADLRLIYLALAHMIKFRGHFLIEGDLNPDNSDVDKLFIQLVQTYNQLFEENPINASGVDAKAILSARLSKSRRLENLIAQLPGEKKNGLFGNLIALSLGLTPNFKSNFDLAEDAKLQLSKDTYDDDLDNLLAQIGDQYADLFLAAKNLSDAILLSDILRVNTEITKAPLSASMIKRYDEHHQDLTLLKALVRQQLPEKYKEIFFDQSKNGYAGYIDGGASQEEFYKFIKPILEKMDGTEELLVKLNREDLLRKQRTFDNGSIPHQIHLGELHAILRRQEDFYPFLKDNREKIEKILTFRIPYYVGPLARGNSRFAWMTRKSEETITPWNFEEVVDKGASAQSFIERMTNFDKNLPNEKVLPKHSLLYEYFTVYNELTKVKYVTEGMRKPAFLSGEQKKAIVDLLFKTNRKVTVKQLKEDYFKKIECFDSVEISGVEDRFNASLGTYHDLLKIIKDKDFLDNEENEDILEDIVLTLTLFEDREMIEERLKTYAHLFDDKVMKQLKRRRYTGWGRLSRKLINGIRDKQSGKTILDFLKSDGFANRNFMQLIHDDSLTFKEDIQKAQVSGQGDSLHEHIANLAGSPAIKKGILQTVKVVDELVKVMGRHKPENIVIEMARENQTTQKGQKNSRERMKRIEEGIKELGSQILKEHPVENTQLQNEKLYLYYLQNGRDMYVDQELDINRLSDYDVDHIVPQSFLKDDSIDNKVLTRSDKARGKSDNVPSEEVVKKMKNYWRQLLNAKLITQRKFDNLTKAERGGLSELDKAGFIKRQLVETRQITKHVAQILDSRMNTKYDENDKLIREVKVITLKSKLVSDFRKDFQFYKVREINNYHHAHDAYLNAVVGTALIKKYPKLESEFVYGDYKVYDVRKMIAKSEQEIGKATAKYFFYSNIMNFFKTEITLANGEIRKRPLIETNGETGEIVWDKGRDFATVRKVLSMPQVNIVKKTEVQTGGFSKESILPKRNSDKLIARKKDWDPKKYGGFDSPTVAYSVLVVAKVEKGKSKKLKSVKELLGITIMERSSFEKNPIDFLEAKGYKEVKKDLIIKLPKYSLFELENGRKRMLASAGELQKGNELALPSKYVNFLYLASHYEKLKGSPEDNEQKQLFVEQHKHYLDEIIEQISEFSKRVILADANLDKVLSAYNKHRDKPIREQAENIIHLFTLTNLGAPAAFKYFDTTIDRKRYTSTKEVLDATLIHQSITGLYETRIDLSQLGGDGGGGSPAPGGGGGLLGRDLLTKLKAQIQFSTEGPQVTWEDRPAMCLVLNLEEEYRLHEKPVPPSIDPSWLQLFPMVWAEKAGMGLANQVPPVVVELKSDASPVAVRQYPMSKEAREGIRPHIQRFLDLGILVPCQSPWNTPLLPVKKPGTNDYRPVQDLREVNKRVQDIHPTVPNPYNLLSSLPPSHTWYSVLDLKDAFFCLKLHPNSQPLFAFEWRDPEKGNTGQLTWTRLPQGFKNSPTLFNEALHRDLASFRALNPQVVMLQYVDDLLVAAPTYRDCKEGTRRLLQELSKLGYRVSAKKAQLCREEVTYLGYLLKGGKRWLTPARKATVMKIPTPTTPRQVREFLGKAGFCRLFIPGFASLAAPLYPLTRPKVPFTWTEAHQEAFGRIKEALLSAPALALPDLTKPFALYVDEKEGVARGVLTQTLGPWRRPVAYLSKKLDPVASGWPTCLKAIAAVALLLKDADKLTLGQNVLVIAPHNLESIVRQPPDRWMTNARMTHYQSLLLNERVSFAPPAILNPATLLPVESDDTPIHICSEILAEETGTRPDLRDQPLPGVPAWYTDGSSFIMDGRRQAGAAIVDNKRTVWASNLPEGTSAQKAELIALTQALRLAEGKSINIYTDSRYAFATAHVHGAIYKQRGWLTSAGKDIKNKEEILALLEAIHLPKRVAIIHCPGHQRGTDPVATGNRKADEAAKQAAQSTRILTETTKNAGKRTADGSEFEKRTADGSEFESPKKKAKVE

SEQ ID NO: 1731 - protein, 2122 aa, synthetic construct
MPAAKRVKLDGGDKKYSIGLDIGTNSVGWAVITDEYKVPSKKFKVLGNTDRHSIKKNLIGALLFDSGETAEATRLKRTARRRYTRRKNRICYLQEIFSNEMAKVDDSFFHRLEESFLVEEDKKHERHPIFGNIVDEVAYHEKYPTIYHLRKKLVDSTDKADLRLIYLALAHMIKFRGHFLIEGDLNPDNSDVDKLFIQLVQTYNQLFEENPINASGVDAKAILSARLSKSRRLENLIAQLPGEKKNGLFGNLIALSLGLTPNFKSNFDLAEDAKLQLSKDTYDDDLDNLLAQIGDQYADLFLAAKNLSDAILLSDILRVNTEITKAPLSASMIKRYDEHHQDLTLLKALVRQQLPEKYKEIFFDQSKNGYAGYIDGGASQEEFYKFIKPILEKMDGTEELLVKLNREDLLRKQRTFDNGSIPHQIHLGELHAILRRQEDFYPFLKDNREKIEKILTFRIPYYVGPLARGNSRFAWMTRKSEETITPWNFEEVVDKGASAQSFIERMTNFDKNLPNEKVLPKHSLLYEYFTVYNELTKVKYVTEGMRKPAFLSGEQKKAIVDLLFKTNRKVTVKQLKEDYFKKIECFDSVEISGVEDRFNASLGTYHDLLKIIKDKDFLDNEENEDILEDIVLTLTLFEDREMIEERLKTYAHLFDDKVMKQLKRRRYTGWGRLSRKLINGIRDKQSGKTILDFLKSDGFANRNFMQLIHDDSLTFKEDIQKAQVSGQGDSLHEHIANLAGSPAIKKGILQTVKVVDELVKVMGRHKPENIVIEMARENQTTQKGQKNSRERMKRIEEGIKELGSQILKEHPVENTQLQNEKLYLYYLQNGRDMYVDQELDINRLSDYDVDHIVPQSFLKDDSIDNKVLTRSDKARGKSDNVPSEEVVKKMKNYWRQLLNAKLITQRKFDNLTKAERGGLSELDKAGFIKRQLVETRQITKHVAQILDSRMNTKYDENDKLIREVKVITLKSKLVSDFRKDFQFYKVREINNYHHAHDAYLNAVVGTALIKKYPKLESEFVYGDYKVYDVRKMIAKSEQEIGKATAKYFFYSNIMNFFKTEITLANGEIRKRPLIETNGETGEIVWDKGRDFATVRKVLSMPQVNIVKKTEVQTGGFSKESILPKRNSDKLIARKKDWDPKKYGGFDSPTVAYSVLVVAKVEKGKSKKLKSVKELLGITIMERSSFEKNPIDFLEAKGYKEVKKDLIIKLPKYSLFELENGRKRMLASAGELQKGNELALPSKYVNFLYLASHYEKLKGSPEDNEQKQLFVEQHKHYLDEIIEQISEFSKRVILADANLDKVLSAYNKHRDKPIREQAENIIHLFTLTNLGAPAAFKYFDTTIDRKRYTSTKEVLDATLIHQSITGLYETRIDLSQLGGDGGGSSPAPGGLLGRDLLTKLKAQIQFSTEGPQVTWEDRPAMCLVLNLEEEYRLHEKPVPPSIDPSWLQLFPMVWAEKAGMGLANQVPPVVVELKSDASPVAVRQYPMSKEAREGIRPHIQRFLDLGILVPCQSPWNTPLLPVKKPGTNDYRPVQDLREVNKRVQDIHPTVPNPYNLLSSLPPSHTWYSVLDLKDAFFCLKLHPNSQPLFAFEWRDPEKGNTGQLTWTRLPQGFKNSPTLFNEALHRDLASFRALNPQVVMLQYVDDLLVAAPTYRDCKEGTRRLLQELSKLGYRVSAKKAQLCREEVTYLGYLLKGGKRWLTPARKATVMKIPTPTTPRQVREFLGKAGFCRLFIPGFASLAAPLYPLTRPKVPFTWTEAHQEAFGRIKEALLSAPALALPDLTKPFALYVDEKEGVARGVLTQTLGPWRRPVAYLSKKLDPVASGWPTCLKAIAAVALLLKDADKLTLGQNVLVIAPHNLESIVRQPPDRWMTNARMTHYQSLLLNERVSFAPPAILNPATLLPVESDDTPIHICSEILAEETGTRPDLRDQPLPGVPAWYTDGSSFIMDGRRQAGAAIVDNKRTVWASNLPEGTSAQKAELIALTQALRLAEGKSINIYTDSRYAFATAHVHGAIYKQRGWLTSAGKDIKNKEEILALLEAIHLPKRVAIIHCPGHQRGTDPVATGNRKADEAAKQAAQSTRILTETTKNAGKRTADGSEFEKRTADGSEFESPKKKAKVE

SEQ ID NO: 1732 - protein, 2125 aa, synthetic construct
MPAAKRVKLDGGDKKYSIGLDIGTNSVGWAVITDEYKVPSKKFKVLGNTDRHSIKKNLIGALLFDSGETAEATRLKRTARRRYTRRKNRICYLQEIFSNEMAKVDDSFFHRLEESFLVEEDKKHERHPIFGNIVDEVAYHEKYPTIYHLRKKLVDSTDKADLRLIYLALAHMIKFRGHFLIEGDLNPDNSDVDKLFIQLVQTYNQLFEENPINASGVDAKAILSARLSKSRRLENLIAQLPGEKKNGLFGNLIALSLGLTPNFKSNFDLAEDAKLQLSKDTYDDDLDNLLAQIGDQYADLFLAAKNLSDAILLSDILRVNTEITKAPLSASMIKRYDEHHQDLTLLKALVRQQLPEKYKEIFFDQSKNGYAGYIDGGASQEEFYKFIKPILEKMDGTEELLVKLNREDLLRKQRTFDNGSIPHQIHLGELHAILRRQEDFYPFLKDNREKIEKILTFRIPYYVGPLARGNSRFAWMTRKSEETITPWNFEEVVDKGASAQSFIERMTNFDKNLPNEKVLPKHSLLYEYFTVYNELTKVKYVTEGMRKPAFLSGEQKKAIVDLLFKTNRKVTVKQLKEDYFKKIECFDSVEISGVEDRFNASLGTYHDLLKIIKDKDFLDNEENEDILEDIVLTLTLFEDREMIEERLKTYAHLFDDKVMKQLKRRRYTGWGRLSRKLINGIRDKQSGKTILDFLKSDGFANRNFMQLIHDDSLTFKEDIQKAQVSGQGDSLHEHIANLAGSPAIKKGILQTVKVVDELVKVMGRHKPENIVIEMARENQTTQKGQKNSRERMKRIEEGIKELGSQILKEHPVENTQLQNEKLYLYYLQNGRDMYVDQELDINRLSDYDVDHIVPQSFLKDDSIDNKVLTRSDKARGKSDNVPSEEVVKKMKNYWRQLLNAKLITQRKFDNLTKAERGGLSELDKAGFIKRQLVETRQITKHVAQILDSRMNTKYDENDKLIREVKVITLKSKLVSDFRKDFQFYKVREINNYHHAHDAYLNAVVGTALIKKYPKLESEFVYGDYKVYDVRKMIAKSEQEIGKATAKYFFYSNIMNFFKTEITLANGEIRKRPLIETNGETGEIVWDKGRDFATVRKVLSMPQVNIVKKTEVQTGGFSKESILPKRNSDKLIARKKDWDPKKYGGFDSPTVAYSVLVVAKVEKGKSKKLKSVKELLGITIMERSSFEKNPIDFLEAKGYKEVKKDLIIKLPKYSLFELENGRKRMLASAGELQKGNELALPSKYVNFLYLASHYEKLKGSPEDNEQKQLFVEQHKHYLDEIIEQISEFSKRVILADANLDKVLSAYNKHRDKPIREQAENIIHLFTLTNLGAPAAFKYFDTTIDRKRYTSTKEVLDATLIHQSITGLYETRIDLSQLGGDGGGGSPAPGSSGGLLGRDLLTKLKAQIQFSTEGPQVTWEDRPAMCLVLNLEEEYRLHEKPVPPSIDPSWLQLFPMVWAEKAGMGLANQVPPVVVELKSDASPVAVRQYPMSKEAREGIRPHIQRFLDLGILVPCQSPWNTPLLPVKKPGTNDYRPVQDLREVNKRVQDIHPTVPNPYNLLSSLPPSHTWYSVLDLKDAFFCLKLHPNSQPLFAFEWRDPEKGNTGQLTWTRLPQGFKNSPTLFNEALHRDLASFRALNPQVVMLQYVDDLLVAAPTYRDCKEGTRRLLQELSKLGYRVSAKKAQLCREEVTYLGYLLKGGKRWLTPARKATVMKIPTPTTPRQVREFLGKAGFCRLFIPGFASLAAPLYPLTRPKVPFTWTEAHQEAFGRIKEALLSAPALALPDLTKPFALYVDEKEGVARGVLTQTLGPWRRPVAYLSKKLDPVASGWPTCLKAIAAVALLLKDADKLTLGQNVLVIAPHNLESIVRQPPDRWMTNARMTHYQSLLLNERVSFAPPAILNPATLLPVESDDTPIHICSEILAEETGTRPDLRDQPLPGVPAWYTDGSSFIMDGRRQAGAAIVDNKRTVWASNLPEGTSAQKAELIALTQALRLAEGKSINIYTDSRYAFATAHVHGAIYKQRGWLTSAGKDIKNKEEILALLEAIHLPKRVAIIHCPGHQRGTDPVATGNRKADEAAKQAAQSTRILTETTKNAGKRTADGSEFEKRTADGSEFESPKKKAKVE

SEQ ID NO: 1733 - protein, 2122 aa, synthetic construct
MPAAKRVKLDGGDKKYSIGLDIGTNSVGWAVITDEYKVPSKKFKVLGNTDRHSIKKNLIGALLFDSGETAEATRLKRTARRRYTRRKNRICYLQEIFSNEMAKVDDSFFHRLEESFLVEEDKKHERHPIFGNIVDEVAYHEKYPTIYHLRKKLVDSTDKADLRLIYLALAHMIKFRGHFLIEGDLNPDNSDVDKLFIQLVQTYNQLFEENPINASGVDAKAILSARLSKSRRLENLIAQLPGEKKNGLFGNLIALSLGLTPNFKSNFDLAEDAKLQLSKDTYDDDLDNLLAQIGDQYADLFLAAKNLSDAILLSDILRVNTEITKAPLSASMIKRYDEHHQDLTLLKALVRQQLPEKYKEIFFDQSKNGYAGYIDGGASQEEFYKFIKPILEKMDGTEELLVKLNREDLLRKQRTFDNGSIPHQIHLGELHAILRRQEDFYPFLKDNREKIEKILTFRIPYYVGPLARGNSRFAWMTRKSEETITPWNFEEVVDKGASAQSFIERMTNFDKNLPNEKVLPKHSLLYEYFTVYNELTKVKYVTEGMRKPAFLSGEQKKAIVDLLFKTNRKVTVKQLKEDYFKKIECFDSVEISGVEDRFNASLGTYHDLLKIIKDKDFLDNEENEDILEDIVLTLTLFEDREMIEERLKTYAHLFDDKVMKQLKRRRYTGWGRLSRKLINGIRDKQSGKTILDFLKSDGFANRNFMQLIHDDSLTFKEDIQKAQVSGQGDSLHEHIANLAGSPAIKKGILQTVKVVDELVKVMGRHKPENIVIEMARENQTTQKGQKNSRERMKRIEEGIKELGSQILKEHPVENTQLQNEKLYLYYLQNGRDMYVDQELDINRLSDYDVDHIVPQSFLKDDSIDNKVLTRSDKARGKSDNVPSEEVVKKMKNYWRQLLNAKLITQRKFDNLTKAERGGLSELDKAGFIKRQLVETRQITKHVAQILDSRMNTKYDENDKLIREVKVITLKSKLVSDFRKDFQFYKVREINNYHHAHDAYLNAVVGTALIKKYPKLESEFVYGDYKVYDVRKMIAKSEQEIGKATAKYFFYSNIMNFFKTEITLANGEIRKRPLIETNGETGEIVWDKGRDFATVRKVLSMPQVNIVKKTEVQTGGFSKESILPKRNSDKLIARKKDWDPKKYGGFDSPTVAYSVLVVAKVEKGKSKKLKSVKELLGITIMERSSFEKNPIDFLEAKGYKEVKKDLIIKLPKYSLFELENGRKRMLASAGELQKGNELALPSKYVNFLYLASHYEKLKGSPEDNEQKQLFVEQHKHYLDEIIEQISEFSKRVILADANLDKVLSAYNKHRDKPIREQAENIIHLFTLTNLGAPAAFKYFDTTIDRKRYTSTKEVLDATLIHQSITGLYETRIDLSQLGGDGGGGSGSSGGLLGRDLLTKLKAQIQFSTEGPQVTWEDRPAMCLVLNLEEEYRLHEKPVPPSIDPSWLQLFPMVWAEKAGMGLANQVPPVVVELKSDASPVAVRQYPMSKEAREGIRPHIQRFLDLGILVPCQSPWNTPLLPVKKPGTNDYRPVQDLREVNKRVQDIHPTVPNPYNLLSSLPPSHTWYSVLDLKDAFFCLKLHPNSQPLFAFEWRDPEKGNTGQLTWTRLPQGFKNSPTLFNEALHRDLASFRALNPQVVMLQYVDDLLVAAPTYRDCKEGTRRLLQELSKLGYRVSAKKAQLCREEVTYLGYLLKGGKRWLTPARKATVMKIPTPTTPRQVREFLGKAGFCRLFIPGFASLAAPLYPLTRPKVPFTWTEAHQEAFGRIKEALLSAPALALPDLTKPFALYVDEKEGVARGVLTQTLGPWRRPVAYLSKKLDPVASGWPTCLKAIAAVALLLKDADKLTLGQNVLVIAPHNLESIVRQPPDRWMTNARMTHYQSLLLNERVSFAPPAILNPATLLPVESDDTPIHICSEILAEETGTRPDLRDQPLPGVPAWYTDGSSFIMDGRRQAGAAIVDNKRTVWASNLPEGTSAQKAELIALTQALRLAEGKSINIYTDSRYAFATAHVHGAIYKQRGWLTSAGKDIKNKEEILALLEAIHLPKRVAIIHCPGHQRGTDPVATGNRKADEAAKQAAQSTRILTETTKNAGKRTADGSEFEKRTADGSEFESPKKKAKVE

SEQ ID NO: 1734 - protein, 2125 aa, synthetic construct
MPAAKRVKLDGGDKKYSIGLDIGTNSVGWAVITDEYKVPSKKFKVLGNTDRHSIKKNLIGALLFDSGETAEATRLKRTARRRYTRRKNRICYLQEIFSNEMAKVDDSFFHRLEESFLVEEDKKHERHPIFGNIVDEVAYHEKYPTIYHLRKKLVDSTDKADLRLIYLALAHMIKFRGHFLIEGDLNPDNSDVDKLFIQLVQTYNQLFEENPINASGVDAKAILSARLSKSRRLENLIAQLPGEKKNGLFGNLIALSLGLTPNFKSNFDLAEDAKLQLSKDTYDDDLDNLLAQIGDQYADLFLAAKNLSDAILLSDILRVNTEITKAPLSASMIKRYDEHHQDLTLLKALVRQQLPEKYKEIFFDQSKNGYAGYIDGGASQEEFYKFIKPILEKMDGTEELLVKLNREDLLRKQRTFDNGSIPHQIHLGELHAILRRQEDFYPFLKDNREKIEKILTFRIPYYVGPLARGNSRFAWMTRKSEETITPWNFEEVVDKGASAQSFIERMTNFDKNLPNEKVLPKHSLLYEYFTVYNELTKVKYVTEGMRKPAFLSGEQKKAIVDLLFKTNRKVTVKQLKEDYFKKIECFDSVEISGVEDRFNASLGTYHDLLKIIKDKDFLDNEENEDILEDIVLTLTLFEDREMIEERLKTYAHLFDDKVMKQLKRRRYTGWGRLSRKLINGIRDKQSGKTILDFLKSDGFANRNFMQLIHDDSLTFKEDIQKAQVSGQGDSLHEHIANLAGSPAIKKGILQTVKVVDELVKVMGRHKPENIVIEMARENQTTQKGQKNSRERMKRIEEGIKELGSQILKEHPVENTQLQNEKLYLYYLQNGRDMYVDQELDINRLSDYDVDHIVPQSFLKDDSIDNKVLTRSDKARGKSDNVPSEEVVKKMKNYWRQLLNAKLITQRKFDNLTKAERGGLSELDKAGFIKRQLVETRQITKHVAQILDSRMNTKYDENDKLIREVKVITLKSKLVSDFRKDFQFYKVREINNYHHAHDAYLNAVVGTALIKKYPKLESEFVYGDYKVYDVRKMIAKSEQEIGKATAKYFFYSNIMNFFKTEITLANGEIRKRPLIETNGETGEIVWDKGRDFATVRKVLSMPQVNIVKKTEVQTGGFSKESILPKRNSDKLIARKKDWDPKKYGGFDSPTVAYSVLVVAKVEKGKSKKLKSVKELLGITIMERSSFEKNPIDFLEAKGYKEVKKDLIIKLPKYSLFELENGRKRMLASAGELQKGNELALPSKYVNFLYLASHYEKLKGSPEDNEQKQLFVEQHKHYLDEIIEQISEFSKRVILADANLDKVLSAYNKHRDKPIREQAENIIHLFTLTNLGAPAAFKYFDTTIDRKRYTSTKEVLDATLIHQSITGLYETRIDLSQLGGDGGGGGGSSPAPGGLLGRDLLTKLKAQIQFSTEGPQVTWEDRPAMCLVLNLEEEYRLHEKPVPPSIDPSWLQLFPMVWAEKAGMGLANQVPPVVVELKSDASPVAVRQYPMSKEAREGIRPHIQRFLDLGILVPCQSPWNTPLLPVKKPGTNDYRPVQDLREVNKRVQDIHPTVPNPYNLLSSLPPSHTWYSVLDLKDAFFCLKLHPNSQPLFAFEWRDPEKGNTGQLTWTRLPQGFKNSPTLFNEALHRDLASFRALNPQVVMLQYVDDLLVAAPTYRDCKEGTRRLLQELSKLGYRVSAKKAQLCREEVTYLGYLLKGGKRWLTPARKATVMKIPTPTTPRQVREFLGKAGFCRLFIPGFASLAAPLYPLTRPKVPFTWTEAHQEAFGRIKEALLSAPALALPDLTKPFALYVDEKEGVARGVLTQTLGPWRRPVAYLSKKLDPVASGWPTCLKAIAAVALLLKDADKLTLGQNVLVIAPHNLESIVRQPPDRWMTNARMTHYQSLLLNERVSFAPPAILNPATLLPVESDDTPIHICSEILAEETGTRPDLRDQPLPGVPAWYTDGSSFIMDGRRQAGAAIVDNKRTVWASNLPEGTSAQKAELIALTQALRLAEGKSINIYTDSRYAFATAHVHGAIYKQRGWLTSAGKDIKNKEEILALLEAIHLPKRVAIIHCPGHQRGTDPVATGNRKADEAAKQAAQSTRILTETTKNAGKRTADGSEFEKRTADGSEFESPKKKAKVE

SEQ ID NO: 1735 - protein, 2125 aa, synthetic construct
MPAAKRVKLDGGDKKYSIGLDIGTNSVGWAVITDEYKVPSKKFKVLGNTDRHSIKKNLIGALLFDSGETAEATRLKRTARRRYTRRKNRICYLQEIFSNEMAKVDDSFFHRLEESFLVEEDKKHERHPIFGNIVDEVAYHEKYPTIYHLRKKLVDSTDKADLRLIYLALAHMIKFRGHFLIEGDLNPDNSDVDKLFIQLVQTYNQLFEENPINASGVDAKAILSARLSKSRRLENLIAQLPGEKKNGLFGNLIALSLGLTPNFKSNFDLAEDAKLQLSKDTYDDDLDNLLAQIGDQYADLFLAAKNLSDAILLSDILRVNTEITKAPLSASMIKRYDEHHQDLTLLKALVRQQLPEKYKEIFFDQSKNGYAGYIDGGASQEEFYKFIKPILEKMDGTEELLVKLNREDLLRKQRTFDNGSIPHQIHLGELHAILRRQEDFYPFLKDNREKIEKILTFRIPYYVGPLARGNSRFAWMTRKSEETITPWNFEEVVDKGASAQSFIERMTNFDKNLPNEKVLPKHSLLYEYFTVYNELTKVKYVTEGMRKPAFLSGEQKKAIVDLLFKTNRKVTVKQLKEDYFKKIECFDSVEISGVEDRFNASLGTYHDLLKIIKDKDFLDNEENEDILEDIVLTLTLFEDREMIEERLKTYAHLFDDKVMKQLKRRRYTGWGRLSRKLINGIRDKQSGKTILDFLKSDGFANRNFMQLIHDDSLTFKEDIQKAQVSGQGDSLHEHIANLAGSPAIKKGILQTVKVVDELVKVMGRHKPENIVIEMARENQTTQKGQKNSRERMKRIEEGIKELGSQILKEHPVENTQLQNEKLYLYYLQNGRDMYVDQELDINRLSDYDVDHIVPQSFLKDDSIDNKVLTRSDKARGKSDNVPSEEVVKKMKNYWRQLLNAKLITQRKFDNLTKAERGGLSELDKAGFIKRQLVETRQITKHVAQILDSRMNTKYDENDKLIREVKVITLKSKLVSDFRKDFQFYKVREINNYHHAHDAYLNAVVGTALIKKYPKLESEFVYGDYKVYDVRKMIAKSEQEIGKATAKYFFYSNIMNFFKTEITLANGEIRKRPLIETNGETGEIVWDKGRDFATVRKVLSMPQVNIVKKTEVQTGGFSKESILPKRNSDKLIARKKDWDPKKYGGFDSPTVAYSVLVVAKVEKGKSKKLKSVKELLGITIMERSSFEKNPIDFLEAKGYKEVKKDLIIKLPKYSLFELENGRKRMLASAGELQKGNELALPSKYVNFLYLASHYEKLKGSPEDNEQKQLFVEQHKHYLDEIIEQISEFSKRVILADANLDKVLSAYNKHRDKPIREQAENIIHLFTLTNLGAPAAFKYFDTTIDRKRYTSTKEVLDATLIHQSITGLYETRIDLSQLGGDGGGSSGGSPAPGGLLGRDLLTKLKAQIQFSTEGPQVTWEDRPAMCLVLNLEEEYRLHEKPVPPSIDPSWLQLFPMVWAEKAGMGLANQVPPVVVELKSDASPVAVRQYPMSKEAREGIRPHIQRFLDLGILVPCQSPWNTPLLPVKKPGTNDYRPVQDLREVNKRVQDIHPTVPNPYNLLSSLPPSHTWYSVLDLKDAFFCLKLHPNSQPLFAFEWRDPEKGNTGQLTWTRLPQGFKNSPTLFNEALHRDLASFRALNPQVVMLQYVDDLLVAAPTYRDCKEGTRRLLQELSKLGYRVSAKKAQLCREEVTYLGYLLKGGKRWLTPARKATVMKIPTPTTPRQVREFLGKAGFCRLFIPGFASLAAPLYPLTRPKVPFTWTEAHQEAFGRIKEALLSAPALALPDLTKPFALYVDEKEGVARGVLTQTLGPWRRPVAYLSKKLDPVASGWPTCLKAIAAVALLLKDADKLTLGQNVLVIAPHNLESIVRQPPDRWMTNARMTHYQSLLLNERVSFAPPAILNPATLLPVESDDTPIHICSEILAEETGTRPDLRDQPLPGVPAWYTDGSSFIMDGRRQAGAAIVDNKRTVWASNLPEGTSAQKAELIALTQALRLAEGKSINIYTDSRYAFATAHVHGAIYKQRGWLTSAGKDIKNKEEILALLEAIHLPKRVAIIHCPGHQRGTDPVATGNRKADEAAKQAAQSTRILTETTKNAGKRTADGSEFEKRTADGSEFESPKKKAKVE

SEQ ID NO: 1736 - protein, 2127 aa, synthetic construct
MPAAKRVKLDGGDKKYSIGLDIGTNSVGWAVITDEYKVPSKKFKVLGNTDRHSIKKNLIGALLFDSGETAEATRLKRTARRRYTRRKNRICYLQEIFSNEMAKVDDSFFHRLEESFLVEEDKKHERHPIFGNIVDEVAYHEKYPTIYHLRKKLVDSTDKADLRLIYLALAHMIKFRGHFLIEGDLNPDNSDVDKLFIQLVQTYNQLFEENPINASGVDAKAILSARLSKSRRLENLIAQLPGEKKNGLFGNLIALSLGLTPNFKSNFDLAEDAKLQLSKDTYDDDLDNLLAQIGDQYADLFLAAKNLSDAILLSDILRVNTEITKAPLSASMIKRYDEHHQDLTLLKALVRQQLPEKYKEIFFDQSKNGYAGYIDGGASQEEFYKFIKPILEKMDGTEELLVKLNREDLLRKQRTFDNGSIPHQIHLGELHAILRRQEDFYPFLKDNREKIEKILTFRIPYYVGPLARGNSRFAWMTRKSEETITPWNFEEVVDKGASAQSFIERMTNFDKNLPNEKVLPKHSLLYEYFTVYNELTKVKYVTEGMRKPAFLSGEQKKAIVDLLFKTNRKVTVKQLKEDYFKKIECFDSVEISGVEDRFNASLGTYHDLLKIIKDKDFLDNEENEDILEDIVLTLTLFEDREMIEERLKTYAHLFDDKVMKQLKRRRYTGWGRLSRKLINGIRDKQSGKTILDFLKSDGFANRNFMQLIHDDSLTFKEDIQKAQVSGQGDSLHEHIANLAGSPAIKKGILQTVKVVDELVKVMGRHKPENIVIEMARENQTTQKGQKNSRERMKRIEEGIKELGSQILKEHPVENTQLQNEKLYLYYLQNGRDMYVDQELDINRLSDYDVDHIVPQSFLKDDSIDNKVLTRSDKARGKSDNVPSEEVVKKMKNYWRQLLNAKLITQRKFDNLTKAERGGLSELDKAGFIKRQLVETRQITKHVAQILDSRMNTKYDENDKLIREVKVITLKSKLVSDFRKDFQFYKVREINNYHHAHDAYLNAVVGTALIKKYPKLESEFVYGDYKVYDVRKMIAKSEQEIGKATAKYFFYSNIMNFFKTEITLANGEIRKRPLIETNGETGEIVWDKGRDFATVRKVLSMPQVNIVKKTEVQTGGFSKESILPKRNSDKLIARKKDWDPKKYGGFDSPTVAYSVLVVAKVEKGKSKKLKSVKELLGITIMERSSFEKNPIDFLEAKGYKEVKKDLIIKLPKYSLFELENGRKRMLASAGELQKGNELALPSKYVNFLYLASHYEKLKGSPEDNEQKQLFVEQHKHYLDEIIEQISEFSKRVILADANLDKVLSAYNKHRDKPIREQAENIIHLFTLTNLGAPAAFKYFDTTIDRKRYTSTKEVLDATLIHQSITGLYETRIDLSQLGGDGGEAAAKGGGGGSGGLLGRDLLTKLKAQIQFSTEGPQVTWEDRPAMCLVLNLEEEYRLHEKPVPPSIDPSWLQLFPMVWAEKAGMGLANQVPPVVVELKSDASPVAVRQYPMSKEAREGIRPHIQRFLDLGILVPCQSPWNTPLLPVKKPGTNDYRPVQDLREVNKRVQDIHPTVPNPYNLLSSLPPSHTWYSVLDLKDAFFCLKLHPNSQPLFAFEWRDPEKGNTGQLTWTRLPQGFKNSPTLFNEALHRDLASFRALNPQVVMLQYVDDLLVAAPTYRDCKEGTRRLLQELSKLGYRVSAKKAQLCREEVTYLGYLLKGGKRWLTPARKATVMKIPTPTTPRQVREFLGKAGFCRLFIPGFASLAAPLYPLTRPKVPFTWTEAHQEAFGRIKEALLSAPALALPDLTKPFALYVDEKEGVARGVLTQTLGPWRRPVAYLSKKLDPVASGWPTCLKAIAAVALLLKDADKLTLGQNVLVIAPHNLESIVRQPPDRWMTNARMTHYQSLLLNERVSFAPPAILNPATLLPVESDDTPIHICSEILAEETGTRPDLRDQPLPGVPAWYTDGSSFIMDGRRQAGAAIVDNKRTVWASNLPEGTSAQKAELIALTQALRLAEGKSINIYTDSRYAFATAHVHGAIYKQRGWLTSAGKDIKNKEEILALLEAIHLPKRVAIIHCPGHQRGTDPVATGNRKADEAAKQAAQSTRILTETTKNAGKRTADGSEFEKRTADGSEFESPKKKAKVE

SEQ ID NO: 1737 - protein, 2127 aa, synthetic construct
MPAAKRVKLDGGDKKYSIGLDIGTNSVGWAVITDEYKVPSKKFKVLGNTDRHSIKKNLIGALLFDSGETAEATRLKRTARRRYTRRKNRICYLQEIFSNEMAKVDDSFFHRLEESFLVEEDKKHERHPIFGNIVDEVAYHEKYPTIYHLRKKLVDSTDKADLRLIYLALAHMIKFRGHFLIEGDLNPDNSDVDKLFIQLVQTYNQLFEENPINASGVDAKAILSARLSKSRRLENLIAQLPGEKKNGLFGNLIALSLGLTPNFKSNFDLAEDAKLQLSKDTYDDDLDNLLAQIGDQYADLFLAAKNLSDAILLSDILRVNTEITKAPLSASMIKRYDEHHQDLTLLKALVRQQLPEKYKEIFFDQSKNGYAGYIDGGASQEEFYKFIKPILEKMDGTEELLVKLNREDLLRKQRTFDNGSIPHQIHLGELHAILRRQEDFYPFLKDNREKIEKILTFRIPYYVGPLARGNSRFAWMTRKSEETITPWNFEEVVDKGASAQSFIERMTNFDKNLPNEKVLPKHSLLYEYFTVYNELTKVKYVTEGMRKPAFLSGEQKKAIVDLLFKTNRKVTVKQLKEDYFKKIECFDSVEISGVEDRFNASLGTYHDLLKIIKDKDFLDNEENEDILEDIVLTLTLFEDREMIEERLKTYAHLFDDKVMKQLKRRRYTGWGRLSRKLINGIRDKQSGKTILDFLKSDGFANRNFMQLIHDDSLTFKEDIQKAQVSGQGDSLHEHIANLAGSPAIKKGILQTVKVVDELVKVMGRHKPENIVIEMARENQTTQKGQKNSRERMKRIEEGIKELGSQILKEHPVENTQLQNEKLYLYYLQNGRDMYVDQELDINRLSDYDVDHIVPQSFLKDDSIDNKVLTRSDKARGKSDNVPSEEVVKKMKNYWRQLLNAKLITQRKFDNLTKAERGGLSELDKAGFIKRQLVETRQITKHVAQILDSRMNTKYDENDKLIREVKVITLKSKLVSDFRKDFQFYKVREINNYHHAHDAYLNAVVGTALIKKYPKLESEFVYGDYKVYDVRKMIAKSEQEIGKATAKYFFYSNIMNFFKTEITLANGEIRKRPLIETNGETGEIVWDKGRDFATVRKVLSMPQVNIVKKTEVQTGGFSKESILPKRNSDKLIARKKDWDPKKYGGFDSPTVAYSVLVVAKVEKGKSKKLKSVKELLGITIMERSSFEKNPIDFLEAKGYKEVKKDLIIKLPKYSLFELENGRKRMLASAGELQKGNELALPSKYVNFLYLASHYEKLKGSPEDNEQKQLFVEQHKHYLDEIIEQISEFSKRVILADANLDKVLSAYNKHRDKPIREQAENIIHLFTLTNLGAPAAFKYFDTTIDRKRYTSTKEVLDATLIHQSITGLYETRIDLSQLGGDGGGSSEAAAKGGGGGLLGRDLLTKLKAQIQFSTEGPQVTWEDRPAMCLVLNLEEEYRLHEKPVPPSIDPSWLQLFPMVWAEKAGMGLANQVPPVVVELKSDASPVAVRQYPMSKEAREGIRPHIQRFLDLGILVPCQSPWNTPLLPVKKPGTNDYRPVQDLREVNKRVQDIHPTVPNPYNLLSSLPPSHTWYSVLDLKDAFFCLKLHPNSQPLFAFEWRDPEKGNTGQLTWTRLPQGFKNSPTLFNEALHRDLASFRALNPQVVMLQYVDDLLVAAPTYRDCKEGTRRLLQELSKLGYRVSAKKAQLCREEVTYLGYLLKGGKRWLTPARKATVMKIPTPTTPRQVREFLGKAGFCRLFIPGFASLAAPLYPLTRPKVPFTWTEAHQEAFGRIKEALLSAPALALPDLTKPFALYVDEKEGVARGVLTQTLGPWRRPVAYLSKKLDPVASGWPTCLKAIAAVALLLKDADKLTLGQNVLVIAPHNLESIVRQPPDRWMTNARMTHYQSLLLNERVSFAPPAILNPATLLPVESDDTPIHICSEILAEETGTRPDLRDQPLPGVPAWYTDGSSFIMDGRRQAGAAIVDNKRTVWASNLPEGTSAQKAELIALTQALRLAEGKSINIYTDSRYAFATAHVHGAIYKQRGWLTSAGKDIKNKEEILALLEAIHLPKRVAIIHCPGHQRGTDPVATGNRKADEAAKQAAQSTRILTETTKNAGKRTADGSEFEKRTADGSEFESPKKKAKVE

SEQ ID NO: 1738 - protein, 2125 aa, synthetic construct
MPAAKRVKLDGGDKKYSIGLDIGTNSVGWAVITDEYKVPSKKFKVLGNTDRHSIKKNLIGALLFDSGETAEATRLKRTARRRYTRRKNRICYLQEIFSNEMAKVDDSFFHRLEESFLVEEDKKHERHPIFGNIVDEVAYHEKYPTIYHLRKKLVDSTDKADLRLIYLALAHMIKFRGHFLIEGDLNPDNSDVDKLFIQLVQTYNQLFEENPINASGVDAKAILSARLSKSRRLENLIAQLPGEKKNGLFGNLIALSLGLTPNFKSNFDLAEDAKLQLSKDTYDDDLDNLLAQIGDQYADLFLAAKNLSDAILLSDILRVNTEITKAPLSASMIKRYDEHHQDLTLLKALVRQQLPEKYKEIFFDQSKNGYAGYIDGGASQEEFYKFIKPILEKMDGTEELLVKLNREDLLRKQRTFDNGSIPHQIHLGELHAILRRQEDFYPFLKDNREKIEKILTFRIPYYVGPLARGNSRFAWMTRKSEETITPWNFEEVVDKGASAQSFIERMTNFDKNLPNEKVLPKHSLLYEYFTVYNELTKVKYVTEGMRKPAFLSGEQKKAIVDLLFKTNRKVTVKQLKEDYFKKIECFDSVEISGVEDRFNASLGTYHDLLKIIKDKDFLDNEENEDILEDIVLTLTLFEDREMIEERLKTYAHLFDDKVMKQLKRRRYTGWGRLSRKLINGIRDKQSGKTILDFLKSDGFANRNFMQLIHDDSLTFKEDIQKAQVSGQGDSLHEHIANLAGSPAIKKGILQTVKVVDELVKVMGRHKPENIVIEMARENQTTQKGQKNSRERMKRIEEGIKELGSQILKEHPVENTQLQNEKLYLYYLQNGRDMYVDQELDINRLSDYDVDHIVPQSFLKDDSIDNKVLTRSDKARGKSDNVPSEEVVKKMKNYWRQLLNAKLITQRKFDNLTKAERGGLSELDKAGFIKRQLVETRQITKHVAQILDSRMNTKYDENDKLIREVKVITLKSKLVSDFRKDFQFYKVREINNYHHAHDAYLNAVVGTALIKKYPKLESEFVYGDYKVYDVRKMIAKSEQEIGKATAKYFFYSNIMNFFKTEITLANGEIRKRPLIETNGETGEIVWDKGRDFATVRKVLSMPQVNIVKKTEVQTGGFSKESILPKRNSDKLIARKKDWDPKKYGGFDSPTVAYSVLVVAKVEKGKSKKLKSVKELLGITIMERSSFEKNPIDFLEAKGYKEVKKDLIIKLPKYSLFELENGRKRMLASAGELQKGNELALPSKYVNFLYLASHYEKLKGSPEDNEQKQLFVEQHKHYLDEIIEQISEFSKRVILADANLDKVLSAYNKHRDKPIREQAENIIHLFTLTNLGAPAAFKYFDTTIDRKRYTSTKEVLDATLIHQSITGLYETRIDLSQLGGDGGGSSPAPGGSGGLLGRDLLTKLKAQIQFSTEGPQVTWEDRPAMCLVLNLEEEYRLHEKPVPPSIDPSWLQLFPMVWAEKAGMGLANQVPPVVVELKSDASPVAVRQYPMSKEAREGIRPHIQRFLDLGILVPCQSPWNTPLLPVKKPGTNDYRPVQDLREVNKRVQDIHPTVPNPYNLLSSLPPSHTWYSVLDLKDAFFCLKLHPNSQPLFAFEWRDPEKGNTGQLTWTRLPQGFKNSPTLFNEALHRDLASFRALNPQVVMLQYVDDLLVAAPTYRDCKEGTRRLLQELSKLGYRVSAKKAQLCREEVTYLGYLLKGGKRWLTPARKATVMKIPTPTTPRQVREFLGKAGFCRLFIPGFASLAAPLYPLTRPKVPFTWTEAHQEAFGRIKEALLSAPALALPDLTKPFALYVDEKEGVARGVLTQTLGPWRRPVAYLSKKLDPVASGWPTCLKAIAAVALLLKDADKLTLGQNVLVIAPHNLESIVRQPPDRWMTNARMTHYQSLLLNERVSFAPPAILNPATLLPVESDDTPIHICSEILAEETGTRPDLRDQPLPGVPAWYTDGSSFIMDGRRQAGAAIVDNKRTVWASNLPEGTSAQKAELIALTQALRLAEGKSINIYTDSRYAFATAHVHGAIYKQRGWLTSAGKDIKNKEEILALLEAIHLPKRVAIIHCPGHQRGTDPVATGNRKADEAAKQAAQSTRILTETTKNAGKRTADGSEFEKRTADGSEFESPKKKAKVE

SEQ ID NO: 1739 - protein, 2131 aa, synthetic construct
MPAAKRVKLDGGDKKYSIGLDIGTNSVGWAVITDEYKVPSKKFKVLGNTDRHSIKKNLIGALLFDSGETAEATRLKRTARRRYTRRKNRICYLQEIFSNEMAKVDDSFFHRLEESFLVEEDKKHERHPIFGNIVDEVAYHEKYPTIYHLRKKLVDSTDKADLRLIYLALAHMIKFRGHFLIEGDLNPDNSDVDKLFIQLVQTYNQLFEENPINASGVDAKAILSARLSKSRRLENLIAQLPGEKKNGLFGNLIALSLGLTPNFKSNFDLAEDAKLQLSKDTYDDDLDNLLAQIGDQYADLFLAAKNLSDAILLSDILRVNTEITKAPLSASMIKRYDEHHQDLTLLKALVRQQLPEKYKEIFFDQSKNGYAGYIDGGASQEEFYKFIKPILEKMDGTEELLVKLNREDLLRKQRTFDNGSIPHQIHLGELHAILRRQEDFYPFLKDNREKIEKILTFRIPYYVGPLARGNSRFAWMTRKSEETITPWNFEEVVDKGASAQSFIERMTNFDKNLPNEKVLPKHSLLYEYFTVYNELTKVKYVTEGMRKPAFLSGEQKKAIVDLLFKTNRKVTVKQLKEDYFKKIECFDSVEISGVEDRFNASLGTYHDLLKIIKDKDFLDNEENEDILEDIVLTLTLFEDREMIEERLKTYAHLFDDKVMKQLKRRRYTGWGRLSRKLINGIRDKQSGKTILDFLKSDGFANRNFMQLIHDDSLTFKEDIQKAQVSGQGDSLHEHIANLAGSPAIKKGILQTVKVVDELVKVMGRHKPENIVIEMARENQTTQKGQKNSRERMKRIEEGIKELGSQILKEHPVENTQLQNEKLYLYYLQNGRDMYVDQELDINRLSDYDVDHIVPQSFLKDDSIDNKVLTRSDKARGKSDNVPSEEVVKKMKNYWRQLLNAKLITQRKFDNLTKAERGGLSELDKAGFIKRQLVETRQITKHVAQILDSRMNTKYDENDKLIREVKVITLKSKLVSDFRKDFQFYKVREINNYHHAHDAYLNAVVGTALIKKYPKLESEFVYGDYKVYDVRKMIAKSEQEIGKATAKYFFYSNIMNFFKTEITLANGEIRKRPLIETNGETGEIVWDKGRDFATVRKVLSMPQVNIVKKTEVQTGGFSKESILPKRNSDKLIARKKDWDPKKYGGFDSPTVAYSVLVVAKVEKGKSKKLKSVKELLGITIMERSSFEKNPIDFLEAKGYKEVKKDLIIKLPKYSLFELENGRKRMLASAGELQKGNELALPSKYVNFLYLASHYEKLKGSPEDNEQKQLFVEQHKHYLDEIIEQISEFSKRVILADANLDKVLSAYNKHRDKPIREQAENIIHLFTLTNLGAPAAFKYFDTTIDRKRYTSTKEVLDATLIHQSITGLYETRIDLSQLGGDGGGGGGSEAAAKGGGGSGGLLGRDLLTKLKAQIQFSTEGPQVTWEDRPAMCLVLNLEEEYRLHEKPVPPSIDPSWLQLFPMVWAEKAGMGLANQVPPVVVELKSDASPVAVRQYPMSKEAREGIRPHIQRFLDLGILVPCQSPWNTPLLPVKKPGTNDYRPVQDLREVNKRVQDIHPTVPNPYNLLSSLPPSHTWYSVLDLKDAFFCLKLHPNSQPLFAFEWRDPEKGNTGQLTWTRLPQGFKNSPTLFNEALHRDLASFRALNPQVVMLQYVDDLLVAAPTYRDCKEGTRRLLQELSKLGYRVSAKKAQLCREEVTYLGYLLKGGKRWLTPARKATVMKIPTPTTPRQVREFLGKAGFCRLFIPGFASLAAPLYPLTRPKVPFTWTEAHQEAFGRIKEALLSAPALALPDLTKPFALYVDEKEGVARGVLTQTLGPWRRPVAYLSKKLDPVASGWPTCLKAIAAVALLLKDADKLTLGQNVLVIAPHNLESIVRQPPDRWMTNARMTHYQSLLLNERVSFAPPAILNPATLLPVESDDTPIHICSEILAEETGTRPDLRDQPLPGVPAWYTDGSSFIMDGRRQAGAAIVDNKRTVWASNLPEGTSAQKAELIALTQALRLAEGKSINIYTDSRYAFATAHVHGAIYKQRGWLTSAGKDIKNKEEILALLEAIHLPKRVAIIHCPGHQRGTDPVATGNRKADEAAKQAAQSTRILTETTKNAGKRTADGSEFEKRTADGSEFESPKKKAKVE

SEQ ID NO: 1740 - protein, 2125 aa, synthetic construct
MPAAKRVKLDGGDKKYSIGLDIGTNSVGWAVITDEYKVPSKKFKVLGNTDRHSIKKNLIGALLFDSGETAEATRLKRTARRRYTRRKNRICYLQEIFSNEMAKVDDSFFHRLEESFLVEEDKKHERHPIFGNIVDEVAYHEKYPTIYHLRKKLVDSTDKADLRLIYLALAHMIKFRGHFLIEGDLNPDNSDVDKLFIQLVQTYNQLFEENPINASGVDAKAILSARLSKSRRLENLIAQLPGEKKNGLFGNLIALSLGLTPNFKSNFDLAEDAKLQLSKDTYDDDLDNLLAQIGDQYADLFLAAKNLSDAILLSDILRVNTEITKAPLSASMIKRYDEHHQDLTLLKALVRQQLPEKYKEIFFDQSKNGYAGYIDGGASQEEFYKFIKPILEKMDGTEELLVKLNREDLLRKQRTFDNGSIPHQIHLGELHAILRRQEDFYPFLKDNREKIEKILTFRIPYYVGPLARGNSRFAWMTRKSEETITPWNFEEVVDKGASAQSFIERMTNFDKNLPNEKVLPKHSLLYEYFTVYNELTKVKYVTEGMRKPAFLSGEQKKAIVDLLFKTNRKVTVKQLKEDYFKKIECFDSVEISGVEDRFNASLGTYHDLLKIIKDKDFLDNEENEDILEDIVLTLTLFEDREMIEERLKTYAHLFDDKVMKQLKRRRYTGWGRLSRKLINGIRDKQSGKTILDFLKSDGFANRNFMQLIHDDSLTFKEDIQKAQVSGQGDSLHEHIANLAGSPAIKKGILQTVKVVDELVKVMGRHKPENIVIEMARENQTTQKGQKNSRERMKRIEEGIKELGSQILKEHPVENTQLQNEKLYLYYLQNGRDMYVDQELDINRLSDYDVDHIVPQSFLKDDSIDNKVLTRSDKARGKSDNVPSEEVVKKMKNYWRQLLNAKLITQRKFDNLTKAERGGLSELDKAGFIKRQLVETRQITKHVAQILDSRMNTKYDENDKLIREVKVITLKSKLVSDFRKDFQFYKVREINNYHHAHDAYLNAVVGTALIKKYPKLESEFVYGDYKVYDVRKMIAKSEQEIGKATAKYFFYSNIMNFFKTEITLANGEIRKRPLIETNGETGEIVWDKGRDFATVRKVLSMPQVNIVKKTEVQTGGFSKESILPKRNSDKLIARKKDWDPKKYGGFDSPTVAYSVLVVAKVEKGKSKKLKSVKELLGITIMERSSFEKNPIDFLEAKGYKEVKKDLIIKLPKYSLFELENGRKRMLASAGELQKGNELALPSKYVNFLYLASHYEKLKGSPEDNEQKQLFVEQHKHYLDEIIEQISEFSKRVILADANLDKVLSAYNKHRDKPIREQAENIIHLFTLTNLGAPAAFKYFDTTIDRKRYTSTKEVLDATLIHQSITGLYETRIDLSQLGGDGGPAPGGSGGGGGLLGRDLLTKLKAQIQFSTEGPQVTWEDRPAMCLVLNLEEEYRLHEKPVPPSIDPSWLQLFPMVWAEKAGMGLANQVPPVVVELKSDASPVAVRQYPMSKEAREGIRPHIQRFLDLGILVPCQSPWNTPLLPVKKPGTNDYRPVQDLREVNKRVQDIHPTVPNPYNLLSSLPPSHTWYSVLDLKDAFFCLKLHPNSQPLFAFEWRDPEKGNTGQLTWTRLPQGFKNSPTLFNEALHRDLASFRALNPQVVMLQYVDDLLVAAPTYRDCKEGTRRLLQELSKLGYRVSAKKAQLCREEVTYLGYLLKGGKRWLTPARKATVMKIPTPTTPRQVREFLGKAGFCRLFIPGFASLAAPLYPLTRPKVPFTWTEAHQEAFGRIKEALLSAPALALPDLTKPFALYVDEKEGVARGVLTQTLGPWRRPVAYLSKKLDPVASGWPTCLKAIAAVALLLKDADKLTLGQNVLVIAPHNLESIVRQPPDRWMTNARMTHYQSLLLNERVSFAPPAILNPATLLPVESDDTPIHICSEILAEETGTRPDLRDQPLPGVPAWYTDGSSFIMDGRRQAGAAIVDNKRTVWASNLPEGTSAQKAELIALTQALRLAEGKSINIYTDSRYAFATAHVHGAIYKQRGWLTSAGKDIKNKEEILALLEAIHLPKRVAIIHCPGHQRGTDPVATGNRKADEAAKQAAQSTRILTETTKNAGKRTADGSEFEKRTADGSEFESPKKKAKVE

SEQ ID NO: 1741 - protein, 2127 aa, synthetic construct
MPAAKRVKLDGGDKKYSIGLDIGTNSVGWAVITDEYKVPSKKFKVLGNTDRHSIKKNLIGALLFDSGETAEATRLKRTARRRYTRRKNRICYLQEIFSNEMAKVDDSFFHRLEESFLVEEDKKHERHPIFGNIVDEVAYHEKYPTIYHLRKKLVDSTDKADLRLIYLALAHMIKFRGHFLIEGDLNPDNSDVDKLFIQLVQTYNQLFEENPINASGVDAKAILSARLSKSRRLENLIAQLPGEKKNGLFGNLIALSLGLTPNFKSNFDLAEDAKLQLSKDTYDDDLDNLLAQIGDQYADLFLAAKNLSDAILLSDILRVNTEITKAPLSASMIKRYDEHHQDLTLLKALVRQQLPEKYKEIFFDQSKNGYAGYIDGGASQEEFYKFIKPILEKMDGTEELLVKLNREDLLRKQRTFDNGSIPHQIHLGELHAILRRQEDFYPFLKDNREKIEKILTFRIPYYVGPLARGNSRFAWMTRKSEETITPWNFEEVVDKGASAQSFIERMTNFDKNLPNEKVLPKHSLLYEYFTVYNELTKVKYVTEGMRKPAFLSGEQKKAIVDLLFKTNRKVTVKQLKEDYFKKIECFDSVEISGVEDRFNASLGTYHDLLKIIKDKDFLDNEENEDILEDIVLTLTLFEDREMIEERLKTYAHLFDDKVMKQLKRRRYTGWGRLSRKLINGIRDKQSGKTILDFLKSDGFANRNFMQLIHDDSLTFKEDIQKAQVSGQGDSLHEHIANLAGSPAIKKGILQTVKVVDELVKVMGRHKPENIVIEMARENQTTQKGQKNSRERMKRIEEGIKELGSQILKEHPVENTQLQNEKLYLYYLQNGRDMYVDQELDINRLSDYDVDHIVPQSFLKDDSIDNKVLTRSDKARGKSDNVPSEEVVKKMKNYWRQLLNAKLITQRKFDNLTKAERGGLSELDKAGFIKRQLVETRQITKHVAQILDSRMNTKYDENDKLIREVKVITLKSKLVSDFRKDFQFYKVREINNYHHAHDAYLNAVVGTALIKKYPKLESEFVYGDYKVYDVRKMIAKSEQEIGKATAKYFFYSNIMNFFKTEITLANGEIRKRPLIETNGETGEIVWDKGRDFATVRKVLSMPQVNIVKKTEVQTGGFSKESILPKRNSDKLIARKKDWDPKKYGGFDSPTVAYSVLVVAKVEKGKSKKLKSVKELLGITIMERSSFEKNPIDFLEAKGYKEVKKDLIIKLPKYSLFELENGRKRMLASAGELQKGNELALPSKYVNFLYLASHYEKLKGSPEDNEQKQLFVEQHKHYLDEIIEQISEFSKRVILADANLDKVLSAYNKHRDKPIREQAENIIHLFTLTNLGAPAAFKYFDTTIDRKRYTSTKEVLDATLIHQSITGLYETRIDLSQLGGDGGGGSGGGEAAAKGGLLGRDLLTKLKAQIQFSTEGPQVTWEDRPAMCLVLNLEEEYRLHEKPVPPSIDPSWLQLFPMVWAEKAGMGLANQVPPVVVELKSDASPVAVRQYPMSKEAREGIRPHIQRFLDLGILVPCQSPWNTPLLPVKKPGTNDYRPVQDLREVNKRVQDIHPTVPNPYNLLSSLPPSHTWYSVLDLKDAFFCLKLHPNSQPLFAFEWRDPEKGNTGQLTWTRLPQGFKNSPTLFNEALHRDLASFRALNPQVVMLQYVDDLLVAAPTYRDCKEGTRRLLQELSKLGYRVSAKKAQLCREEVTYLGYLLKGGKRWLTPARKATVMKIPTPTTPRQVREFLGKAGFCRLFIPGFASLAAPLYPLTRPKVPFTWTEAHQEAFGRIKEALLSAPALALPDLTKPFALYVDEKEGVARGVLTQTLGPWRRPVAYLSKKLDPVASGWPTCLKAIAAVALLLKDADKLTLGQNVLVIAPHNLESIVRQPPDRWMTNARMTHYQSLLLNERVSFAPPAILNPATLLPVESDDTPIHICSEILAEETGTRPDLRDQPLPGVPAWYTDGSSFIMDGRRQAGAAIVDNKRTVWASNLPEGTSAQKAELIALTQALRLAEGKSINIYTDSRYAFATAHVHGAIYKQRGWLTSAGKDIKNKEEILALLEAIHLPKRVAIIHCPGHQRGTDPVATGNRKADEAAKQAAQSTRILTETTKNAGKRTADGSEFEKRTADGSEFESPKKKAKVE

SEQ ID NO: 1742 - protein, 2122 aa, synthetic construct
MPAAKRVKLDGGDKKYSIGLDIGTNSVGWAVITDEYKVPSKKFKVLGNTDRHSIKKNLIGALLFDSGETAEATRLKRTARRRYTRRKNRICYLQEIFSNEMAKVDDSFFHRLEESFLVEEDKKHERHPIFGNIVDEVAYHEKYPTIYHLRKKLVDSTDKADLRLIYLALAHMIKFRGHFLIEGDLNPDNSDVDKLFIQLVQTYNQLFEENPINASGVDAKAILSARLSKSRRLENLIAQLPGEKKNGLFGNLIALSLGLTPNFKSNFDLAEDAKLQLSKDTYDDDLDNLLAQIGDQYADLFLAAKNLSDAILLSDILRVNTEITKAPLSASMIKRYDEHHQDLTLLKALVRQQLPEKYKEIFFDQSKNGYAGYIDGGASQEEFYKFIKPILEKMDGTEELLVKLNREDLLRKQRTFDNGSIPHQIHLGELHAILRRQEDFYPFLKDNREKIEKILTFRIPYYVGPLARGNSRFAWMTRKSEETITPWNFEEVVDKGASAQSFIERMTNFDKNLPNEKVLPKHSLLYEYFTVYNELTKVKYVTEGMRKPAFLSGEQKKAIVDLLFKTNRKVTVKQLKEDYFKKIECFDSVEISGVEDRFNASLGTYHDLLKIIKDKDFLDNEENEDILEDIVLTLTLFEDREMIEERLKTYAHLFDDKVMKQLKRRRYTGWGRLSRKLINGIRDKQSGKTILDFLKSDGFANRNFMQLIHDDSLTFKEDIQKAQVSGQGDSLHEHIANLAGSPAIKKGILQTVKVVDELVKVMGRHKPENIVIEMARENQTTQKGQKNSRERMKRIEEGIKELGSQILKEHPVENTQLQNEKLYLYYLQNGRDMYVDQELDINRLSDYDVDHIVPQSFLKDDSIDNKVLTRSDKARGKSDNVPSEEVVKKMKNYWRQLLNAKLITQRKFDNLTKAERGGLSELDKAGFIKRQLVETRQITKHVAQILDSRMNTKYDENDKLIREVKVITLKSKLVSDFRKDFQFYKVREINNYHHAHDAYLNAVVGTALIKKYPKLESEFVYGDYKVYDVRKMIAKSEQEIGKATAKYFFYSNIMNFFKTEITLANGEIRKRPLIETNGETGEIVWDKGRDFATVRKVLSMPQVNIVKKTEVQTGGFSKESILPKRNSDKLIARKKDWDPKKYGGFDSPTVAYSVLVVAKVEKGKSKKLKSVKELLGITIMERSSFEKNPIDFLEAKGYKEVKKDLIIKLPKYSLFELENGRKRMLASAGELQKGNELALPSKYVNFLYLASHYEKLKGSPEDNEQKQLFVEQHKHYLDEIIEQISEFSKRVILADANLDKVLSAYNKHRDKPIREQAENIIHLFTLTNLGAPAAFKYFDTTIDRKRYTSTKEVLDATLIHQSITGLYETRIDLSQLGGDGGGSSGGSGGLLGRDLLTKLKAQIQFSTEGPQVTWEDRPAMCLVLNLEEEYRLHEKPVPPSIDPSWLQLFPMVWAEKAGMGLANQVPPVVVELKSDASPVAVRQYPMSKEAREGIRPHIQRFLDLGILVPCQSPWNTPLLPVKKPGTNDYRPVQDLREVNKRVQDIHPTVPNPYNLLSSLPPSHTWYSVLDLKDAFFCLKLHPNSQPLFAFEWRDPEKGNTGQLTWTRLPQGFKNSPTLFNEALHRDLASFRALNPQVVMLQYVDDLLVAAPTYRDCKEGTRRLLQELSKLGYRVSAKKAQLCREEVTYLGYLLKGGKRWLTPARKATVMKIPTPTTPRQVREFLGKAGFCRLFIPGFASLAAPLYPLTRPKVPFTWTEAHQEAFGRIKEALLSAPALALPDLTKPFALYVDEKEGVARGVLTQTLGPWRRPVAYLSKKLDPVASGWPTCLKAIAAVALLLKDADKLTLGQNVLVIAPHNLESIVRQPPDRWMTNARMTHYQSLLLNERVSFAPPAILNPATLLPVESDDTPIHICSEILAEETGTRPDLRDQPLPGVPAWYTDGSSFIMDGRRQAGAAIVDNKRTVWASNLPEGTSAQKAELIALTQALRLAEGKSINIYTDSRYAFATAHVHGAIYKQRGWLTSAGKDIKNKEEILALLEAIHLPKRVAIIHCPGHQRGTDPVATGNRKADEAAKQAAQSTRILTETTKNAGKRTADGSEFEKRTADGSEFESPKKKAKVE

SEQ ID NO: 1743 - protein, 2124 aa, synthetic construct
MPAAKRVKLDGGDKKYSIGLDIGTNSVGWAVITDEYKVPSKKFKVLGNTDRHSIKKNLIGALLFDSGETAEATRLKRTARRRYTRRKNRICYLQEIFSNEMAKVDDSFFHRLEESFLVEEDKKHERHPIFGNIVDEVAYHEKYPTIYHLRKKLVDSTDKADLRLIYLALAHMIKFRGHFLIEGDLNPDNSDVDKLFIQLVQTYNQLFEENPINASGVDAKAILSARLSKSRRLENLIAQLPGEKKNGLFGNLIALSLGLTPNFKSNFDLAEDAKLQLSKDTYDDDLDNLLAQIGDQYADLFLAAKNLSDAILLSDILRVNTEITKAPLSASMIKRYDEHHQDLTLLKALVRQQLPEKYKEIFFDQSKNGYAGYIDGGASQEEFYKFIKPILEKMDGTEELLVKLNREDLLRKQRTFDNGSIPHQIHLGELHAILRRQEDFYPFLKDNREKIEKILTFRIPYYVGPLARGNSRFAWMTRKSEETITPWNFEEVVDKGASAQSFIERMTNFDKNLPNEKVLPKHSLLYEYFTVYNELTKVKYVTEGMRKPAFLSGEQKKAIVDLLFKTNRKVTVKQLKEDYFKKIECFDSVEISGVEDRFNASLGTYHDLLKIIKDKDFLDNEENEDILEDIVLTLTLFEDREMIEERLKTYAHLFDDKVMKQLKRRRYTGWGRLSRKLINGIRDKQSGKTILDFLKSDGFANRNFMQLIHDDSLTFKEDIQKAQVSGQGDSLHEHIANLAGSPAIKKGILQTVKVVDELVKVMGRHKPENIVIEMARENQTTQKGQKNSRERMKRIEEGIKELGSQILKEHPVENTQLQNEKLYLYYLQNGRDMYVDQELDINRLSDYDVDHIVPQSFLKDDSIDNKVLTRSDKARGKSDNVPSEEVVKKMKNYWRQLLNAKLITQRKFDNLTKAERGGLSELDKAGFIKRQLVETRQITKHVAQILDSRMNTKYDENDKLIREVKVITLKSKLVSDFRKDFQFYKVREINNYHHAHDAYLNAVVGTALIKKYPKLESEFVYGDYKVYDVRKMIAKSEQEIGKATAKYFFYSNIMNFFKTEITLANGEIRKRPLIETNGETGEIVWDKGRDFATVRKVLSMPQVNIVKKTEVQTGGFSKESILPKRNSDKLIARKKDWDPKKYGGFDSPTVAYSVLVVAKVEKGKSKKLKSVKELLGITIMERSSFEKNPIDFLEAKGYKEVKKDLIIKLPKYSLFELENGRKRMLASAGELQKGNELALPSKYVNFLYLASHYEKLKGSPEDNEQKQLFVEQHKHYLDEIIEQISEFSKRVILADANLDKVLSAYNKHRDKPIREQAENIIHLFTLTNLGAPAAFKYFDTTIDRKRYTSTKEVLDATLIHQSITGLYETRIDLSQLGGDGGGGSEAAAKGGLLGRDLLTKLKAQIQFSTEGPQVTWEDRPAMCLVLNLEEEYRLHEKPVPPSIDPSWLQLFPMVWAEKAGMGLANQVPPVVVELKSDASPVAVRQYPMSKEAREGIRPHIQRFLDLGILVPCQSPWNTPLLPVKKPGTNDYRPVQDLREVNKRVQDIHPTVPNPYNLLSSLPPSHTWYSVLDLKDAFFCLKLHPNSQPLFAFEWRDPEKGNTGQLTWTRLPQGFKNSPTLFNEALHRDLASFRALNPQVVMLQYVDDLLVAAPTYRDCKEGTRRLLQELSKLGYRVSAKKAQLCREEVTYLGYLLKGGKRWLTPARKATVMKIPTPTTPRQVREFLGKAGFCRLFIPGFASLAAPLYPLTRPKVPFTWTEAHQEAFGRIKEALLSAPALALPDLTKPFALYVDEKEGVARGVLTQTLGPWRRPVAYLSKKLDPVASGWPTCLKAIAAVALLLKDADKLTLGQNVLVIAPHNLESIVRQPPDRWMTNARMTHYQSLLLNERVSFAPPAILNPATLLPVESDDTPIHICSEILAEETGTRPDLRDQPLPGVPAWYTDGSSFIMDGRRQAGAAIVDNKRTVWASNLPEGTSAQKAELIALTQALRLAEGKSINIYTDSRYAFATAHVHGAIYKQRGWLTSAGKDIKNKEEILALLEAIHLPKRVAIIHCPGHQRGTDPVATGNRKADEAAKQAAQSTRILTETTKNAGKRTADGSEFEKRTADGSEFESPKKKAKVE

SEQ ID NO: 1744 - protein, 2141 aa, synthetic construct
MPAAKRVKLDGGDKKYSIGLDIGTNSVGWAVITDEYKVPSKKFKVLGNTDRHSIKKNLIGALLFDSGETAEATRLKRTARRRYTRRKNRICYLQEIFSNEMAKVDDSFFHRLEESFLVEEDKKHERHPIFGNIVDEVAYHEKYPTIYHLRKKLVDSTDKADLRLIYLALAHMIKFRGHFLIEGDLNPDNSDVDKLFIQLVQTYNQLFEENPINASGVDAKAILSARLSKSRRLENLIAQLPGEKKNGLFGNLIALSLGLTPNFKSNFDLAEDAKLQLSKDTYDDDLDNLLAQIGDQYADLFLAAKNLSDAILLSDILRVNTEITKAPLSASMIKRYDEHHQDLTLLKALVRQQLPEKYKEIFFDQSKNGYAGYIDGGASQEEFYKFIKPILEKMDGTEELLVKLNREDLLRKQRTFDNGSIPHQIHLGELHAILRRQEDFYPFLKDNREKIEKILTFRIPYYVGPLARGNSRFAWMTRKSEETITPWNFEEVVDKGASAQSFIERMTNFDKNLPNEKVLPKHSLLYEYFTVYNELTKVKYVTEGMRKPAFLSGEQKKAIVDLLFKTNRKVTVKQLKEDYFKKIECFDSVEISGVEDRFNASLGTYHDLLKIIKDKDFLDNEENEDILEDIVLTLTLFEDREMIEERLKTYAHLFDDKVMKQLKRRRYTGWGRLSRKLINGIRDKQSGKTILDFLKSDGFANRNFMQLIHDDSLTFKEDIQKAQVSGQGDSLHEHIANLAGSPAIKKGILQTVKVVDELVKVMGRHKPENIVIEMARENQTTQKGQKNSRERMKRIEEGIKELGSQILKEHPVENTQLQNEKLYLYYLQNGRDMYVDQELDINRLSDYDVDHIVPQSFLKDDSIDNKVLTRSDKARGKSDNVPSEEVVKKMKNYWRQLLNAKLITQRKFDNLTKAERGGLSELDKAGFIKRQLVETRQITKHVAQILDSRMNTKYDENDKLIREVKVITLKSKLVSDFRKDFQFYKVREINNYHHAHDAYLNAVVGTALIKKYPKLESEFVYGDYKVYDVRKMIAKSEQEIGKATAKYFFYSNIMNFFKTEITLANGEIRKRPLIETNGETGEIVWDKGRDFATVRKVLSMPQVNIVKKTEVQTGGFSKESILPKRNSDKLIARKKDWDPKKYGGFDSPTVAYSVLVVAKVEKGKSKKLKSVKELLGITIMERSSFEKNPIDFLEAKGYKEVKKDLIIKLPKYSLFELENGRKRMLASAGELQKGNELALPSKYVNFLYLASHYEKLKGSPEDNEQKQLFVEQHKHYLDEIIEQISEFSKRVILADANLDKVLSAYNKHRDKPIREQAENIIHLFTLTNLGAPAAFKYFDTTIDRKRYTSTKEVLDATLIHQSITGLYETRIDLSQLGGDGGEAAAKEAAAKEAAAKEAAAKEAAAKGGLLGRDLLTKLKAQIQFSTEGPQVTWEDRPAMCLVLNLEEEYRLHEKPVPPSIDPSWLQLFPMVWAEKAGMGLANQVPPVVVELKSDASPVAVRQYPMSKEAREGIRPHIQRFLDLGILVPCQSPWNTPLLPVKKPGTNDYRPVQDLREVNKRVQDIHPTVPNPYNLLSSLPPSHTWYSVLDLKDAFFCLKLHPNSQPLFAFEWRDPEKGNTGQLTWTRLPQGFKNSPTLFNEALHRDLASFRALNPQVVMLQYVDDLLVAAPTYRDCKEGTRRLLQELSKLGYRVSAKKAQLCREEVTYLGYLLKGGKRWLTPARKATVMKIPTPTTPRQVREFLGKAGFCRLFIPGFASLAAPLYPLTRPKVPFTWTEAHQEAFGRIKEALLSAPALALPDLTKPFALYVDEKEGVARGVLTQTLGPWRRPVAYLSKKLDPVASGWPTCLKAIAAVALLLKDADKLTLGQNVLVIAPHNLESIVRQPPDRWMTNARMTHYQSLLLNERVSFAPPAILNPATLLPVESDDTPIHICSEILAEETGTRPDLRDQPLPGVPAWYTDGSSFIMDGRRQAGAAIVDNKRTVWASNLPEGTSAQKAELIALTQALRLAEGKSINIYTDSRYAFATAHVHGAIYKQRGWLTSAGKDIKNKEEILALLEAIHLPKRVAIIHCPGHQRGTDPVATGNRKADEAAKQAAQSTRILTETTKNAGKRTADGSEFEKRTADGSEFESPKKKAKVE

SEQ ID NO: 1745 - protein, 2125 aa, synthetic construct
MPAAKRVKLDGGDKKYSIGLDIGTNSVGWAVITDEYKVPSKKFKVLGNTDRHSIKKNLIGALLFDSGETAEATRLKRTARRRYTRRKNRICYLQEIFSNEMAKVDDSFFHRLEESFLVEEDKKHERHPIFGNIVDEVAYHEKYPTIYHLRKKLVDSTDKADLRLIYLALAHMIKFRGHFLIEGDLNPDNSDVDKLFIQLVQTYNQLFEENPINASGVDAKAILSARLSKSRRLENLIAQLPGEKKNGLFGNLIALSLGLTPNFKSNFDLAEDAKLQLSKDTYDDDLDNLLAQIGDQYADLFLAAKNLSDAILLSDILRVNTEITKAPLSASMIKRYDEHHQDLTLLKALVRQQLPEKYKEIFFDQSKNGYAGYIDGGASQEEFYKFIKPILEKMDGTEELLVKLNREDLLRKQRTFDNGSIPHQIHLGELHAILRRQEDFYPFLKDNREKIEKILTFRIPYYVGPLARGNSRFAWMTRKSEETITPWNFEEVVDKGASAQSFIERMTNFDKNLPNEKVLPKHSLLYEYFTVYNELTKVKYVTEGMRKPAFLSGEQKKAIVDLLFKTNRKVTVKQLKEDYFKKIECFDSVEISGVEDRFNASLGTYHDLLKIIKDKDFLDNEENEDILEDIVLTLTLFEDREMIEERLKTYAHLFDDKVMKQLKRRRYTGWGRLSRKLINGIRDKQSGKTILDFLKSDGFANRNFMQLIHDDSLTFKEDIQKAQVSGQGDSLHEHIANLAGSPAIKKGILQTVKVVDELVKVMGRHKPENIVIEMARENQTTQKGQKNSRERMKRIEEGIKELGSQILKEHPVENTQLQNEKLYLYYLQNGRDMYVDQELDINRLSDYDVDHIVPQSFLKDDSIDNKVLTRSDKARGKSDNVPSEEVVKKMKNYWRQLLNAKLITQRKFDNLTKAERGGLSELDKAGFIKRQLVETRQITKHVAQILDSRMNTKYDENDKLIREVKVITLKSKLVSDFRKDFQFYKVREINNYHHAHDAYLNAVVGTALIKKYPKLESEFVYGDYKVYDVRKMIAKSEQEIGKATAKYFFYSNIMNFFKTEITLANGEIRKRPLIETNGETGEIVWDKGRDFATVRKVLSMPQVNIVKKTEVQTGGFSKESILPKRNSDKLIARKKDWDPKKYGGFDSPTVAYSVLVVAKVEKGKSKKLKSVKELLGITIMERSSFEKNPIDFLEAKGYKEVKKDLIIKLPKYSLFELENGRKRMLASAGELQKGNELALPSKYVNFLYLASHYEKLKGSPEDNEQKQLFVEQHKHYLDEIIEQISEFSKRVILADANLDKVLSAYNKHRDKPIREQAENIIHLFTLTNLGAPAAFKYFDTTIDRKRYTSTKEVLDATLIHQSITGLYETRIDLSQLGGDGGGGGGGSPAPGGLLGRDLLTKLKAQIQFSTEGPQVTWEDRPAMCLVLNLEEEYRLHEKPVPPSIDPSWLQLFPMVWAEKAGMGLANQVPPVVVELKSDASPVAVRQYPMSKEAREGIRPHIQRFLDLGILVPCQSPWNTPLLPVKKPGTNDYRPVQDLREVNKRVQDIHPTVPNPYNLLSSLPPSHTWYSVLDLKDAFFCLKLHPNSQPLFAFEWRDPEKGNTGQLTWTRLPQGFKNSPTLFNEALHRDLASFRALNPQVVMLQYVDDLLVAAPTYRDCKEGTRRLLQELSKLGYRVSAKKAQLCREEVTYLGYLLKGGKRWLTPARKATVMKIPTPTTPRQVREFLGKAGFCRLFIPGFASLAAPLYPLTRPKVPFTWTEAHQEAFGRIKEALLSAPALALPDLTKPFALYVDEKEGVARGVLTQTLGPWRRPVAYLSKKLDPVASGWPTCLKAIAAVALLLKDADKLTLGQNVLVIAPHNLESIVRQPPDRWMTNARMTHYQSLLLNERVSFAPPAILNPATLLPVESDDTPIHICSEILAEETGTRPDLRDQPLPGVPAWYTDGSSFIMDGRRQAGAAIVDNKRTVWASNLPEGTSAQKAELIALTQALRLAEGKSINIYTDSRYAFATAHVHGAIYKQRGWLTSAGKDIKNKEEILALLEAIHLPKRVAIIHCPGHQRGTDPVATGNRKADEAAKQAAQSTRILTETTKNAGKRTADGSEFEKRTADGSEFESPKKKAKVE

SEQ ID NO: 1746 - protein, 2124 aa, synthetic construct
MPAAKRVKLDGGDKKYSIGLDIGTNSVGWAVITDEYKVPSKKFKVLGNTDRHSIKKNLIGALLFDSGETAEATRLKRTARRRYTRRKNRICYLQEIFSNEMAKVDDSFFHRLEESFLVEEDKKHERHPIFGNIVDEVAYHEKYPTIYHLRKKLVDSTDKADLRLIYLALAHMIKFRGHFLIEGDLNPDNSDVDKLFIQLVQTYNQLFEENPINASGVDAKAILSARLSKSRRLENLIAQLPGEKKNGLFGNLIALSLGLTPNFKSNFDLAEDAKLQLSKDTYDDDLDNLLAQIGDQYADLFLAAKNLSDAILLSDILRVNTEITKAPLSASMIKRYDEHHQDLTLLKALVRQQLPEKYKEIFFDQSKNGYAGYIDGGASQEEFYKFIKPILEKMDGTEELLVKLNREDLLRKQRTFDNGSIPHQIHLGELHAILRRQEDFYPFLKDNREKIEKILTFRIPYYVGPLARGNSRFAWMTRKSEETITPWNFEEVVDKGASAQSFIERMTNFDKNLPNEKVLPKHSLLYEYFTVYNELTKVKYVTEGMRKPAFLSGEQKKAIVDLLFKTNRKVTVKQLKEDYFKKIECFDSVEISGVEDRFNASLGTYHDLLKIIKDKDFLDNEENEDILEDIVLTLTLFEDREMIEERLKTYAHLFDDKVMKQLKRRRYTGWGRLSRKLINGIRDKQSGKTILDFLKSDGFANRNFMQLIHDDSLTFKEDIQKAQVSGQGDSLHEHIANLAGSPAIKKGILQTVKVVDELVKVMGRHKPENIVIEMARENQTTQKGQKNSRERMKRIEEGIKELGSQILKEHPVENTQLQNEKLYLYYLQNGRDMYVDQELDINRLSDYDVDHIVPQSFLKDDSIDNKVLTRSDKARGKSDNVPSEEVVKKMKNYWRQLLNAKLITQRKFDNLTKAERGGLSELDKAGFIKRQLVETRQITKHVAQILDSRMNTKYDENDKLIREVKVITLKSKLVSDFRKDFQFYKVREINNYHHAHDAYLNAVVGTALIKKYPKLESEFVYGDYKVYDVRKMIAKSEQEIGKATAKYFFYSNIMNFFKTEITLANGEIRKRPLIETNGETGEIVWDKGRDFATVRKVLSMPQVNIVKKTEVQTGGFSKESILPKRNSDKLIARKKDWDPKKYGGFDSPTVAYSVLVVAKVEKGKSKKLKSVKELLGITIMERSSFEKNPIDFLEAKGYKEVKKDLIIKLPKYSLFELENGRKRMLASAGELQKGNELALPSKYVNFLYLASHYEKLKGSPEDNEQKQLFVEQHKHYLDEIIEQISEFSKRVILADANLDKVLSAYNKHRDKPIREQAENIIHLFTLTNLGAPAAFKYFDTTIDRKRYTSTKEVLDATLIHQSITGLYETRIDLSQLGGDGGEAAAKGGGGGLLGRDLLTKLKAQIQFSTEGPQVTWEDRPAMCLVLNLEEEYRLHEKPVPPSIDPSWLQLFPMVWAEKAGMGLANQVPPVVVELKSDASPVAVRQYPMSKEAREGIRPHIQRFLDLGILVPCQSPWNTPLLPVKKPGTNDYRPVQDLREVNKRVQDIHPTVPNPYNLLSSLPPSHTWYSVLDLKDAFFCLKLHPNSQPLFAFEWRDPEKGNTGQLTWTRLPQGFKNSPTLFNEALHRDLASFRALNPQVVMLQYVDDLLVAAPTYRDCKEGTRRLLQELSKLGYRVSAKKAQLCREEVTYLGYLLKGGKRWLTPARKATVMKIPTPTTPRQVREFLGKAGFCRLFIPGFASLAAPLYPLTRPKVPFTWTEAHQEAFGRIKEALLSAPALALPDLTKPFALYVDEKEGVARGVLTQTLGPWRRPVAYLSKKLDPVASGWPTCLKAIAAVALLLKDADKLTLGQNVLVIAPHNLESIVRQPPDRWMTNARMTHYQSLLLNERVSFAPPAILNPATLLPVESDDTPIHICSEILAEETGTRPDLRDQPLPGVPAWYTDGSSFIMDGRRQAGAAIVDNKRTVWASNLPEGTSAQKAELIALTQALRLAEGKSINIYTDSRYAFATAHVHGAIYKQRGWLTSAGKDIKNKEEILALLEAIHLPKRVAIIHCPGHQRGTDPVATGNRKADEAAKQAAQSTRILTETTKNAGKRTADGSEFEKRTADGSEFESPKKKAKVE

SEQ ID NO: 1747 - protein, 2122 aa, synthetic construct
MPAAKRVKLDGGDKKYSIGLDIGTNSVGWAVITDEYKVPSKKFKVLGNTDRHSIKKNLIGALLFDSGETAEATRLKRTARRRYTRRKNRICYLQEIFSNEMAKVDDSFFHRLEESFLVEEDKKHERHPIFGNIVDEVAYHEKYPTIYHLRKKLVDSTDKADLRLIYLALAHMIKFRGHFLIEGDLNPDNSDVDKLFIQLVQTYNQLFEENPINASGVDAKAILSARLSKSRRLENLIAQLPGEKKNGLFGNLIALSLGLTPNFKSNFDLAEDAKLQLSKDTYDDDLDNLLAQIGDQYADLFLAAKNLSDAILLSDILRVNTEITKAPLSASMIKRYDEHHQDLTLLKALVRQQLPEKYKEIFFDQSKNGYAGYIDGGASQEEFYKFIKPILEKMDGTEELLVKLNREDLLRKQRTFDNGSIPHQIHLGELHAILRRQEDFYPFLKDNREKIEKILTFRIPYYVGPLARGNSRFAWMTRKSEETITPWNFEEVVDKGASAQSFIERMTNFDKNLPNEKVLPKHSLLYEYFTVYNELTKVKYVTEGMRKPAFLSGEQKKAIVDLLFKTNRKVTVKQLKEDYFKKIECFDSVEISGVEDRFNASLGTYHDLLKIIKDKDFLDNEENEDILEDIVLTLTLFEDREMIEERLKTYAHLFDDKVMKQLKRRRYTGWGRLSRKLINGIRDKQSGKTILDFLKSDGFANRNFMQLIHDDSLTFKEDIQKAQVSGQGDSLHEHIANLAGSPAIKKGILQTVKVVDELVKVMGRHKPENIVIEMARENQTTQKGQKNSRERMKRIEEGIKELGSQILKEHPVENTQLQNEKLYLYYLQNGRDMYVDQELDINRLSDYDVDHIVPQSFLKDDSIDNKVLTRSDKARGKSDNVPSEEVVKKMKNYWRQLLNAKLITQRKFDNLTKAERGGLSELDKAGFIKRQLVETRQITKHVAQILDSRMNTKYDENDKLIREVKVITLKSKLVSDFRKDFQFYKVREINNYHHAHDAYLNAVVGTALIKKYPKLESEFVYGDYKVYDVRKMIAKSEQEIGKATAKYFFYSNIMNFFKTEITLANGEIRKRPLIETNGETGEIVWDKGRDFATVRKVLSMPQVNIVKKTEVQTGGFSKESILPKRNSDKLIARKKDWDPKKYGGFDSPTVAYSVLVVAKVEKGKSKKLKSVKELLGITIMERSSFEKNPIDFLEAKGYKEVKKDLIIKLPKYSLFELENGRKRMLASAGELQKGNELALPSKYVNFLYLASHYEKLKGSPEDNEQKQLFVEQHKHYLDEIIEQISEFSKRVILADANLDKVLSAYNKHRDKPIREQAENIIHLFTLTNLGAPAAFKYFDTTIDRKRYTSTKEVLDATLIHQSITGLYETRIDLSQLGGDGGGSSGSSGGLLGRDLLTKLKAQIQFSTEGPQVTWEDRPAMCLVLNLEEEYRLHEKPVPPSIDPSWLQLFPMVWAEKAGMGLANQVPPVVVELKSDASPVAVRQYPMSKEAREGIRPHIQRFLDLGILVPCQSPWNTPLLPVKKPGTNDYRPVQDLREVNKRVQDIHPTVPNPYNLLSSLPPSHTWYSVLDLKDAFFCLKLHPNSQPLFAFEWRDPEKGNTGQLTWTRLPQGFKNSPTLFNEALHRDLASFRALNPQVVMLQYVDDLLVAAPTYRDCKEGTRRLLQELSKLGYRVSAKKAQLCREEVTYLGYLLKGGKRWLTPARKATVMKIPTPTTPRQVREFLGKAGFCRLFIPGFASLAAPLYPLTRPKVPFTWTEAHQEAFGRIKEALLSAPALALPDLTKPFALYVDEKEGVARGVLTQTLGPWRRPVAYLSKKLDPVASGWPTCLKAIAAVALLLKDADKLTLGQNVLVIAPHNLESIVRQPPDRWMTNARMTHYQSLLLNERVSFAPPAILNPATLLPVESDDTPIHICSEILAEETGTRPDLRDQPLPGVPAWYTDGSSFIMDGRRQAGAAIVDNKRTVWASNLPEGTSAQKAELIALTQALRLAEGKSINIYTDSRYAFATAHVHGAIYKQRGWLTSAGKDIKNKEEILALLEAIHLPKRVAIIHCPGHQRGTDPVATGNRKADEAAKQAAQSTRILTETTKNAGKRTADGSEFEKRTADGSEFESPKKKAKVE

SEQ ID NO: 1748 - protein, 2122 aa, synthetic construct
MPAAKRVKLDGGDKKYSIGLDIGTNSVGWAVITDEYKVPSKKFKVLGNTDRHSIKKNLIGALLFDSGETAEATRLKRTARRRYTRRKNRICYLQEIFSNEMAKVDDSFFHRLEESFLVEEDKKHERHPIFGNIVDEVAYHEKYPTIYHLRKKLVDSTDKADLRLIYLALAHMIKFRGHFLIEGDLNPDNSDVDKLFIQLVQTYNQLFEENPINASGVDAKAILSARLSKSRRLENLIAQLPGEKKNGLFGNLIALSLGLTPNFKSNFDLAEDAKLQLSKDTYDDDLDNLLAQIGDQYADLFLAAKNLSDAILLSDILRVNTEITKAPLSASMIKRYDEHHQDLTLLKALVRQQLPEKYKEIFFDQSKNGYAGYIDGGASQEEFYKFIKPILEKMDGTEELLVKLNREDLLRKQRTFDNGSIPHQIHLGELHAILRRQEDFYPFLKDNREKIEKILTFRIPYYVGPLARGNSRFAWMTRKSEETITPWNFEEVVDKGASAQSFIERMTNFDKNLPNEKVLPKHSLLYEYFTVYNELTKVKYVTEGMRKPAFLSGEQKKAIVDLLFKTNRKVTVKQLKEDYFKKIECFDSVEISGVEDRFNASLGTYHDLLKIIKDKDFLDNEENEDILEDIVLTLTLFEDREMIEERLKTYAHLFDDKVMKQLKRRRYTGWGRLSRKLINGIRDKQSGKTILDFLKSDGFANRNFMQLIHDDSLTFKEDIQKAQVSGQGDSLHEHIANLAGSPAIKKGILQTVKVVDELVKVMGRHKPENIVIEMARENQTTQKGQKNSRERMKRIEEGIKELGSQILKEHPVENTQLQNEKLYLYYLQNGRDMYVDQELDINRLSDYDVDHIVPQSFLKDDSIDNKVLTRSDKARGKSDNVPSEEVVKKMKNYWRQLLNAKLITQRKFDNLTKAERGGLSELDKAGFIKRQLVETRQITKHVAQILDSRMNTKYDENDKLIREVKVITLKSKLVSDFRKDFQFYKVREINNYHHAHDAYLNAVVGTALIKKYPKLESEFVYGDYKVYDVRKMIAKSEQEIGKATAKYFFYSNIMNFFKTEITLANGEIRKRPLIETNGETGEIVWDKGRDFATVRKVLSMPQVNIVKKTEVQTGGFSKESILPKRNSDKLIARKKDWDPKKYGGFDSPTVAYSVLVVAKVEKGKSKKLKSVKELLGITIMERSSFEKNPIDFLEAKGYKEVKKDLIIKLPKYSLFELENGRKRMLASAGELQKGNELALPSKYVNFLYLASHYEKLKGSPEDNEQKQLFVEQHKHYLDEIIEQISEFSKRVILADANLDKVLSAYNKHRDKPIREQAENIIHLFTLTNLGAPAAFKYFDTTIDRKRYTSTKEVLDATLIHQSITGLYETRIDLSQLGGDGGGGGGGSGGLLGRDLLTKLKAQIQFSTEGPQVTWEDRPAMCLVLNLEEEYRLHEKPVPPSIDPSWLQLFPMVWAEKAGMGLANQVPPVVVELKSDASPVAVRQYPMSKEAREGIRPHIQRFLDLGILVPCQSPWNTPLLPVKKPGTNDYRPVQDLREVNKRVQDIHPTVPNPYNLLSSLPPSHTWYSVLDLKDAFFCLKLHPNSQPLFAFEWRDPEKGNTGQLTWTRLPQGFKNSPTLFNEALHRDLASFRALNPQVVMLQYVDDLLVAAPTYRDCKEGTRRLLQELSKLGYRVSAKKAQLCREEVTYLGYLLKGGKRWLTPARKATVMKIPTPTTPRQVREFLGKAGFCRLFIPGFASLAAPLYPLTRPKVPFTWTEAHQEAFGRIKEALLSAPALALPDLTKPFALYVDEKEGVARGVLTQTLGPWRRPVAYLSKKLDPVASGWPTCLKAIAAVALLLKDADKLTLGQNVLVIAPHNLESIVRQPPDRWMTNARMTHYQSLLLNERVSFAPPAILNPATLLPVESDDTPIHICSEILAEETGTRPDLRDQPLPGVPAWYTDGSSFIMDGRRQAGAAIVDNKRTVWASNLPEGTSAQKAELIALTQALRLAEGKSINIYTDSRYAFATAHVHGAIYKQRGWLTSAGKDIKNKEEILALLEAIHLPKRVAIIHCPGHQRGTDPVATGNRKADEAAKQAAQSTRILTETTKNAGKRTADGSEFEKRTADGSEFESPKKKAKVE

SEQ ID NO: 1749 - protein, 2125 aa, synthetic construct
MPAAKRVKLDGGDKKYSIGLDIGTNSVGWAVITDEYKVPSKKFKVLGNTDRHSIKKNLIGALLFDSGETAEATRLKRTARRRYTRRKNRICYLQEIFSNEMAKVDDSFFHRLEESFLVEEDKKHERHPIFGNIVDEVAYHEKYPTIYHLRKKLVDSTDKADLRLIYLALAHMIKFRGHFLIEGDLNPDNSDVDKLFIQLVQTYNQLFEENPINASGVDAKAILSARLSKSRRLENLIAQLPGEKKNGLFGNLIALSLGLTPNFKSNFDLAEDAKLQLSKDTYDDDLDNLLAQIGDQYADLFLAAKNLSDAILLSDILRVNTEITKAPLSASMIKRYDEHHQDLTLLKALVRQQLPEKYKEIFFDQSKNGYAGYIDGGASQEEFYKFIKPILEKMDGTEELLVKLNREDLLRKQRTFDNGSIPHQIHLGELHAILRRQEDFYPFLKDNREKIEKILTFRIPYYVGPLARGNSRFAWMTRKSEETITPWNFEEVVDKGASAQSFIERMTNFDKNLPNEKVLPKHSLLYEYFTVYNELTKVKYVTEGMRKPAFLSGEQKKAIVDLLFKTNRKVTVKQLKEDYFKKIECFDSVEISGVEDRFNASLGTYHDLLKIIKDKDFLDNEENEDILEDIVLTLTLFEDREMIEERLKTYAHLFDDKVMKQLKRRRYTGWGRLSRKLINGIRDKQSGKTILDFLKSDGFANRNFMQLIHDDSLTFKEDIQKAQVSGQGDSLHEHIANLAGSPAIKKGILQTVKVVDELVKVMGRHKPENIVIEMARENQTTQKGQKNSRERMKRIEEGIKELGSQILKEHPVENTQLQNEKLYLYYLQNGRDMYVDQELDINRLSDYDVDHIVPQSFLKDDSIDNKVLTRSDKARGKSDNVPSEEVVKKMKNYWRQLLNAKLITQRKFDNLTKAERGGLSELDKAGFIKRQLVETRQITKHVAQILDSRMNTKYDENDKLIREVKVITLKSKLVSDFRKDFQFYKVREINNYHHAHDAYLNAVVGTALIKKYPKLESEFVYGDYKVYDVRKMIAKSEQEIGKATAKYFFYSNIMNFFKTEITLANGEIRKRPLIETNGETGEIVWDKGRDFATVRKVLSMPQVNIVKKTEVQTGGFSKESILPKRNSDKLIARKKDWDPKKYGGFDSPTVAYSVLVVAKVEKGKSKKLKSVKELLGITIMERSSFEKNPIDFLEAKGYKEVKKDLIIKLPKYSLFELENGRKRMLASAGELQKGNELALPSKYVNFLYLASHYEKLKGSPEDNEQKQLFVEQHKHYLDEIIEQISEFSKRVILADANLDKVLSAYNKHRDKPIREQAENIIHLFTLTNLGAPAAFKYFDTTIDRKRYTSTKEVLDATLIHQSITGLYETRIDLSQLGGDGGPAPGSSGGSGGLLGRDLLTKLKAQIQFSTEGPQVTWEDRPAMCLVLNLEEEYRLHEKPVPPSIDPSWLQLFPMVWAEKAGMGLANQVPPVVVELKSDASPVAVRQYPMSKEAREGIRPHIQRFLDLGILVPCQSPWNTPLLPVKKPGTNDYRPVQDLREVNKRVQDIHPTVPNPYNLLSSLPPSHTWYSVLDLKDAFFCLKLHPNSQPLFAFEWRDPEKGNTGQLTWTRLPQGFKNSPTLFNEALHRDLASFRALNPQVVMLQYVDDLLVAAPTYRDCKEGTRRLLQELSKLGYRVSAKKAQLCREEVTYLGYLLKGGKRWLTPARKATVMKIPTPTTPRQVREFLGKAGFCRLFIPGFASLAAPLYPLTRPKVPFTWTEAHQEAFGRIKEALLSAPALALPDLTKPFALYVDEKEGVARGVLTQTLGPWRRPVAYLSKKLDPVASGWPTCLKAIAAVALLLKDADKLTLGQNVLVIAPHNLESIVRQPPDRWMTNARMTHYQSLLLNERVSFAPPAILNPATLLPVESDDTPIHICSEILAEETGTRPDLRDQPLPGVPAWYTDGSSFIMDGRRQAGAAIVDNKRTVWASNLPEGTSAQKAELIALTQALRLAEGKSINIYTDSRYAFATAHVHGAIYKQRGWLTSAGKDIKNKEEILALLEAIHLPKRVAIIHCPGHQRGTDPVATGNRKADEAAKQAAQSTRILTETTKNAGKRTADGSEFEKRTADGSEFESPKKKAKVE

SEQ ID NO: 1750 - protein, 2122 aa, synthetic construct
MPAAKRVKLDGGDKKYSIGLDIGTNSVGWAVITDEYKVPSKKFKVLGNTDRHSIKKNLIGALLFDSGETAEATRLKRTARRRYTRRKNRICYLQEIFSNEMAKVDDSFFHRLEESFLVEEDKKHERHPIFGNIVDEVAYHEKYPTIYHLRKKLVDSTDKADLRLIYLALAHMIKFRGHFLIEGDLNPDNSDVDKLFIQLVQTYNQLFEENPINASGVDAKAILSARLSKSRRLENLIAQLPGEKKNGLFGNLIALSLGLTPNFKSNFDLAEDAKLQLSKDTYDDDLDNLLAQIGDQYADLFLAAKNLSDAILLSDILRVNTEITKAPLSASMIKRYDEHHQDLTLLKALVRQQLPEKYKEIFFDQSKNGYAGYIDGGASQEEFYKFIKPILEKMDGTEELLVKLNREDLLRKQRTFDNGSIPHQIHLGELHAILRRQEDFYPFLKDNREKIEKILTFRIPYYVGPLARGNSRFAWMTRKSEETITPWNFEEVVDKGASAQSFIERMTNFDKNLPNEKVLPKHSLLYEYFTVYNELTKVKYVTEGMRKPAFLSGEQKKAIVDLLFKTNRKVTVKQLKEDYFKKIECFDSVEISGVEDRFNASLGTYHDLLKIIKDKDFLDNEENEDILEDIVLTLTLFEDREMIEERLKTYAHLFDDKVMKQLKRRRYTGWGRLSRKLINGIRDKQSGKTILDFLKSDGFANRNFMQLIHDDSLTFKEDIQKAQVSGQGDSLHEHIANLAGSPAIKKGILQTVKVVDELVKVMGRHKPENIVIEMARENQTTQKGQKNSRERMKRIEEGIKELGSQILKEHPVENTQLQNEKLYLYYLQNGRDMYVDQELDINRLSDYDVDHIVPQSFLKDDSIDNKVLTRSDKARGKSDNVPSEEVVKKMKNYWRQLLNAKLITQRKFDNLTKAERGGLSELDKAGFIKRQLVETRQITKHVAQILDSRMNTKYDENDKLIREVKVITLKSKLVSDFRKDFQFYKVREINNYHHAHDAYLNAVVGTALIKKYPKLESEFVYGDYKVYDVRKMIAKSEQEIGKATAKYFFYSNIMNFFKTEITLANGEIRKRPLIETNGETGEIVWDKGRDFATVRKVLSMPQVNIVKKTEVQTGGFSKESILPKRNSDKLIARKKDWDPKKYGGFDSPTVAYSVLVVAKVEKGKSKKLKSVKELLGITIMERSSFEKNPIDFLEAKGYKEVKKDLIIKLPKYSLFELENGRKRMLASAGELQKGNELALPSKYVNFLYLASHYEKLKGSPEDNEQKQLFVEQHKHYLDEIIEQISEFSKRVILADANLDKVLSAYNKHRDKPIREQAENIIHLFTLTNLGAPAAFKYFDTTIDRKRYTSTKEVLDATLIHQSITGLYETRIDLSQLGGDGGGGSGGSGGLLGRDLLTKLKAQIQFSTEGPQVTWEDRPAMCLVLNLEEEYRLHEKPVPPSIDPSWLQLFPMVWAEKAGMGLANQVPPVVVELKSDASPVAVRQYPMSKEAREGIRPHIQRFLDLGILVPCQSPWNTPLLPVKKPGTNDYRPVQDLREVNKRVQDIHPTVPNPYNLLSSLPPSHTWYSVLDLKDAFFCLKLHPNSQPLFAFEWRDPEKGNTGQLTWTRLPQGFKNSPTLFNEALHRDLASFRALNPQVVMLQYVDDLLVAAPTYRDCKEGTRRLLQELSKLGYRVSAKKAQLCREEVTYLGYLLKGGKRWLTPARKATVMKIPTPTTPRQVREFLGKAGFCRLFIPGFASLAAPLYPLTRPKVPFTWTEAHQEAFGRIKEALLSAPALALPDLTKPFALYVDEKEGVARGVLTQTLGPWRRPVAYLSKKLDPVASGWPTCLKAIAAVALLLKDADKLTLGQNVLVIAPHNLESIVRQPPDRWMTNARMTHYQSLLLNERVSFAPPAILNPATLLPVESDDTPIHICSEILAEETGTRPDLRDQPLPGVPAWYTDGSSFIMDGRRQAGAAIVDNKRTVWASNLPEGTSAQKAELIALTQALRLAEGKSINIYTDSRYAFATAHVHGAIYKQRGWLTSAGKDIKNKEEILALLEAIHLPKRVAIIHCPGHQRGTDPVATGNRKADEAAKQAAQSTRILTETTKNAGKRTADGSEFEKRTADGSEFESPKKKAKVE

SEQ ID NO: 1751 - protein, 2216 aa, synthetic construct
MPAAKRVKLDGGDKKYSIGLDIGTNSVGWAVITDEYKVPSKKFKVLGNTDRHSIKKNLIGALLFDSGETAEATRLKRTARRRYTRRKNRICYLQEIFSNEMAKVDDSFFHRLEESFLVEEDKKHERHPIFGNIVDEVAYHEKYPTIYHLRKKLVDSTDKADLRLIYLALAHMIKFRGHFLIEGDLNPDNSDVDKLFIQLVQTYNQLFEENPINASGVDAKAILSARLSKSRRLENLIAQLPGEKKNGLFGNLIALSLGLTPNFKSNFDLAEDAKLQLSKDTYDDDLDNLLAQIGDQYADLFLAAKNLSDAILLSDILRVNTEITKAPLSASMIKRYDEHHQDLTLLKALVRQQLPEKYKEIFFDQSKNGYAGYIDGGASQEEFYKFIKPILEKMDGTEELLVKLNREDLLRKQRTFDNGSIPHQIHLGELHAILRRQEDFYPFLKDNREKIEKILTFRIPYYVGPLARGNSRFAWMTRKSEETITPWNFEEVVDKGASAQSFIERMTNFDKNLPNEKVLPKHSLLYEYFTVYNELTKVKYVTEGMRKPAFLSGEQKKAIVDLLFKTNRKVTVKQLKEDYFKKIECFDSVEISGVEDRFNASLGTYHDLLKIIKDKDFLDNEENEDILEDIVLTLTLFEDREMIEERLKTYAHLFDDKVMKQLKRRRYTGWGRLSRKLINGIRDKQSGKTILDFLKSDGFANRNFMQLIHDDSLTFKEDIQKAQVSGQGDSLHEHIANLAGSPAIKKGILQTVKVVDELVKVMGRHKPENIVIEMARENQTTQKGQKNSRERMKRIEEGIKELGSQILKEHPVENTQLQNEKLYLYYLQNGRDMYVDQELDINRLSDYDVDHIVPQSFLKDDSIDNKVLTRSDKARGKSDNVPSEEVVKKMKNYWRQLLNAKLITQRKFDNLTKAERGGLSELDKAGFIKRQLVETRQITKHVAQILDSRMNTKYDENDKLIREVKVITLKSKLVSDFRKDFQFYKVREINNYHHAHDAYLNAVVGTALIKKYPKLESEFVYGDYKVYDVRKMIAKSEQEIGKATAKYFFYSNIMNFFKTEITLANGEIRKRPLIETNGETGEIVWDKGRDFATVRKVLSMPQVNIVKKTEVQTGGFSKESILPKRNSDKLIARKKDWDPKKYGGFDSPTVAYSVLVVAKVEKGKSKKLKSVKELLGITIMERSSFEKNPIDFLEAKGYKEVKKDLIIKLPKYSLFELENGRKRMLASAGELQKGNELALPSKYVNFLYLASHYEKLKGSPEDNEQKQLFVEQHKHYLDEIIEQISEFSKRVILADANLDKVLSAYNKHRDKPIREQAENIIHLFTLTNLGAPAAFKYFDTTIDRKRYTSTKEVLDATLIHQSITGLYETRIDLSQLGGDGGGGGGGSGSSGGTLGDQGSRGSDPLPEPRVTLTVEGIPTEFLVNTGAEHSVLTKPMGKMGSKRTVVAGATGSKVYPWTTKRLLKIGQKQVTHSFLVIPECPAPLLGRDLLTKLKAQIQFSTEGPQVTWEDRPAMCLVLNLEEEYRLHEKPVPPSIDPSWLQLFPMVWAEKAGMGLANQVPPVVVELKSDASPVAVRQYPMSKEAREGIRPHIQRFLDLGILVPCQSPWNTPLLPVKKPGTNDYRPVQDLREVNKRVQDIHPTVPNPYNLLSSLPPSHTWYSVLDLKDAFFCLKLHPNSQPLFAFEWRDPEKGNTGQLTWTRLPQGFKNSPTLFNEALHRDLASFRALNPQVVMLQYVDDLLVAAPTYRDCKEGTRRLLQELSKLGYRVSAKKAQLCREEVTYLGYLLKGGKRWLTPARKATVMKIPTPTTPRQVREFLGTAGFCRLWIPGFASLAAPLYPLTRPKVPFTWTEAHQEAFGRIKEALLSAPALALPDLTKPFALYVDEKEGVARGVLTQTLGPWRRPVAYLSKKLDPVASGWPTCLKAIAAVALLLKDADKLTLGQNVLVIAPHNLESIVRQPPDRWMTNARMTHYQSLLLNERVSFAPPAILNPATLLPVESDDTPIHICSEILAEETGTRPDLRDQPLPGVPAWYTDGSSFIMDGRRQAGAAIVDNKRTVWASNLPEGTSAQKAELIALTQALRLAEGKSINIYTDSRYAFATAHVHGAIYKQRGWLTSAGKDIKNKEEILALLEAIHLPKRVAIIHCPGHQRGTDPVATGNRKADEAAKQAAQSTRILTETTKNAGKRTADGSEFEKRTADGSEFESPKKKAKVE

SEQ ID NO: 1752 - protein, 2237 aa, synthetic construct
MPAAKRVKLDGGDKKYSIGLDIGTNSVGWAVITDEYKVPSKKFKVLGNTDRHSIKKNLIGALLFDSGETAEATRLKRTARRRYTRRKNRICYLQEIFSNEMAKVDDSFFHRLEESFLVEEDKKHERHPIFGNIVDEVAYHEKYPTIYHLRKKLVDSTDKADLRLIYLALAHMIKFRGHFLIEGDLNPDNSDVDKLFIQLVQTYNQLFEENPINASGVDAKAILSARLSKSRRLENLIAQLPGEKKNGLFGNLIALSLGLTPNFKSNFDLAEDAKLQLSKDTYDDDLDNLLAQIGDQYADLFLAAKNLSDAILLSDILRVNTEITKAPLSASMIKRYDEHHQDLTLLKALVRQQLPEKYKEIFFDQSKNGYAGYIDGGASQEEFYKFIKPILEKMDGTEELLVKLNREDLLRKQRTFDNGSIPHQIHLGELHAILRRQEDFYPFLKDNREKIEKILTFRIPYYVGPLARGNSRFAWMTRKSEETITPWNFEEVVDKGASAQSFIERMTNFDKNLPNEKVLPKHSLLYEYFTVYNELTKVKYVTEGMRKPAFLSGEQKKAIVDLLFKTNRKVTVKQLKEDYFKKIECFDSVEISGVEDRFNASLGTYHDLLKIIKDKDFLDNEENEDILEDIVLTLTLFEDREMIEERLKTYAHLFDDKVMKQLKRRRYTGWGRLSRKLINGIRDKQSGKTILDFLKSDGFANRNFMQLIHDDSLTFKEDIQKAQVSGQGDSLHEHIANLAGSPAIKKGILQTVKVVDELVKVMGRHKPENIVIEMARENQTTQKGQKNSRERMKRIEEGIKELGSQILKEHPVENTQLQNEKLYLYYLQNGRDMYVDQELDINRLSDYDVDHIVPQSFLKDDSIDNKVLTRSDKARGKSDNVPSEEVVKKMKNYWRQLLNAKLITQRKFDNLTKAERGGLSELDKAGFIKRQLVETRQITKHVAQILDSRMNTKYDENDKLIREVKVITLKSKLVSDFRKDFQFYKVREINNYHHAHDAYLNAVVGTALIKKYPKLESEFVYGDYKVYDVRKMIAKSEQEIGKATAKYFFYSNIMNFFKTEITLANGEIRKRPLIETNGETGEIVWDKGRDFATVRKVLSMPQVNIVKKTEVQTGGFSKESILPKRNSDKLIARKKDWDPKKYGGFDSPTVAYSVLVVAKVEKGKSKKLKSVKELLGITIMERSSFEKNPIDFLEAKGYKEVKKDLIIKLPKYSLFELENGRKRMLASAGELQKGNELALPSKYVNFLYLASHYEKLKGSPEDNEQKQLFVEQHKHYLDEIIEQISEFSKRVILADANLDKVLSAYNKHRDKPIREQAENIIHLFTLTNLGAPAAFKYFDTTIDRKRYTSTKEVLDATLIHQSITGLYETRIDLSQLGGDGGGGGGSGGGGSGGGGSGGGGSGGGGSGGGGSGGTLGDQGSRGSDPLPEPRVTLTVEGIPTEFLVNTGAEHSVLTKPMGKMGSKRTVVAGATGSKVYPWTTKRLLKIGQKQVTHSFLVIPECPAPLLGRDLLTKLKAQIQFSTEGPQVTWEDRPAMCLVLNLEEEYRLHEKPVPPSIDPSWLQLFPMVWAEKAGMGLANQVPPVVVELKSDASPVAVRQYPMSKEAREGIRPHIQRFLDLGILVPCQSPWNTPLLPVKKPGTNDYRPVQDLREVNKRVQDIHPTVPNPYNLLSSLPPSHTWYSVLDLKDAFFCLKLHPNSQPLFAFEWRDPEKGNTGQLTWTRLPQGFKNSPTLFNEALHRDLASFRALNPQVVMLQYVDDLLVAAPTYRDCKEGTRRLLQELSKLGYRVSAKKAQLCREEVTYLGYLLKGGKRWLTPARKATVMKIPTPTTPRQVREFLGTAGFCRLWIPGFASLAAPLYPLTRPKVPFTWTEAHQEAFGRIKEALLSAPALALPDLTKPFALYVDEKEGVARGVLTQTLGPWRRPVAYLSKKLDPVASGWPTCLKAIAAVALLLKDADKLTLGQNVLVIAPHNLESIVRQPPDRWMTNARMTHYQSLLLNERVSFAPPAILNPATLLPVESDDTPIHICSEILAEETGTRPDLRDQPLPGVPAWYTDGSSFIMDGRRQAGAAIVDNKRTVWASNLPEGTSAQKAELIALTQALRLAEGKSINIYTDSRYAFATAHVHGAIYKQRGWLTSAGKDIKNKEEILALLEAIHLPKRVAIIHCPGHQRGTDPVATGNRKADEAAKQAAQSTRILTETTKNAGKRTADGSEFEKRTADGSEFESPKKKAKVE

SEQ ID NO: 1753 - protein, 2218 aa, synthetic construct
MPAAKRVKLDGGDKKYSIGLDIGTNSVGWAVITDEYKVPSKKFKVLGNTDRHSIKKNLIGALLFDSGETAEATRLKRTARRRYTRRKNRICYLQEIFSNEMAKVDDSFFHRLEESFLVEEDKKHERHPIFGNIVDEVAYHEKYPTIYHLRKKLVDSTDKADLRLIYLALAHMIKFRGHFLIEGDLNPDNSDVDKLFIQLVQTYNQLFEENPINASGVDAKAILSARLSKSRRLENLIAQLPGEKKNGLFGNLIALSLGLTPNFKSNFDLAEDAKLQLSKDTYDDDLDNLLAQIGDQYADLFLAAKNLSDAILLSDILRVNTEITKAPLSASMIKRYDEHHQDLTLLKALVRQQLPEKYKEIFFDQSKNGYAGYIDGGASQEEFYKFIKPILEKMDGTEELLVKLNREDLLRKQRTFDNGSIPHQIHLGELHAILRRQEDFYPFLKDNREKIEKILTFRIPYYVGPLARGNSRFAWMTRKSEETITPWNFEEVVDKGASAQSFIERMTNFDKNLPNEKVLPKHSLLYEYFTVYNELTKVKYVTEGMRKPAFLSGEQKKAIVDLLFKTNRKVTVKQLKEDYFKKIECFDSVEISGVEDRFNASLGTYHDLLKIIKDKDFLDNEENEDILEDIVLTLTLFEDREMIEERLKTYAHLFDDKVMKQLKRRRYTGWGRLSRKLINGIRDKQSGKTILDFLKSDGFANRNFMQLIHDDSLTFKEDIQKAQVSGQGDSLHEHIANLAGSPAIKKGILQTVKVVDELVKVMGRHKPENIVIEMARENQTTQKGQKNSRERMKRIEEGIKELGSQILKEHPVENTQLQNEKLYLYYLQNGRDMYVDQELDINRLSDYDVDHIVPQSFLKDDSIDNKVLTRSDKARGKSDNVPSEEVVKKMKNYWRQLLNAKLITQRKFDNLTKAERGGLSELDKAGFIKRQLVETRQITKHVAQILDSRMNTKYDENDKLIREVKVITLKSKLVSDFRKDFQFYKVREINNYHHAHDAYLNAVVGTALIKKYPKLESEFVYGDYKVYDVRKMIAKSEQEIGKATAKYFFYSNIMNFFKTEITLANGEIRKRPLIETNGETGEIVWDKGRDFATVRKVLSMPQVNIVKKTEVQTGGFSKESILPKRNSDKLIARKKDWDPKKYGGFDSPTVAYSVLVVAKVEKGKSKKLKSVKELLGITIMERSSFEKNPIDFLEAKGYKEVKKDLIIKLPKYSLFELENGRKRMLASAGELQKGNELALPSKYVNFLYLASHYEKLKGSPEDNEQKQLFVEQHKHYLDEIIEQISEFSKRVILADANLDKVLSAYNKHRDKPIREQAENIIHLFTLTNLGAPAAFKYFDTTIDRKRYTSTKEVLDATLIHQSITGLYETRIDLSQLGGDGGEAAAKGGGPAPGGTLGDQGSRGSDPLPEPRVTLTVEGIPTEFLVNTGAEHSVLTKPMGKMGSKRTVVAGATGSKVYPWTTKRLLKIGQKQVTHSFLVIPECPAPLLGRDLLTKLKAQIQFSTEGPQVTWEDRPAMCLVLNLEEEYRLHEKPVPPSIDPSWLQLFPMVWAEKAGMGLANQVPPVVVELKSDASPVAVRQYPMSKEAREGIRPHIQRFLDLGILVPCQSPWNTPLLPVKKPGTNDYRPVQDLREVNKRVQDIHPTVPNPYNLLSSLPPSHTWYSVLDLKDAFFCLKLHPNSQPLFAFEWRDPEKGNTGQLTWTRLPQGFKNSPTLFNEALHRDLASFRALNPQVVMLQYVDDLLVAAPTYRDCKEGTRRLLQELSKLGYRVSAKKAQLCREEVTYLGYLLKGGKRWLTPARKATVMKIPTPTTPRQVREFLGTAGFCRLWIPGFASLAAPLYPLTRPKVPFTWTEAHQEAFGRIKEALLSAPALALPDLTKPFALYVDEKEGVARGVLTQTLGPWRRPVAYLSKKLDPVASGWPTCLKAIAAVALLLKDADKLTLGQNVLVIAPHNLESIVRQPPDRWMTNARMTHYQSLLLNERVSFAPPAILNPATLLPVESDDTPIHICSEILAEETGTRPDLRDQPLPGVPAWYTDGSSFIMDGRRQAGAAIVDNKRTVWASNLPEGTSAQKAELIALTQALRLAEGKSINIYTDSRYAFATAHVHGAIYKQRGWLTSAGKDIKNKEEILALLEAIHLPKRVAIIHCPGHQRGTDPVATGNRKADEAAKQAAQSTRILTETTKNAGKRTADGSEFEKRTADGSEFESPKKKAKVE

SEQ ID NO: 1754 - protein, 2218 aa, synthetic construct
MPAAKRVKLDGGDKKYSIGLDIGTNSVGWAVITDEYKVPSKKFKVLGNTDRHSIKKNLIGALLFDSGETAEATRLKRTARRRYTRRKNRICYLQEIFSNEMAKVDDSFFHRLEESFLVEEDKKHERHPIFGNIVDEVAYHEKYPTIYHLRKKLVDSTDKADLRLIYLALAHMIKFRGHFLIEGDLNPDNSDVDKLFIQLVQTYNQLFEENPINASGVDAKAILSARLSKSRRLENLIAQLPGEKKNGLFGNLIALSLGLTPNFKSNFDLAEDAKLQLSKDTYDDDLDNLLAQIGDQYADLFLAAKNLSDAILLSDILRVNTEITKAPLSASMIKRYDEHHQDLTLLKALVRQQLPEKYKEIFFDQSKNGYAGYIDGGASQEEFYKFIKPILEKMDGTEELLVKLNREDLLRKQRTFDNGSIPHQIHLGELHAILRRQEDFYPFLKDNREKIEKILTFRIPYYVGPLARGNSRFAWMTRKSEETITPWNFEEVVDKGASAQSFIERMTNFDKNLPNEKVLPKHSLLYEYFTVYNELTKVKYVTEGMRKPAFLSGEQKKAIVDLLFKTNRKVTVKQLKEDYFKKIECFDSVEISGVEDRFNASLGTYHDLLKIIKDKDFLDNEENEDILEDIVLTLTLFEDREMIEERLKTYAHLFDDKVMKQLKRRRYTGWGRLSRKLINGIRDKQSGKTILDFLKSDGFANRNFMQLIHDDSLTFKEDIQKAQVSGQGDSLHEHIANLAGSPAIKKGILQTVKVVDELVKVMGRHKPENIVIEMARENQTTQKGQKNSRERMKRIEEGIKELGSQILKEHPVENTQLQNEKLYLYYLQNGRDMYVDQELDINRLSDYDVDHIVPQSFLKDDSIDNKVLTRSDKARGKSDNVPSEEVVKKMKNYWRQLLNAKLITQRKFDNLTKAERGGLSELDKAGFIKRQLVETRQITKHVAQILDSRMNTKYDENDKLIREVKVITLKSKLVSDFRKDFQFYKVREINNYHHAHDAYLNAVVGTALIKKYPKLESEFVYGDYKVYDVRKMIAKSEQEIGKATAKYFFYSNIMNFFKTEITLANGEIRKRPLIETNGETGEIVWDKGRDFATVRKVLSMPQVNIVKKTEVQTGGFSKESILPKRNSDKLIARKKDWDPKKYGGFDSPTVAYSVLVVAKVEKGKSKKLKSVKELLGITIMERSSFEKNPIDFLEAKGYKEVKKDLIIKLPKYSLFELENGRKRMLASAGELQKGNELALPSKYVNFLYLASHYEKLKGSPEDNEQKQLFVEQHKHYLDEIIEQISEFSKRVILADANLDKVLSAYNKHRDKPIREQAENIIHLFTLTNLGAPAAFKYFDTTIDRKRYTSTKEVLDATLIHQSITGLYETRIDLSQLGGDGGPAPGGSEAAAKGGTLGDQGSRGSDPLPEPRVTLTVEGIPTEFLVNTGAEHSVLTKPMGKMGSKRTVVAGATGSKVYPWTTKRLLKIGQKQVTHSFLVIPECPAPLLGRDLLTKLKAQIQFSTEGPQVTWEDRPAMCLVLNLEEEYRLHEKPVPPSIDPSWLQLFPMVWAEKAGMGLANQVPPVVVELKSDASPVAVRQYPMSKEAREGIRPHIQRFLDLGILVPCQSPWNTPLLPVKKPGTNDYRPVQDLREVNKRVQDIHPTVPNPYNLLSSLPPSHTWYSVLDLKDAFFCLKLHPNSQPLFAFEWRDPEKGNTGQLTWTRLPQGFKNSPTLFNEALHRDLASFRALNPQVVMLQYVDDLLVAAPTYRDCKEGTRRLLQELSKLGYRVSAKKAQLCREEVTYLGYLLKGGKRWLTPARKATVMKIPTPTTPRQVREFLGTAGFCRLWIPGFASLAAPLYPLTRPKVPFTWTEAHQEAFGRIKEALLSAPALALPDLTKPFALYVDEKEGVARGVLTQTLGPWRRPVAYLSKKLDPVASGWPTCLKAIAAVALLLKDADKLTLGQNVLVIAPHNLESIVRQPPDRWMTNARMTHYQSLLLNERVSFAPPAILNPATLLPVESDDTPIHICSEILAEETGTRPDLRDQPLPGVPAWYTDGSSFIMDGRRQAGAAIVDNKRTVWASNLPEGTSAQKAELIALTQALRLAEGKSINIYTDSRYAFATAHVHGAIYKQRGWLTSAGKDIKNKEEILALLEAIHLPKRVAIIHCPGHQRGTDPVATGNRKADEAAKQAAQSTRILTETTKNAGKRTADGSEFEKRTADGSEFESPKKKAKVE

SEQ ID NO: 1755 - protein, 2219 aa, synthetic construct
MPAAKRVKLDGGDKKYSIGLDIGTNSVGWAVITDEYKVPSKKFKVLGNTDRHSIKKNLIGALLFDSGETAEATRLKRTARRRYTRRKNRICYLQEIFSNEMAKVDDSFFHRLEESFLVEEDKKHERHPIFGNIVDEVAYHEKYPTIYHLRKKLVDSTDKADLRLIYLALAHMIKFRGHFLIEGDLNPDNSDVDKLFIQLVQTYNQLFEENPINASGVDAKAILSARLSKSRRLENLIAQLPGEKKNGLFGNLIALSLGLTPNFKSNFDLAEDAKLQLSKDTYDDDLDNLLAQIGDQYADLFLAAKNLSDAILLSDILRVNTEITKAPLSASMIKRYDEHHQDLTLLKALVRQQLPEKYKEIFFDQSKNGYAGYIDGGASQEEFYKFIKPILEKMDGTEELLVKLNREDLLRKQRTFDNGSIPHQIHLGELHAILRRQEDFYPFLKDNREKIEKILTFRIPYYVGPLARGNSRFAWMTRKSEETITPWNFEEVVDKGASAQSFIERMTNFDKNLPNEKVLPKHSLLYEYFTVYNELTKVKYVTEGMRKPAFLSGEQKKAIVDLLFKTNRKVTVKQLKEDYFKKIECFDSVEISGVEDRFNASLGTYHDLLKIIKDKDFLDNEENEDILEDIVLTLTLFEDREMIEERLKTYAHLFDDKVMKQLKRRRYTGWGRLSRKLINGIRDKQSGKTILDFLKSDGFANRNFMQLIHDDSLTFKEDIQKAQVSGQGDSLHEHIANLAGSPAIKKGILQTVKVVDELVKVMGRHKPENIVIEMARENQTTQKGQKNSRERMKRIEEGIKELGSQILKEHPVENTQLQNEKLYLYYLQNGRDMYVDQELDINRLSDYDVDHIVPQSFLKDDSIDNKVLTRSDKARGKSDNVPSEEVVKKMKNYWRQLLNAKLITQRKFDNLTKAERGGLSELDKAGFIKRQLVETRQITKHVAQILDSRMNTKYDENDKLIREVKVITLKSKLVSDFRKDFQFYKVREINNYHHAHDAYLNAVVGTALIKKYPKLESEFVYGDYKVYDVRKMIAKSEQEIGKATAKYFFYSNIMNFFKTEITLANGEIRKRPLIETNGETGEIVWDKGRDFATVRKVLSMPQVNIVKKTEVQTGGFSKESILPKRNSDKLIARKKDWDPKKYGGFDSPTVAYSVLVVAKVEKGKSKKLKSVKELLGITIMERSSFEKNPIDFLEAKGYKEVKKDLIIKLPKYSLFELENGRKRMLASAGELQKGNELALPSKYVNFLYLASHYEKLKGSPEDNEQKQLFVEQHKHYLDEIIEQISEFSKRVILADANLDKVLSAYNKHRDKPIREQAENIIHLFTLTNLGAPAAFKYFDTTIDRKRYTSTKEVLDATLIHQSITGLYETRIDLSQLGGDGGGGSGGSGGSGGSGGTLGDQGSRGSDPLPEPRVTLTVEGIPTEFLVNTGAEHSVLTKPMGKMGSKRTVVAGATGSKVYPWTTKRLLKIGQKQVTHSFLVIPECPAPLLGRDLLTKLKAQIQFSTEGPQVTWEDRPAMCLVLNLEEEYRLHEKPVPPSIDPSWLQLFPMVWAEKAGMGLANQVPPVVVELKSDASPVAVRQYPMSKEAREGIRPHIQRFLDLGILVPCQSPWNTPLLPVKKPGTNDYRPVQDLREVNKRVQDIHPTVPNPYNLLSSLPPSHTWYSVLDLKDAFFCLKLHPNSQPLFAFEWRDPEKGNTGQLTWTRLPQGFKNSPTLFNEALHRDLASFRALNPQVVMLQYVDDLLVAAPTYRDCKEGTRRLLQELSKLGYRVSAKKAQLCREEVTYLGYLLKGGKRWLTPARKATVMKIPTPTTPRQVREFLGTAGFCRLWIPGFASLAAPLYPLTRPKVPFTWTEAHQEAFGRIKEALLSAPALALPDLTKPFALYVDEKEGVARGVLTQTLGPWRRPVAYLSKKLDPVASGWPTCLKAIAAVALLLKDADKLTLGQNVLVIAPHNLESIVRQPPDRWMTNARMTHYQSLLLNERVSFAPPAILNPATLLPVESDDTPIHICSEILAEETGTRPDLRDQPLPGVPAWYTDGSSFIMDGRRQAGAAIVDNKRTVWASNLPEGTSAQKAELIALTQALRLAEGKSINIYTDSRYAFATAHVHGAIYKQRGWLTSAGKDIKNKEEILALLEAIHLPKRVAIIHCPGHQRGTDPVATGNRKADEAAKQAAQSTRILTETTKNAGKRTADGSEFEKRTADGSEFESPKKKAKVE

SEQ ID NO: 1756 - protein, 2218 aa, synthetic construct
MPAAKRVKLDGGDKKYSIGLDIGTNSVGWAVITDEYKVPSKKFKVLGNTDRHSIKKNLIGALLFDSGETAEATRLKRTARRRYTRRKNRICYLQEIFSNEMAKVDDSFFHRLEESFLVEEDKKHERHPIFGNIVDEVAYHEKYPTIYHLRKKLVDSTDKADLRLIYLALAHMIKFRGHFLIEGDLNPDNSDVDKLFIQLVQTYNQLFEENPINASGVDAKAILSARLSKSRRLENLIAQLPGEKKNGLFGNLIALSLGLTPNFKSNFDLAEDAKLQLSKDTYDDDLDNLLAQIGDQYADLFLAAKNLSDAILLSDILRVNTEITKAPLSASMIKRYDEHHQDLTLLKALVRQQLPEKYKEIFFDQSKNGYAGYIDGGASQEEFYKFIKPILEKMDGTEELLVKLNREDLLRKQRTFDNGSIPHQIHLGELHAILRRQEDFYPFLKDNREKIEKILTFRIPYYVGPLARGNSRFAWMTRKSEETITPWNFEEVVDKGASAQSFIERMTNFDKNLPNEKVLPKHSLLYEYFTVYNELTKVKYVTEGMRKPAFLSGEQKKAIVDLLFKTNRKVTVKQLKEDYFKKIECFDSVEISGVEDRFNASLGTYHDLLKIIKDKDFLDNEENEDILEDIVLTLTLFEDREMIEERLKTYAHLFDDKVMKQLKRRRYTGWGRLSRKLINGIRDKQSGKTILDFLKSDGFANRNFMQLIHDDSLTFKEDIQKAQVSGQGDSLHEHIANLAGSPAIKKGILQTVKVVDELVKVMGRHKPENIVIEMARENQTTQKGQKNSRERMKRIEEGIKELGSQILKEHPVENTQLQNEKLYLYYLQNGRDMYVDQELDINRLSDYDVDHIVPQSFLKDDSIDNKVLTRSDKARGKSDNVPSEEVVKKMKNYWRQLLNAKLITQRKFDNLTKAERGGLSELDKAGFIKRQLVETRQITKHVAQILDSRMNTKYDENDKLIREVKVITLKSKLVSDFRKDFQFYKVREINNYHHAHDAYLNAVVGTALIKKYPKLESEFVYGDYKVYDVRKMIAKSEQEIGKATAKYFFYSNIMNFFKTEITLANGEIRKRPLIETNGETGEIVWDKGRDFATVRKVLSMPQVNIVKKTEVQTGGFSKESILPKRNSDKLIARKKDWDPKKYGGFDSPTVAYSVLVVAKVEKGKSKKLKSVKELLGITIMERSSFEKNPIDFLEAKGYKEVKKDLIIKLPKYSLFELENGRKRMLASAGELQKGNELALPSKYVNFLYLASHYEKLKGSPEDNEQKQLFVEQHKHYLDEIIEQISEFSKRVILADANLDKVLSAYNKHRDKPIREQAENIIHLFTLTNLGAPAAFKYFDTTIDRKRYTSTKEVLDATLIHQSITGLYETRIDLSQLGGDGGEAAAKGSSGGGGGTLGDQGSRGSDPLPEPRVTLTVEGIPTEFLVNTGAEHSVLTKPMGKMGSKRTVVAGATGSKVYPWTTKRLLKIGQKQVTHSFLVIPECPAPLLGRDLLTKLKAQIQFSTEGPQVTWEDRPAMCLVLNLEEEYRLHEKPVPPSIDPSWLQLFPMVWAEKAGMGLANQVPPVVVELKSDASPVAVRQYPMSKEAREGIRPHIQRFLDLGILVPCQSPWNTPLLPVKKPGTNDYRPVQDLREVNKRVQDIHPTVPNPYNLLSSLPPSHTWYSVLDLKDAFFCLKLHPNSQPLFAFEWRDPEKGNTGQLTWTRLPQGFKNSPTLFNEALHRDLASFRALNPQVVMLQYVDDLLVAAPTYRDCKEGTRRLLQELSKLGYRVSAKKAQLCREEVTYLGYLLKGGKRWLTPARKATVMKIPTPTTPRQVREFLGTAGFCRLWIPGFASLAAPLYPLTRPKVPFTWTEAHQEAFGRIKEALLSAPALALPDLTKPFALYVDEKEGVARGVLTQTLGPWRRPVAYLSKKLDPVASGWPTCLKAIAAVALLLKDADKLTLGQNVLVIAPHNLESIVRQPPDRWMTNARMTHYQSLLLNERVSFAPPAILNPATLLPVESDDTPIHICSEILAEETGTRPDLRDQPLPGVPAWYTDGSSFIMDGRRQAGAAIVDNKRTVWASNLPEGTSAQKAELIALTQALRLAEGKSINIYTDSRYAFATAHVHGAIYKQRGWLTSAGKDIKNKEEILALLEAIHLPKRVAIIHCPGHQRGTDPVATGNRKADEAAKQAAQSTRILTETTKNAGKRTADGSEFEKRTADGSEFESPKKKAKVE

SEQ ID NO: 1757 - protein, 2216 aa, synthetic construct
MPAAKRVKLDGGDKKYSIGLDIGTNSVGWAVITDEYKVPSKKFKVLGNTDRHSIKKNLIGALLFDSGETAEATRLKRTARRRYTRRKNRICYLQEIFSNEMAKVDDSFFHRLEESFLVEEDKKHERHPIFGNIVDEVAYHEKYPTIYHLRKKLVDSTDKADLRLIYLALAHMIKFRGHFLIEGDLNPDNSDVDKLFIQLVQTYNQLFEENPINASGVDAKAILSARLSKSRRLENLIAQLPGEKKNGLFGNLIALSLGLTPNFKSNFDLAEDAKLQLSKDTYDDDLDNLLAQIGDQYADLFLAAKNLSDAILLSDILRVNTEITKAPLSASMIKRYDEHHQDLTLLKALVRQQLPEKYKEIFFDQSKNGYAGYIDGGASQEEFYKFIKPILEKMDGTEELLVKLNREDLLRKQRTFDNGSIPHQIHLGELHAILRRQEDFYPFLKDNREKIEKILTFRIPYYVGPLARGNSRFAWMTRKSEETITPWNFEEVVDKGASAQSFIERMTNFDKNLPNEKVLPKHSLLYEYFTVYNELTKVKYVTEGMRKPAFLSGEQKKAIVDLLFKTNRKVTVKQLKEDYFKKIECFDSVEISGVEDRFNASLGTYHDLLKIIKDKDFLDNEENEDILEDIVLTLTLFEDREMIEERLKTYAHLFDDKVMKQLKRRRYTGWGRLSRKLINGIRDKQSGKTILDFLKSDGFANRNFMQLIHDDSLTFKEDIQKAQVSGQGDSLHEHIANLAGSPAIKKGILQTVKVVDELVKVMGRHKPENIVIEMARENQTTQKGQKNSRERMKRIEEGIKELGSQILKEHPVENTQLQNEKLYLYYLQNGRDMYVDQELDINRLSDYDVDHIVPQSFLKDDSIDNKVLTRSDKARGKSDNVPSEEVVKKMKNYWRQLLNAKLITQRKFDNLTKAERGGLSELDKAGFIKRQLVETRQITKHVAQILDSRMNTKYDENDKLIREVKVITLKSKLVSDFRKDFQFYKVREINNYHHAHDAYLNAVVGTALIKKYPKLESEFVYGDYKVYDVRKMIAKSEQEIGKATAKYFFYSNIMNFFKTEITLANGEIRKRPLIETNGETGEIVWDKGRDFATVRKVLSMPQVNIVKKTEVQTGGFSKESILPKRNSDKLIARKKDWDPKKYGGFDSPTVAYSVLVVAKVEKGKSKKLKSVKELLGITIMERSSFEKNPIDFLEAKGYKEVKKDLIIKLPKYSLFELENGRKRMLASAGELQKGNELALPSKYVNFLYLASHYEKLKGSPEDNEQKQLFVEQHKHYLDEIIEQISEFSKRVILADANLDKVLSAYNKHRDKPIREQAENIIHLFTLTNLGAPAAFKYFDTTIDRKRYTSTKEVLDATLIHQSITGLYETRIDLSQLGGDGGGGSPAPGSSGGTLGDQGSRGSDPLPEPRVTLTVEGIPTEFLVNTGAEHSVLTKPMGKMGSKRTVVAGATGSKVYPWTTKRLLKIGQKQVTHSFLVIPECPAPLLGRDLLTKLKAQIQFSTEGPQVTWEDRPAMCLVLNLEEEYRLHEKPVPPSIDPSWLQLFPMVWAEKAGMGLANQVPPVVVELKSDASPVAVRQYPMSKEAREGIRPHIQRFLDLGILVPCQSPWNTPLLPVKKPGTNDYRPVQDLREVNKRVQDIHPTVPNPYNLLSSLPPSHTWYSVLDLKDAFFCLKLHPNSQPLFAFEWRDPEKGNTGQLTWTRLPQGFKNSPTLFNEALHRDLASFRALNPQVVMLQYVDDLLVAAPTYRDCKEGTRRLLQELSKLGYRVSAKKAQLCREEVTYLGYLLKGGKRWLTPARKATVMKIPTPTTPRQVREFLGTAGFCRLWIPGFASLAAPLYPLTRPKVPFTWTEAHQEAFGRIKEALLSAPALALPDLTKPFALYVDEKEGVARGVLTQTLGPWRRPVAYLSKKLDPVASGWPTCLKAIAAVALLLKDADKLTLGQNVLVIAPHNLESIVRQPPDRWMTNARMTHYQSLLLNERVSFAPPAILNPATLLPVESDDTPIHICSEILAEETGTRPDLRDQPLPGVPAWYTDGSSFIMDGRRQAGAAIVDNKRTVWASNLPEGTSAQKAELIALTQALRLAEGKSINIYTDSRYAFATAHVHGAIYKQRGWLTSAGKDIKNKEEILALLEAIHLPKRVAIIHCPGHQRGTDPVATGNRKADEAAKQAAQSTRILTETTKNAGKRTADGSEFEKRTADGSEFESPKKKAKVE

SEQ ID NO: 1758 - protein, 2222 aa, synthetic construct
MPAAKRVKLDGGDKKYSIGLDIGTNSVGWAVITDEYKVPSKKFKVLGNTDRHSIKKNLIGALLFDSGETAEATRLKRTARRRYTRRKNRICYLQEIFSNEMAKVDDSFFHRLEESFLVEEDKKHERHPIFGNIVDEVAYHEKYPTIYHLRKKLVDSTDKADLRLIYLALAHMIKFRGHFLIEGDLNPDNSDVDKLFIQLVQTYNQLFEENPINASGVDAKAILSARLSKSRRLENLIAQLPGEKKNGLFGNLIALSLGLTPNFKSNFDLAEDAKLQLSKDTYDDDLDNLLAQIGDQYADLFLAAKNLSDAILLSDILRVNTEITKAPLSASMIKRYDEHHQDLTLLKALVRQQLPEKYKEIFFDQSKNGYAGYIDGGASQEEFYKFIKPILEKMDGTEELLVKLNREDLLRKQRTFDNGSIPHQIHLGELHAILRRQEDFYPFLKDNREKIEKILTFRIPYYVGPLARGNSRFAWMTRKSEETITPWNFEEVVDKGASAQSFIERMTNFDKNLPNEKVLPKHSLLYEYFTVYNELTKVKYVTEGMRKPAFLSGEQKKAIVDLLFKTNRKVTVKQLKEDYFKKIECFDSVEISGVEDRFNASLGTYHDLLKIIKDKDFLDNEENEDILEDIVLTLTLFEDREMIEERLKTYAHLFDDKVMKQLKRRRYTGWGRLSRKLINGIRDKQSGKTILDFLKSDGFANRNFMQLIHDDSLTFKEDIQKAQVSGQGDSLHEHIANLAGSPAIKKGILQTVKVVDELVKVMGRHKPENIVIEMARENQTTQKGQKNSRERMKRIEEGIKELGSQILKEHPVENTQLQNEKLYLYYLQNGRDMYVDQELDINRLSDYDVDHIVPQSFLKDDSIDNKVLTRSDKARGKSDNVPSEEVVKKMKNYWRQLLNAKLITQRKFDNLTKAERGGLSELDKAGFIKRQLVETRQITKHVAQILDSRMNTKYDENDKLIREVKVITLKSKLVSDFRKDFQFYKVREINNYHHAHDAYLNAVVGTALIKKYPKLESEFVYGDYKVYDVRKMIAKSEQEIGKATAKYFFYSNIMNFFKTEITLANGEIRKRPLIETNGETGEIVWDKGRDFATVRKVLSMPQVNIVKKTEVQTGGFSKESILPKRNSDKLIARKKDWDPKKYGGFDSPTVAYSVLVVAKVEKGKSKKLKSVKELLGITIMERSSFEKNPIDFLEAKGYKEVKKDLIIKLPKYSLFELENGRKRMLASAGELQKGNELALPSKYVNFLYLASHYEKLKGSPEDNEQKQLFVEQHKHYLDEIIEQISEFSKRVILADANLDKVLSAYNKHRDKPIREQAENIIHLFTLTNLGAPAAFKYFDTTIDRKRYTSTKEVLDATLIHQSITGLYETRIDLSQLGGDGGGGGGSGGGGSGGGGSGGTLGDQGSRGSDPLPEPRVTLTVEGIPTEFLVNTGAEHSVLTKPMGKMGSKRTVVAGATGSKVYPWTTKRLLKIGQKQVTHSFLVIPECPAPLLGRDLLTKLKAQIQFSTEGPQVTWEDRPAMCLVLNLEEEYRLHEKPVPPSIDPSWLQLFPMVWAEKAGMGLANQVPPVVVELKSDASPVAVRQYPMSKEAREGIRPHIQRFLDLGILVPCQSPWNTPLLPVKKPGTNDYRPVQDLREVNKRVQDIHPTVPNPYNLLSSLPPSHTWYSVLDLKDAFFCLKLHPNSQPLFAFEWRDPEKGNTGQLTWTRLPQGFKNSPTLFNEALHRDLASFRALNPQVVMLQYVDDLLVAAPTYRDCKEGTRRLLQELSKLGYRVSAKKAQLCREEVTYLGYLLKGGKRWLTPARKATVMKIPTPTTPRQVREFLGTAGFCRLWIPGFASLAAPLYPLTRPKVPFTWTEAHQEAFGRIKEALLSAPALALPDLTKPFALYVDEKEGVARGVLTQTLGPWRRPVAYLSKKLDPVASGWPTCLKAIAAVALLLKDADKLTLGQNVLVIAPHNLESIVRQPPDRWMTNARMTHYQSLLLNERVSFAPPAILNPATLLPVESDDTPIHICSEILAEETGTRPDLRDQPLPGVPAWYTDGSSFIMDGRRQAGAAIVDNKRTVWASNLPEGTSAQKAELIALTQALRLAEGKSINIYTDSRYAFATAHVHGAIYKQRGWLTSAGKDIKNKEEILALLEAIHLPKRVAIIHCPGHQRGTDPVATGNRKADEAAKQAAQSTRILTETTKNAGKRTADGSEFEKRTADGSEFESPKKKAKVE

SEQ ID NO: 1759 - protein, 2218 aa, synthetic construct
MPAAKRVKLDGGDKKYSIGLDIGTNSVGWAVITDEYKVPSKKFKVLGNTDRHSIKKNLIGALLFDSGETAEATRLKRTARRRYTRRKNRICYLQEIFSNEMAKVDDSFFHRLEESFLVEEDKKHERHPIFGNIVDEVAYHEKYPTIYHLRKKLVDSTDKADLRLIYLALAHMIKFRGHFLIEGDLNPDNSDVDKLFIQLVQTYNQLFEENPINASGVDAKAILSARLSKSRRLENLIAQLPGEKKNGLFGNLIALSLGLTPNFKSNFDLAEDAKLQLSKDTYDDDLDNLLAQIGDQYADLFLAAKNLSDAILLSDILRVNTEITKAPLSASMIKRYDEHHQDLTLLKALVRQQLPEKYKEIFFDQSKNGYAGYIDGGASQEEFYKFIKPILEKMDGTEELLVKLNREDLLRKQRTFDNGSIPHQIHLGELHAILRRQEDFYPFLKDNREKIEKILTFRIPYYVGPLARGNSRFAWMTRKSEETITPWNFEEVVDKGASAQSFIERMTNFDKNLPNEKVLPKHSLLYEYFTVYNELTKVKYVTEGMRKPAFLSGEQKKAIVDLLFKTNRKVTVKQLKEDYFKKIECFDSVEISGVEDRFNASLGTYHDLLKIIKDKDFLDNEENEDILEDIVLTLTLFEDREMIEERLKTYAHLFDDKVMKQLKRRRYTGWGRLSRKLINGIRDKQSGKTILDFLKSDGFANRNFMQLIHDDSLTFKEDIQKAQVSGQGDSLHEHIANLAGSPAIKKGILQTVKVVDELVKVMGRHKPENIVIEMARENQTTQKGQKNSRERMKRIEEGIKELGSQILKEHPVENTQLQNEKLYLYYLQNGRDMYVDQELDINRLSDYDVDHIVPQSFLKDDSIDNKVLTRSDKARGKSDNVPSEEVVKKMKNYWRQLLNAKLITQRKFDNLTKAERGGLSELDKAGFIKRQLVETRQITKHVAQILDSRMNTKYDENDKLIREVKVITLKSKLVSDFRKDFQFYKVREINNYHHAHDAYLNAVVGTALIKKYPKLESEFVYGDYKVYDVRKMIAKSEQEIGKATAKYFFYSNIMNFFKTEITLANGEIRKRPLIETNGETGEIVWDKGRDFATVRKVLSMPQVNIVKKTEVQTGGFSKESILPKRNSDKLIARKKDWDPKKYGGFDSPTVAYSVLVVAKVEKGKSKKLKSVKELLGITIMERSSFEKNPIDFLEAKGYKEVKKDLIIKLPKYSLFELENGRKRMLASAGELQKGNELALPSKYVNFLYLASHYEKLKGSPEDNEQKQLFVEQHKHYLDEIIEQISEFSKRVILADANLDKVLSAYNKHRDKPIREQAENIIHLFTLTNLGAPAAFKYFDTTIDRKRYTSTKEVLDATLIHQSITGLYETRIDLSQLGGDGGGSSGGGEAAAKGGTLGDQGSRGSDPLPEPRVTLTVEGIPTEFLVNTGAEHSVLTKPMGKMGSKRTVVAGATGSKVYPWTTKRLLKIGQKQVTHSFLVIPECPAPLLGRDLLTKLKAQIQFSTEGPQVTWEDRPAMCLVLNLEEEYRLHEKPVPPSIDPSWLQLFPMVWAEKAGMGLANQVPPVVVELKSDASPVAVRQYPMSKEAREGIRPHIQRFLDLGILVPCQSPWNTPLLPVKKPGTNDYRPVQDLREVNKRVQDIHPTVPNPYNLLSSLPPSHTWYSVLDLKDAFFCLKLHPNSQPLFAFEWRDPEKGNTGQLTWTRLPQGFKNSPTLFNEALHRDLASFRALNPQVVMLQYVDDLLVAAPTYRDCKEGTRRLLQELSKLGYRVSAKKAQLCREEVTYLGYLLKGGKRWLTPARKATVMKIPTPTTPRQVREFLGTAGFCRLWIPGFASLAAPLYPLTRPKVPFTWTEAHQEAFGRIKEALLSAPALALPDLTKPFALYVDEKEGVARGVLTQTLGPWRRPVAYLSKKLDPVASGWPTCLKAIAAVALLLKDADKLTLGQNVLVIAPHNLESIVRQPPDRWMTNARMTHYQSLLLNERVSFAPPAILNPATLLPVESDDTPIHICSEILAEETGTRPDLRDQPLPGVPAWYTDGSSFIMDGRRQAGAAIVDNKRTVWASNLPEGTSAQKAELIALTQALRLAEGKSINIYTDSRYAFATAHVHGAIYKQRGWLTSAGKDIKNKEEILALLEAIHLPKRVAIIHCPGHQRGTDPVATGNRKADEAAKQAAQSTRILTETTKNAGKRTADGSEFEKRTADGSEFESPKKKAKVE

SEQ ID NO: 1760 - protein, 2215 aa, synthetic construct
MPAAKRVKLDGGDKKYSIGLDIGTNSVGWAVITDEYKVPSKKFKVLGNTDRHSIKKNLIGALLFDSGETAEATRLKRTARRRYTRRKNRICYLQEIFSNEMAKVDDSFFHRLEESFLVEEDKKHERHPIFGNIVDEVAYHEKYPTIYHLRKKLVDSTDKADLRLIYLALAHMIKFRGHFLIEGDLNPDNSDVDKLFIQLVQTYNQLFEENPINASGVDAKAILSARLSKSRRLENLIAQLPGEKKNGLFGNLIALSLGLTPNFKSNFDLAEDAKLQLSKDTYDDDLDNLLAQIGDQYADLFLAAKNLSDAILLSDILRVNTEITKAPLSASMIKRYDEHHQDLTLLKALVRQQLPEKYKEIFFDQSKNGYAGYIDGGASQEEFYKFIKPILEKMDGTEELLVKLNREDLLRKQRTFDNGSIPHQIHLGELHAILRRQEDFYPFLKDNREKIEKILTFRIPYYVGPLARGNSRFAWMTRKSEETITPWNFEEVVDKGASAQSFIERMTNFDKNLPNEKVLPKHSLLYEYFTVYNELTKVKYVTEGMRKPAFLSGEQKKAIVDLLFKTNRKVTVKQLKEDYFKKIECFDSVEISGVEDRFNASLGTYHDLLKIIKDKDFLDNEENEDILEDIVLTLTLFEDREMIEERLKTYAHLFDDKVMKQLKRRRYTGWGRLSRKLINGIRDKQSGKTILDFLKSDGFANRNFMQLIHDDSLTFKEDIQKAQVSGQGDSLHEHIANLAGSPAIKKGILQTVKVVDELVKVMGRHKPENIVIEMARENQTTQKGQKNSRERMKRIEEGIKELGSQILKEHPVENTQLQNEKLYLYYLQNGRDMYVDQELDINRLSDYDVDHIVPQSFLKDDSIDNKVLTRSDKARGKSDNVPSEEVVKKMKNYWRQLLNAKLITQRKFDNLTKAERGGLSELDKAGFIKRQLVETRQITKHVAQILDSRMNTKYDENDKLIREVKVITLKSKLVSDFRKDFQFYKVREINNYHHAHDAYLNAVVGTALIKKYPKLESEFVYGDYKVYDVRKMIAKSEQEIGKATAKYFFYSNIMNFFKTEITLANGEIRKRPLIETNGETGEIVWDKGRDFATVRKVLSMPQVNIVKKTEVQTGGFSKESILPKRNSDKLIARKKDWDPKKYGGFDSPTVAYSVLVVAKVEKGKSKKLKSVKELLGITIMERSSFEKNPIDFLEAKGYKEVKKDLIIKLPKYSLFELENGRKRMLASAGELQKGNELALPSKYVNFLYLASHYEKLKGSPEDNEQKQLFVEQHKHYLDEIIEQISEFSKRVILADANLDKVLSAYNKHRDKPIREQAENIIHLFTLTNLGAPAAFKYFDTTIDRKRYTSTKEVLDATLIHQSITGLYETRIDLSQLGGDGGEAAAKGGGGGTLGDQGSRGSDPLPEPRVTLTVEGIPTEFLVNTGAEHSVLTKPMGKMGSKRTVVAGATGSKVYPWTTKRLLKIGQKQVTHSFLVIPECPAPLLGRDLLTKLKAQIQFSTEGPQVTWEDRPAMCLVLNLEEEYRLHEKPVPPSIDPSWLQLFPMVWAEKAGMGLANQVPPVVVELKSDASPVAVRQYPMSKEAREGIRPHIQRFLDLGILVPCQSPWNTPLLPVKKPGTNDYRPVQDLREVNKRVQDIHPTVPNPYNLLSSLPPSHTWYSVLDLKDAFFCLKLHPNSQPLFAFEWRDPEKGNTGQLTWTRLPQGFKNSPTLFNEALHRDLASFRALNPQVVMLQYVDDLLVAAPTYRDCKEGTRRLLQELSKLGYRVSAKKAQLCREEVTYLGYLLKGGKRWLTPARKATVMKIPTPTTPRQVREFLGTAGFCRLWIPGFASLAAPLYPLTRPKVPFTWTEAHQEAFGRIKEALLSAPALALPDLTKPFALYVDEKEGVARGVLTQTLGPWRRPVAYLSKKLDPVASGWPTCLKAIAAVALLLKDADKLTLGQNVLVIAPHNLESIVRQPPDRWMTNARMTHYQSLLLNERVSFAPPAILNPATLLPVESDDTPIHICSEILAEETGTRPDLRDQPLPGVPAWYTDGSSFIMDGRRQAGAAIVDNKRTVWASNLPEGTSAQKAELIALTQALRLAEGKSINIYTDSRYAFATAHVHGAIYKQRGWLTSAGKDIKNKEEILALLEAIHLPKRVAIIHCPGHQRGTDPVATGNRKADEAAKQAAQSTRILTETTKNAGKRTADGSEFEKRTADGSEFESPKKKAKVE

SEQ ID NO: 1761 - protein, 2213 aa, synthetic construct
MPAAKRVKLDGGDKKYSIGLDIGTNSVGWAVITDEYKVPSKKFKVLGNTDRHSIKKNLIGALLFDSGETAEATRLKRTARRRYTRRKNRICYLQEIFSNEMAKVDDSFFHRLEESFLVEEDKKHERHPIFGNIVDEVAYHEKYPTIYHLRKKLVDSTDKADLRLIYLALAHMIKFRGHFLIEGDLNPDNSDVDKLFIQLVQTYNQLFEENPINASGVDAKAILSARLSKSRRLENLIAQLPGEKKNGLFGNLIALSLGLTPNFKSNFDLAEDAKLQLSKDTYDDDLDNLLAQIGDQYADLFLAAKNLSDAILLSDILRVNTEITKAPLSASMIKRYDEHHQDLTLLKALVRQQLPEKYKEIFFDQSKNGYAGYIDGGASQEEFYKFIKPILEKMDGTEELLVKLNREDLLRKQRTFDNGSIPHQIHLGELHAILRRQEDFYPFLKDNREKIEKILTFRIPYYVGPLARGNSRFAWMTRKSEETITPWNFEEVVDKGASAQSFIERMTNFDKNLPNEKVLPKHSLLYEYFTVYNELTKVKYVTEGMRKPAFLSGEQKKAIVDLLFKTNRKVTVKQLKEDYFKKIECFDSVEISGVEDRFNASLGTYHDLLKIIKDKDFLDNEENEDILEDIVLTLTLFEDREMIEERLKTYAHLFDDKVMKQLKRRRYTGWGRLSRKLINGIRDKQSGKTILDFLKSDGFANRNFMQLIHDDSLTFKEDIQKAQVSGQGDSLHEHIANLAGSPAIKKGILQTVKVVDELVKVMGRHKPENIVIEMARENQTTQKGQKNSRERMKRIEEGIKELGSQILKEHPVENTQLQNEKLYLYYLQNGRDMYVDQELDINRLSDYDVDHIVPQSFLKDDSIDNKVLTRSDKARGKSDNVPSEEVVKKMKNYWRQLLNAKLITQRKFDNLTKAERGGLSELDKAGFIKRQLVETRQITKHVAQILDSRMNTKYDENDKLIREVKVITLKSKLVSDFRKDFQFYKVREINNYHHAHDAYLNAVVGTALIKKYPKLESEFVYGDYKVYDVRKMIAKSEQEIGKATAKYFFYSNIMNFFKTEITLANGEIRKRPLIETNGETGEIVWDKGRDFATVRKVLSMPQVNIVKKTEVQTGGFSKESILPKRNSDKLIARKKDWDPKKYGGFDSPTVAYSVLVVAKVEKGKSKKLKSVKELLGITIMERSSFEKNPIDFLEAKGYKEVKKDLIIKLPKYSLFELENGRKRMLASAGELQKGNELALPSKYVNFLYLASHYEKLKGSPEDNEQKQLFVEQHKHYLDEIIEQISEFSKRVILADANLDKVLSAYNKHRDKPIREQAENIIHLFTLTNLGAPAAFKYFDTTIDRKRYTSTKEVLDATLIHQSITGLYETRIDLSQLGGDGGGGSGGGGGTLGDQGSRGSDPLPEPRVTLTVEGIPTEFLVNTGAEHSVLTKPMGKMGSKRTVVAGATGSKVYPWTTKRLLKIGQKQVTHSFLVIPECPAPLLGRDLLTKLKAQIQFSTEGPQVTWEDRPAMCLVLNLEEEYRLHEKPVPPSIDPSWLQLFPMVWAEKAGMGLANQVPPVVVELKSDASPVAVRQYPMSKEAREGIRPHIQRFLDLGILVPCQSPWNTPLLPVKKPGTNDYRPVQDLREVNKRVQDIHPTVPNPYNLLSSLPPSHTWYSVLDLKDAFFCLKLHPNSQPLFAFEWRDPEKGNTGQLTWTRLPQGFKNSPTLFNEALHRDLASFRALNPQVVMLQYVDDLLVAAPTYRDCKEGTRRLLQELSKLGYRVSAKKAQLCREEVTYLGYLLKGGKRWLTPARKATVMKIPTPTTPRQVREFLGTAGFCRLWIPGFASLAAPLYPLTRPKVPFTWTEAHQEAFGRIKEALLSAPALALPDLTKPFALYVDEKEGVARGVLTQTLGPWRRPVAYLSKKLDPVASGWPTCLKAIAAVALLLKDADKLTLGQNVLVIAPHNLESIVRQPPDRWMTNARMTHYQSLLLNERVSFAPPAILNPATLLPVESDDTPIHICSEILAEETGTRPDLRDQPLPGVPAWYTDGSSFIMDGRRQAGAAIVDNKRTVWASNLPEGTSAQKAELIALTQALRLAEGKSINIYTDSRYAFATAHVHGAIYKQRGWLTSAGKDIKNKEEILALLEAIHLPKRVAIIHCPGHQRGTDPVATGNRKADEAAKQAAQSTRILTETTKNAGKRTADGSEFEKRTADGSEFESPKKKAKVE

SEQ ID NO: 1762 - protein, 2218 aa, synthetic construct
MPAAKRVKLDGGDKKYSIGLDIGTNSVGWAVITDEYKVPSKKFKVLGNTDRHSIKKNLIGALLFDSGETAEATRLKRTARRRYTRRKNRICYLQEIFSNEMAKVDDSFFHRLEESFLVEEDKKHERHPIFGNIVDEVAYHEKYPTIYHLRKKLVDSTDKADLRLIYLALAHMIKFRGHFLIEGDLNPDNSDVDKLFIQLVQTYNQLFEENPINASGVDAKAILSARLSKSRRLENLIAQLPGEKKNGLFGNLIALSLGLTPNFKSNFDLAEDAKLQLSKDTYDDDLDNLLAQIGDQYADLFLAAKNLSDAILLSDILRVNTEITKAPLSASMIKRYDEHHQDLTLLKALVRQQLPEKYKEIFFDQSKNGYAGYIDGGASQEEFYKFIKPILEKMDGTEELLVKLNREDLLRKQRTFDNGSIPHQIHLGELHAILRRQEDFYPFLKDNREKIEKILTFRIPYYVGPLARGNSRFAWMTRKSEETITPWNFEEVVDKGASAQSFIERMTNFDKNLPNEKVLPKHSLLYEYFTVYNELTKVKYVTEGMRKPAFLSGEQKKAIVDLLFKTNRKVTVKQLKEDYFKKIECFDSVEISGVEDRFNASLGTYHDLLKIIKDKDFLDNEENEDILEDIVLTLTLFEDREMIEERLKTYAHLFDDKVMKQLKRRRYTGWGRLSRKLINGIRDKQSGKTILDFLKSDGFANRNFMQLIHDDSLTFKEDIQKAQVSGQGDSLHEHIANLAGSPAIKKGILQTVKVVDELVKVMGRHKPENIVIEMARENQTTQKGQKNSRERMKRIEEGIKELGSQILKEHPVENTQLQNEKLYLYYLQNGRDMYVDQELDINRLSDYDVDHIVPQSFLKDDSIDNKVLTRSDKARGKSDNVPSEEVVKKMKNYWRQLLNAKLITQRKFDNLTKAERGGLSELDKAGFIKRQLVETRQITKHVAQILDSRMNTKYDENDKLIREVKVITLKSKLVSDFRKDFQFYKVREINNYHHAHDAYLNAVVGTALIKKYPKLESEFVYGDYKVYDVRKMIAKSEQEIGKATAKYFFYSNIMNFFKTEITLANGEIRKRPLIETNGETGEIVWDKGRDFATVRKVLSMPQVNIVKKTEVQTGGFSKESILPKRNSDKLIARKKDWDPKKYGGFDSPTVAYSVLVVAKVEKGKSKKLKSVKELLGITIMERSSFEKNPIDFLEAKGYKEVKKDLIIKLPKYSLFELENGRKRMLASAGELQKGNELALPSKYVNFLYLASHYEKLKGSPEDNEQKQLFVEQHKHYLDEIIEQISEFSKRVILADANLDKVLSAYNKHRDKPIREQAENIIHLFTLTNLGAPAAFKYFDTTIDRKRYTSTKEVLDATLIHQSITGLYETRIDLSQLGGDGGPAPEAAAKGSSGGTLGDQGSRGSDPLPEPRVTLTVEGIPTEFLVNTGAEHSVLTKPMGKMGSKRTVVAGATGSKVYPWTTKRLLKIGQKQVTHSFLVIPECPAPLLGRDLLTKLKAQIQFSTEGPQVTWEDRPAMCLVLNLEEEYRLHEKPVPPSIDPSWLQLFPMVWAEKAGMGLANQVPPVVVELKSDASPVAVRQYPMSKEAREGIRPHIQRFLDLGILVPCQSPWNTPLLPVKKPGTNDYRPVQDLREVNKRVQDIHPTVPNPYNLLSSLPPSHTWYSVLDLKDAFFCLKLHPNSQPLFAFEWRDPEKGNTGQLTWTRLPQGFKNSPTLFNEALHRDLASFRALNPQVVMLQYVDDLLVAAPTYRDCKEGTRRLLQELSKLGYRVSAKKAQLCREEVTYLGYLLKGGKRWLTPARKATVMKIPTPTTPRQVREFLGTAGFCRLWIPGFASLAAPLYPLTRPKVPFTWTEAHQEAFGRIKEALLSAPALALPDLTKPFALYVDEKEGVARGVLTQTLGPWRRPVAYLSKKLDPVASGWPTCLKAIAAVALLLKDADKLTLGQNVLVIAPHNLESIVRQPPDRWMTNARMTHYQSLLLNERVSFAPPAILNPATLLPVESDDTPIHICSEILAEETGTRPDLRDQPLPGVPAWYTDGSSFIMDGRRQAGAAIVDNKRTVWASNLPEGTSAQKAELIALTQALRLAEGKSINIYTDSRYAFATAHVHGAIYKQRGWLTSAGKDIKNKEEILALLEAIHLPKRVAIIHCPGHQRGTDPVATGNRKADEAAKQAAQSTRILTETTKNAGKRTADGSEFEKRTADGSEFESPKKKAKVE

SEQ ID NO: 1763 - protein, 2215 aa, synthetic construct
MPAAKRVKLDGGDKKYSIGLDIGTNSVGWAVITDEYKVPSKKFKVLGNTDRHSIKKNLIGALLFDSGETAEATRLKRTARRRYTRRKNRICYLQEIFSNEMAKVDDSFFHRLEESFLVEEDKKHERHPIFGNIVDEVAYHEKYPTIYHLRKKLVDSTDKADLRLIYLALAHMIKFRGHFLIEGDLNPDNSDVDKLFIQLVQTYNQLFEENPINASGVDAKAILSARLSKSRRLENLIAQLPGEKKNGLFGNLIALSLGLTPNFKSNFDLAEDAKLQLSKDTYDDDLDNLLAQIGDQYADLFLAAKNLSDAILLSDILRVNTEITKAPLSASMIKRYDEHHQDLTLLKALVRQQLPEKYKEIFFDQSKNGYAGYIDGGASQEEFYKFIKPILEKMDGTEELLVKLNREDLLRKQRTFDNGSIPHQIHLGELHAILRRQEDFYPFLKDNREKIEKILTFRIPYYVGPLARGNSRFAWMTRKSEETITPWNFEEVVDKGASAQSFIERMTNFDKNLPNEKVLPKHSLLYEYFTVYNELTKVKYVTEGMRKPAFLSGEQKKAIVDLLFKTNRKVTVKQLKEDYFKKIECFDSVEISGVEDRFNASLGTYHDLLKIIKDKDFLDNEENEDILEDIVLTLTLFEDREMIEERLKTYAHLFDDKVMKQLKRRRYTGWGRLSRKLINGIRDKQSGKTILDFLKSDGFANRNFMQLIHDDSLTFKEDIQKAQVSGQGDSLHEHIANLAGSPAIKKGILQTVKVVDELVKVMGRHKPENIVIEMARENQTTQKGQKNSRERMKRIEEGIKELGSQILKEHPVENTQLQNEKLYLYYLQNGRDMYVDQELDINRLSDYDVDHIVPQSFLKDDSIDNKVLTRSDKARGKSDNVPSEEVVKKMKNYWRQLLNAKLITQRKFDNLTKAERGGLSELDKAGFIKRQLVETRQITKHVAQILDSRMNTKYDENDKLIREVKVITLKSKLVSDFRKDFQFYKVREINNYHHAHDAYLNAVVGTALIKKYPKLESEFVYGDYKVYDVRKMIAKSEQEIGKATAKYFFYSNIMNFFKTEITLANGEIRKRPLIETNGETGEIVWDKGRDFATVRKVLSMPQVNIVKKTEVQTGGFSKESILPKRNSDKLIARKKDWDPKKYGGFDSPTVAYSVLVVAKVEKGKSKKLKSVKELLGITIMERSSFEKNPIDFLEAKGYKEVKKDLIIKLPKYSLFELENGRKRMLASAGELQKGNELALPSKYVNFLYLASHYEKLKGSPEDNEQKQLFVEQHKHYLDEIIEQISEFSKRVILADANLDKVLSAYNKHRDKPIREQAENIIHLFTLTNLGAPAAFKYFDTTIDRKRYTSTKEVLDATLIHQSITGLYETRIDLSQLGGDGGEAAAKGGSGGTLGDQGSRGSDPLPEPRVTLTVEGIPTEFLVNTGAEHSVLTKPMGKMGSKRTVVAGATGSKVYPWTTKRLLKIGQKQVTHSFLVIPECPAPLLGRDLLTKLKAQIQFSTEGPQVTWEDRPAMCLVLNLEEEYRLHEKPVPPSIDPSWLQLFPMVWAEKAGMGLANQVPPVVVELKSDASPVAVRQYPMSKEAREGIRPHIQRFLDLGILVPCQSPWNTPLLPVKKPGTNDYRPVQDLREVNKRVQDIHPTVPNPYNLLSSLPPSHTWYSVLDLKDAFFCLKLHPNSQPLFAFEWRDPEKGNTGQLTWTRLPQGFKNSPTLFNEALHRDLASFRALNPQVVMLQYVDDLLVAAPTYRDCKEGTRRLLQELSKLGYRVSAKKAQLCREEVTYLGYLLKGGKRWLTPARKATVMKIPTPTTPRQVREFLGTAGFCRLWIPGFASLAAPLYPLTRPKVPFTWTEAHQEAFGRIKEALLSAPALALPDLTKPFALYVDEKEGVARGVLTQTLGPWRRPVAYLSKKLDPVASGWPTCLKAIAAVALLLKDADKLTLGQNVLVIAPHNLESIVRQPPDRWMTNARMTHYQSLLLNERVSFAPPAILNPATLLPVESDDTPIHICSEILAEETGTRPDLRDQPLPGVPAWYTDGSSFIMDGRRQAGAAIVDNKRTVWASNLPEGTSAQKAELIALTQALRLAEGKSINIYTDSRYAFATAHVHGAIYKQRGWLTSAGKDIKNKEEILALLEAIHLPKRVAIIHCPGHQRGTDPVATGNRKADEAAKQAAQSTRILTETTKNAGKRTADGSEFEKRTADGSEFESPKKKAKVE

SEQ ID NO: 1764 - protein, 2216 aa, synthetic construct
MPAAKRVKLDGGDKKYSIGLDIGTNSVGWAVITDEYKVPSKKFKVLGNTDRHSIKKNLIGALLFDSGETAEATRLKRTARRRYTRRKNRICYLQEIFSNEMAKVDDSFFHRLEESFLVEEDKKHERHPIFGNIVDEVAYHEKYPTIYHLRKKLVDSTDKADLRLIYLALAHMIKFRGHFLIEGDLNPDNSDVDKLFIQLVQTYNQLFEENPINASGVDAKAILSARLSKSRRLENLIAQLPGEKKNGLFGNLIALSLGLTPNFKSNFDLAEDAKLQLSKDTYDDDLDNLLAQIGDQYADLFLAAKNLSDAILLSDILRVNTEITKAPLSASMIKRYDEHHQDLTLLKALVRQQLPEKYKEIFFDQSKNGYAGYIDGGASQEEFYKFIKPILEKMDGTEELLVKLNREDLLRKQRTFDNGSIPHQIHLGELHAILRRQEDFYPFLKDNREKIEKILTFRIPYYVGPLARGNSRFAWMTRKSEETITPWNFEEVVDKGASAQSFIERMTNFDKNLPNEKVLPKHSLLYEYFTVYNELTKVKYVTEGMRKPAFLSGEQKKAIVDLLFKTNRKVTVKQLKEDYFKKIECFDSVEISGVEDRFNASLGTYHDLLKIIKDKDFLDNEENEDILEDIVLTLTLFEDREMIEERLKTYAHLFDDKVMKQLKRRRYTGWGRLSRKLINGIRDKQSGKTILDFLKSDGFANRNFMQLIHDDSLTFKEDIQKAQVSGQGDSLHEHIANLAGSPAIKKGILQTVKVVDELVKVMGRHKPENIVIEMARENQTTQKGQKNSRERMKRIEEGIKELGSQILKEHPVENTQLQNEKLYLYYLQNGRDMYVDQELDINRLSDYDVDHIVPQSFLKDDSIDNKVLTRSDKARGKSDNVPSEEVVKKMKNYWRQLLNAKLITQRKFDNLTKAERGGLSELDKAGFIKRQLVETRQITKHVAQILDSRMNTKYDENDKLIREVKVITLKSKLVSDFRKDFQFYKVREINNYHHAHDAYLNAVVGTALIKKYPKLESEFVYGDYKVYDVRKMIAKSEQEIGKATAKYFFYSNIMNFFKTEITLANGEIRKRPLIETNGETGEIVWDKGRDFATVRKVLSMPQVNIVKKTEVQTGGFSKESILPKRNSDKLIARKKDWDPKKYGGFDSPTVAYSVLVVAKVEKGKSKKLKSVKELLGITIMERSSFEKNPIDFLEAKGYKEVKKDLIIKLPKYSLFELENGRKRMLASAGELQKGNELALPSKYVNFLYLASHYEKLKGSPEDNEQKQLFVEQHKHYLDEIIEQISEFSKRVILADANLDKVLSAYNKHRDKPIREQAENIIHLFTLTNLGAPAAFKYFDTTIDRKRYTSTKEVLDATLIHQSITGLYETRIDLSQLGGDGGGGGGSSGGSGGTLGDQGSRGSDPLPEPRVTLTVEGIPTEFLVNTGAEHSVLTKPMGKMGSKRTVVAGATGSKVYPWTTKRLLKIGQKQVTHSFLVIPECPAPLLGRDLLTKLKAQIQFSTEGPQVTWEDRPAMCLVLNLEEEYRLHEKPVPPSIDPSWLQLFPMVWAEKAGMGLANQVPPVVVELKSDASPVAVRQYPMSKEAREGIRPHIQRFLDLGILVPCQSPWNTPLLPVKKPGTNDYRPVQDLREVNKRVQDIHPTVPNPYNLLSSLPPSHTWYSVLDLKDAFFCLKLHPNSQPLFAFEWRDPEKGNTGQLTWTRLPQGFKNSPTLFNEALHRDLASFRALNPQVVMLQYVDDLLVAAPTYRDCKEGTRRLLQELSKLGYRVSAKKAQLCREEVTYLGYLLKGGKRWLTPARKATVMKIPTPTTPRQVREFLGTAGFCRLWIPGFASLAAPLYPLTRPKVPFTWTEAHQEAFGRIKEALLSAPALALPDLTKPFALYVDEKEGVARGVLTQTLGPWRRPVAYLSKKLDPVASGWPTCLKAIAAVALLLKDADKLTLGQNVLVIAPHNLESIVRQPPDRWMTNARMTHYQSLLLNERVSFAPPAILNPATLLPVESDDTPIHICSEILAEETGTRPDLRDQPLPGVPAWYTDGSSFIMDGRRQAGAAIVDNKRTVWASNLPEGTSAQKAELIALTQALRLAEGKSINIYTDSRYAFATAHVHGAIYKQRGWLTSAGKDIKNKEEILALLEAIHLPKRVAIIHCPGHQRGTDPVATGNRKADEAAKQAAQSTRILTETTKNAGKRTADGSEFEKRTADGSEFESPKKKAKVE

SEQ ID NO: 1765 - protein, 2216 aa, synthetic construct
MPAAKRVKLDGGDKKYSIGLDIGTNSVGWAVITDEYKVPSKKFKVLGNTDRHSIKKNLIGALLFDSGETAEATRLKRTARRRYTRRKNRICYLQEIFSNEMAKVDDSFFHRLEESFLVEEDKKHERHPIFGNIVDEVAYHEKYPTIYHLRKKLVDSTDKADLRLIYLALAHMIKFRGHFLIEGDLNPDNSDVDKLFIQLVQTYNQLFEENPINASGVDAKAILSARLSKSRRLENLIAQLPGEKKNGLFGNLIALSLGLTPNFKSNFDLAEDAKLQLSKDTYDDDLDNLLAQIGDQYADLFLAAKNLSDAILLSDILRVNTEITKAPLSASMIKRYDEHHQDLTLLKALVRQQLPEKYKEIFFDQSKNGYAGYIDGGASQEEFYKFIKPILEKMDGTEELLVKLNREDLLRKQRTFDNGSIPHQIHLGELHAILRRQEDFYPFLKDNREKIEKILTFRIPYYVGPLARGNSRFAWMTRKSEETITPWNFEEVVDKGASAQSFIERMTNFDKNLPNEKVLPKHSLLYEYFTVYNELTKVKYVTEGMRKPAFLSGEQKKAIVDLLFKTNRKVTVKQLKEDYFKKIECFDSVEISGVEDRFNASLGTYHDLLKIIKDKDFLDNEENEDILEDIVLTLTLFEDREMIEERLKTYAHLFDDKVMKQLKRRRYTGWGRLSRKLINGIRDKQSGKTILDFLKSDGFANRNFMQLIHDDSLTFKEDIQKAQVSGQGDSLHEHIANLAGSPAIKKGILQTVKVVDELVKVMGRHKPENIVIEMARENQTTQKGQKNSRERMKRIEEGIKELGSQILKEHPVENTQLQNEKLYLYYLQNGRDMYVDQELDINRLSDYDVDHIVPQSFLKDDSIDNKVLTRSDKARGKSDNVPSEEVVKKMKNYWRQLLNAKLITQRKFDNLTKAERGGLSELDKAGFIKRQLVETRQITKHVAQILDSRMNTKYDENDKLIREVKVITLKSKLVSDFRKDFQFYKVREINNYHHAHDAYLNAVVGTALIKKYPKLESEFVYGDYKVYDVRKMIAKSEQEIGKATAKYFFYSNIMNFFKTEITLANGEIRKRPLIETNGETGEIVWDKGRDFATVRKVLSMPQVNIVKKTEVQTGGFSKESILPKRNSDKLIARKKDWDPKKYGGFDSPTVAYSVLVVAKVEKGKSKKLKSVKELLGITIMERSSFEKNPIDFLEAKGYKEVKKDLIIKLPKYSLFELENGRKRMLASAGELQKGNELALPSKYVNFLYLASHYEKLKGSPEDNEQKQLFVEQHKHYLDEIIEQISEFSKRVILADANLDKVLSAYNKHRDKPIREQAENIIHLFTLTNLGAPAAFKYFDTTIDRKRYTSTKEVLDATLIHQSITGLYETRIDLSQLGGDGGPAPGSSGGSGGTLGDQGSRGSDPLPEPRVTLTVEGIPTEFLVNTGAEHSVLTKPMGKMGSKRTVVAGATGSKVYPWTTKRLLKIGQKQVTHSFLVIPECPAPLLGRDLLTKLKAQIQFSTEGPQVTWEDRPAMCLVLNLEEEYRLHEKPVPPSIDPSWLQLFPMVWAEKAGMGLANQVPPVVVELKSDASPVAVRQYPMSKEAREGIRPHIQRFLDLGILVPCQSPWNTPLLPVKKPGTNDYRPVQDLREVNKRVQDIHPTVPNPYNLLSSLPPSHTWYSVLDLKDAFFCLKLHPNSQPLFAFEWRDPEKGNTGQLTWTRLPQGFKNSPTLFNEALHRDLASFRALNPQVVMLQYVDDLLVAAPTYRDCKEGTRRLLQELSKLGYRVSAKKAQLCREEVTYLGYLLKGGKRWLTPARKATVMKIPTPTTPRQVREFLGTAGFCRLWIPGFASLAAPLYPLTRPKVPFTWTEAHQEAFGRIKEALLSAPALALPDLTKPFALYVDEKEGVARGVLTQTLGPWRRPVAYLSKKLDPVASGWPTCLKAIAAVALLLKDADKLTLGQNVLVIAPHNLESIVRQPPDRWMTNARMTHYQSLLLNERVSFAPPAILNPATLLPVESDDTPIHICSEILAEETGTRPDLRDQPLPGVPAWYTDGSSFIMDGRRQAGAAIVDNKRTVWASNLPEGTSAQKAELIALTQALRLAEGKSINIYTDSRYAFATAHVHGAIYKQRGWLTSAGKDIKNKEEILALLEAIHLPKRVAIIHCPGHQRGTDPVATGNRKADEAAKQAAQSTRILTETTKNAGKRTADGSEFEKRTADGSEFESPKKKAKVE

SEQ ID NO: 1766 - protein, 2216 aa, synthetic construct
MPAAKRVKLDGGDKKYSIGLDIGTNSVGWAVITDEYKVPSKKFKVLGNTDRHSIKKNLIGALLFDSGETAEATRLKRTARRRYTRRKNRICYLQEIFSNEMAKVDDSFFHRLEESFLVEEDKKHERHPIFGNIVDEVAYHEKYPTIYHLRKKLVDSTDKADLRLIYLALAHMIKFRGHFLIEGDLNPDNSDVDKLFIQLVQTYNQLFEENPINASGVDAKAILSARLSKSRRLENLIAQLPGEKKNGLFGNLIALSLGLTPNFKSNFDLAEDAKLQLSKDTYDDDLDNLLAQIGDQYADLFLAAKNLSDAILLSDILRVNTEITKAPLSASMIKRYDEHHQDLTLLKALVRQQLPEKYKEIFFDQSKNGYAGYIDGGASQEEFYKFIKPILEKMDGTEELLVKLNREDLLRKQRTFDNGSIPHQIHLGELHAILRRQEDFYPFLKDNREKIEKILTFRIPYYVGPLARGNSRFAWMTRKSEETITPWNFEEVVDKGASAQSFIERMTNFDKNLPNEKVLPKHSLLYEYFTVYNELTKVKYVTEGMRKPAFLSGEQKKAIVDLLFKTNRKVTVKQLKEDYFKKIECFDSVEISGVEDRFNASLGTYHDLLKIIKDKDFLDNEENEDILEDIVLTLTLFEDREMIEERLKTYAHLFDDKVMKQLKRRRYTGWGRLSRKLINGIRDKQSGKTILDFLKSDGFANRNFMQLIHDDSLTFKEDIQKAQVSGQGDSLHEHIANLAGSPAIKKGILQTVKVVDELVKVMGRHKPENIVIEMARENQTTQKGQKNSRERMKRIEEGIKELGSQILKEHPVENTQLQNEKLYLYYLQNGRDMYVDQELDINRLSDYDVDHIVPQSFLKDDSIDNKVLTRSDKARGKSDNVPSEEVVKKMKNYWRQLLNAKLITQRKFDNLTKAERGGLSELDKAGFIKRQLVETRQITKHVAQILDSRMNTKYDENDKLIREVKVITLKSKLVSDFRKDFQFYKVREINNYHHAHDAYLNAVVGTALIKKYPKLESEFVYGDYKVYDVRKMIAKSEQEIGKATAKYFFYSNIMNFFKTEITLANGEIRKRPLIETNGETGEIVWDKGRDFATVRKVLSMPQVNIVKKTEVQTGGFSKESILPKRNSDKLIARKKDWDPKKYGGFDSPTVAYSVLVVAKVEKGKSKKLKSVKELLGITIMERSSFEKNPIDFLEAKGYKEVKKDLIIKLPKYSLFELENGRKRMLASAGELQKGNELALPSKYVNFLYLASHYEKLKGSPEDNEQKQLFVEQHKHYLDEIIEQISEFSKRVILADANLDKVLSAYNKHRDKPIREQAENIIHLFTLTNLGAPAAFKYFDTTIDRKRYTSTKEVLDATLIHQSITGLYETRIDLSQLGGDGGGGSGGSGGSGGTLGDQGSRGSDPLPEPRVTLTVEGIPTEFLVNTGAEHSVLTKPMGKMGSKRTVVAGATGSKVYPWTTKRLLKIGQKQVTHSFLVIPECPAPLLGRDLLTKLKAQIQFSTEGPQVTWEDRPAMCLVLNLEEEYRLHEKPVPPSIDPSWLQLFPMVWAEKAGMGLANQVPPVVVELKSDASPVAVRQYPMSKEAREGIRPHIQRFLDLGILVPCQSPWNTPLLPVKKPGTNDYRPVQDLREVNKRVQDIHPTVPNPYNLLSSLPPSHTWYSVLDLKDAFFCLKLHPNSQPLFAFEWRDPEKGNTGQLTWTRLPQGFKNSPTLFNEALHRDLASFRALNPQVVMLQYVDDLLVAAPTYRDCKEGTRRLLQELSKLGYRVSAKKAQLCREEVTYLGYLLKGGKRWLTPARKATVMKIPTPTTPRQVREFLGTAGFCRLWIPGFASLAAPLYPLTRPKVPFTWTEAHQEAFGRIKEALLSAPALALPDLTKPFALYVDEKEGVARGVLTQTLGPWRRPVAYLSKKLDPVASGWPTCLKAIAAVALLLKDADKLTLGQNVLVIAPHNLESIVRQPPDRWMTNARMTHYQSLLLNERVSFAPPAILNPATLLPVESDDTPIHICSEILAEETGTRPDLRDQPLPGVPAWYTDGSSFIMDGRRQAGAAIVDNKRTVWASNLPEGTSAQKAELIALTQALRLAEGKSINIYTDSRYAFATAHVHGAIYKQRGWLTSAGKDIKNKEEILALLEAIHLPKRVAIIHCPGHQRGTDPVATGNRKADEAAKQAAQSTRILTETTKNAGKRTADGSEFEKRTADGSEFESPKKKAKVE

SEQ ID NO: 1767 - protein, 2222 aa, synthetic construct
MPAAKRVKLDGGDKKYSIGLDIGTNSVGWAVITDEYKVPSKKFKVLGNTDRHSIKKNLIGALLFDSGETAEATRLKRTARRRYTRRKNRICYLQEIFSNEMAKVDDSFFHRLEESFLVEEDKKHERHPIFGNIVDEVAYHEKYPTIYHLRKKLVDSTDKADLRLIYLALAHMIKFRGHFLIEGDLNPDNSDVDKLFIQLVQTYNQLFEENPINASGVDAKAILSARLSKSRRLENLIAQLPGEKKNGLFGNLIALSLGLTPNFKSNFDLAEDAKLQLSKDTYDDDLDNLLAQIGDQYADLFLAAKNLSDAILLSDILRVNTEITKAPLSASMIKRYDEHHQDLTLLKALVRQQLPEKYKEIFFDQSKNGYAGYIDGGASQEEFYKFIKPILEKMDGTEELLVKLNREDLLRKQRTFDNGSIPHQIHLGELHAILRRQEDFYPFLKDNREKIEKILTFRIPYYVGPLARGNSRFAWMTRKSEETITPWNFEEVVDKGASAQSFIERMTNFDKNLPNEKVLPKHSLLYEYFTVYNELTKVKYVTEGMRKPAFLSGEQKKAIVDLLFKTNRKVTVKQLKEDYFKKIECFDSVEISGVEDRFNASLGTYHDLLKIIKDKDFLDNEENEDILEDIVLTLTLFEDREMIEERLKTYAHLFDDKVMKQLKRRRYTGWGRLSRKLINGIRDKQSGKTILDFLKSDGFANRNFMQLIHDDSLTFKEDIQKAQVSGQGDSLHEHIANLAGSPAIKKGILQTVKVVDELVKVMGRHKPENIVIEMARENQTTQKGQKNSRERMKRIEEGIKELGSQILKEHPVENTQLQNEKLYLYYLQNGRDMYVDQELDINRLSDYDVDHIVPQSFLKDDSIDNKVLTRSDKARGKSDNVPSEEVVKKMKNYWRQLLNAKLITQRKFDNLTKAERGGLSELDKAGFIKRQLVETRQITKHVAQILDSRMNTKYDENDKLIREVKVITLKSKLVSDFRKDFQFYKVREINNYHHAHDAYLNAVVGTALIKKYPKLESEFVYGDYKVYDVRKMIAKSEQEIGKATAKYFFYSNIMNFFKTEITLANGEIRKRPLIETNGETGEIVWDKGRDFATVRKVLSMPQVNIVKKTEVQTGGFSKESILPKRNSDKLIARKKDWDPKKYGGFDSPTVAYSVLVVAKVEKGKSKKLKSVKELLGITIMERSSFEKNPIDFLEAKGYKEVKKDLIIKLPKYSLFELENGRKRMLASAGELQKGNELALPSKYVNFLYLASHYEKLKGSPEDNEQKQLFVEQHKHYLDEIIEQISEFSKRVILADANLDKVLSAYNKHRDKPIREQAENIIHLFTLTNLGAPAAFKYFDTTIDRKRYTSTKEVLDATLIHQSITGLYETRIDLSQLGGDGGGGGGSEAAAKGGGGSGGTLGDQGSRGSDPLPEPRVTLTVEGIPTEFLVNTGAEHSVLTKPMGKMGSKRTVVAGATGSKVYPWTTKRLLKIGQKQVTHSFLVIPECPAPLLGRDLLTKLKAQIQFSTEGPQVTWEDRPAMCLVLNLEEEYRLHEKPVPPSIDPSWLQLFPMVWAEKAGMGLANQVPPVVVELKSDASPVAVRQYPMSKEAREGIRPHIQRFLDLGILVPCQSPWNTPLLPVKKPGTNDYRPVQDLREVNKRVQDIHPTVPNPYNLLSSLPPSHTWYSVLDLKDAFFCLKLHPNSQPLFAFEWRDPEKGNTGQLTWTRLPQGFKNSPTLFNEALHRDLASFRALNPQVVMLQYVDDLLVAAPTYRDCKEGTRRLLQELSKLGYRVSAKKAQLCREEVTYLGYLLKGGKRWLTPARKATVMKIPTPTTPRQVREFLGTAGFCRLWIPGFASLAAPLYPLTRPKVPFTWTEAHQEAFGRIKEALLSAPALALPDLTKPFALYVDEKEGVARGVLTQTLGPWRRPVAYLSKKLDPVASGWPTCLKAIAAVALLLKDADKLTLGQNVLVIAPHNLESIVRQPPDRWMTNARMTHYQSLLLNERVSFAPPAILNPATLLPVESDDTPIHICSEILAEETGTRPDLRDQPLPGVPAWYTDGSSFIMDGRRQAGAAIVDNKRTVWASNLPEGTSAQKAELIALTQALRLAEGKSINIYTDSRYAFATAHVHGAIYKQRGWLTSAGKDIKNKEEILALLEAIHLPKRVAIIHCPGHQRGTDPVATGNRKADEAAKQAAQSTRILTETTKNAGKRTADGSEFEKRTADGSEFESPKKKAKVE

SEQ ID NO: 1768 - protein, 2213 aa, synthetic construct
MPAAKRVKLDGGDKKYSIGLDIGTNSVGWAVITDEYKVPSKKFKVLGNTDRHSIKKNLIGALLFDSGETAEATRLKRTARRRYTRRKNRICYLQEIFSNEMAKVDDSFFHRLEESFLVEEDKKHERHPIFGNIVDEVAYHEKYPTIYHLRKKLVDSTDKADLRLIYLALAHMIKFRGHFLIEGDLNPDNSDVDKLFIQLVQTYNQLFEENPINASGVDAKAILSARLSKSRRLENLIAQLPGEKKNGLFGNLIALSLGLTPNFKSNFDLAEDAKLQLSKDTYDDDLDNLLAQIGDQYADLFLAAKNLSDAILLSDILRVNTEITKAPLSASMIKRYDEHHQDLTLLKALVRQQLPEKYKEIFFDQSKNGYAGYIDGGASQEEFYKFIKPILEKMDGTEELLVKLNREDLLRKQRTFDNGSIPHQIHLGELHAILRRQEDFYPFLKDNREKIEKILTFRIPYYVGPLARGNSRFAWMTRKSEETITPWNFEEVVDKGASAQSFIERMTNFDKNLPNEKVLPKHSLLYEYFTVYNELTKVKYVTEGMRKPAFLSGEQKKAIVDLLFKTNRKVTVKQLKEDYFKKIECFDSVEISGVEDRFNASLGTYHDLLKIIKDKDFLDNEENEDILEDIVLTLTLFEDREMIEERLKTYAHLFDDKVMKQLKRRRYTGWGRLSRKLINGIRDKQSGKTILDFLKSDGFANRNFMQLIHDDSLTFKEDIQKAQVSGQGDSLHEHIANLAGSPAIKKGILQTVKVVDELVKVMGRHKPENIVIEMARENQTTQKGQKNSRERMKRIEEGIKELGSQILKEHPVENTQLQNEKLYLYYLQNGRDMYVDQELDINRLSDYDVDHIVPQSFLKDDSIDNKVLTRSDKARGKSDNVPSEEVVKKMKNYWRQLLNAKLITQRKFDNLTKAERGGLSELDKAGFIKRQLVETRQITKHVAQILDSRMNTKYDENDKLIREVKVITLKSKLVSDFRKDFQFYKVREINNYHHAHDAYLNAVVGTALIKKYPKLESEFVYGDYKVYDVRKMIAKSEQEIGKATAKYFFYSNIMNFFKTEITLANGEIRKRPLIETNGETGEIVWDKGRDFATVRKVLSMPQVNIVKKTEVQTGGFSKESILPKRNSDKLIARKKDWDPKKYGGFDSPTVAYSVLVVAKVEKGKSKKLKSVKELLGITIMERSSFEKNPIDFLEAKGYKEVKKDLIIKLPKYSLFELENGRKRMLASAGELQKGNELALPSKYVNFLYLASHYEKLKGSPEDNEQKQLFVEQHKHYLDEIIEQISEFSKRVILADANLDKVLSAYNKHRDKPIREQAENIIHLFTLTNLGAPAAFKYFDTTIDRKRYTSTKEVLDATLIHQSITGLYETRIDLSQLGGDGGGGSGSSGGTLGDQGSRGSDPLPEPRVTLTVEGIPTEFLVNTGAEHSVLTKPMGKMGSKRTVVAGATGSKVYPWTTKRLLKIGQKQVTHSFLVIPECPAPLLGRDLLTKLKAQIQFSTEGPQVTWEDRPAMCLVLNLEEEYRLHEKPVPPSIDPSWLQLFPMVWAEKAGMGLANQVPPVVVELKSDASPVAVRQYPMSKEAREGIRPHIQRFLDLGILVPCQSPWNTPLLPVKKPGTNDYRPVQDLREVNKRVQDIHPTVPNPYNLLSSLPPSHTWYSVLDLKDAFFCLKLHPNSQPLFAFEWRDPEKGNTGQLTWTRLPQGFKNSPTLFNEALHRDLASFRALNPQVVMLQYVDDLLVAAPTYRDCKEGTRRLLQELSKLGYRVSAKKAQLCREEVTYLGYLLKGGKRWLTPARKATVMKIPTPTTPRQVREFLGTAGFCRLWIPGFASLAAPLYPLTRPKVPFTWTEAHQEAFGRIKEALLSAPALALPDLTKPFALYVDEKEGVARGVLTQTLGPWRRPVAYLSKKLDPVASGWPTCLKAIAAVALLLKDADKLTLGQNVLVIAPHNLESIVRQPPDRWMTNARMTHYQSLLLNERVSFAPPAILNPATLLPVESDDTPIHICSEILAEETGTRPDLRDQPLPGVPAWYTDGSSFIMDGRRQAGAAIVDNKRTVWASNLPEGTSAQKAELIALTQALRLAEGKSINIYTDSRYAFATAHVHGAIYKQRGWLTSAGKDIKNKEEILALLEAIHLPKRVAIIHCPGHQRGTDPVATGNRKADEAAKQAAQSTRILTETTKNAGKRTADGSEFEKRTADGSEFESPKKKAKVE

SEQ ID NO: 1769 - protein, 2218 aa, synthetic construct
MPAAKRVKLDGGDKKYSIGLDIGTNSVGWAVITDEYKVPSKKFKVLGNTDRHSIKKNLIGALLFDSGETAEATRLKRTARRRYTRRKNRICYLQEIFSNEMAKVDDSFFHRLEESFLVEEDKKHERHPIFGNIVDEVAYHEKYPTIYHLRKKLVDSTDKADLRLIYLALAHMIKFRGHFLIEGDLNPDNSDVDKLFIQLVQTYNQLFEENPINASGVDAKAILSARLSKSRRLENLIAQLPGEKKNGLFGNLIALSLGLTPNFKSNFDLAEDAKLQLSKDTYDDDLDNLLAQIGDQYADLFLAAKNLSDAILLSDILRVNTEITKAPLSASMIKRYDEHHQDLTLLKALVRQQLPEKYKEIFFDQSKNGYAGYIDGGASQEEFYKFIKPILEKMDGTEELLVKLNREDLLRKQRTFDNGSIPHQIHLGELHAILRRQEDFYPFLKDNREKIEKILTFRIPYYVGPLARGNSRFAWMTRKSEETITPWNFEEVVDKGASAQSFIERMTNFDKNLPNEKVLPKHSLLYEYFTVYNELTKVKYVTEGMRKPAFLSGEQKKAIVDLLFKTNRKVTVKQLKEDYFKKIECFDSVEISGVEDRFNASLGTYHDLLKIIKDKDFLDNEENEDILEDIVLTLTLFEDREMIEERLKTYAHLFDDKVMKQLKRRRYTGWGRLSRKLINGIRDKQSGKTILDFLKSDGFANRNFMQLIHDDSLTFKEDIQKAQVSGQGDSLHEHIANLAGSPAIKKGILQTVKVVDELVKVMGRHKPENIVIEMARENQTTQKGQKNSRERMKRIEEGIKELGSQILKEHPVENTQLQNEKLYLYYLQNGRDMYVDQELDINRLSDYDVDHIVPQSFLKDDSIDNKVLTRSDKARGKSDNVPSEEVVKKMKNYWRQLLNAKLITQRKFDNLTKAERGGLSELDKAGFIKRQLVETRQITKHVAQILDSRMNTKYDENDKLIREVKVITLKSKLVSDFRKDFQFYKVREINNYHHAHDAYLNAVVGTALIKKYPKLESEFVYGDYKVYDVRKMIAKSEQEIGKATAKYFFYSNIMNFFKTEITLANGEIRKRPLIETNGETGEIVWDKGRDFATVRKVLSMPQVNIVKKTEVQTGGFSKESILPKRNSDKLIARKKDWDPKKYGGFDSPTVAYSVLVVAKVEKGKSKKLKSVKELLGITIMERSSFEKNPIDFLEAKGYKEVKKDLIIKLPKYSLFELENGRKRMLASAGELQKGNELALPSKYVNFLYLASHYEKLKGSPEDNEQKQLFVEQHKHYLDEIIEQISEFSKRVILADANLDKVLSAYNKHRDKPIREQAENIIHLFTLTNLGAPAAFKYFDTTIDRKRYTSTKEVLDATLIHQSITGLYETRIDLSQLGGDGGGGSEAAAKGSSGGTLGDQGSRGSDPLPEPRVTLTVEGIPTEFLVNTGAEHSVLTKPMGKMGSKRTVVAGATGSKVYPWTTKRLLKIGQKQVTHSFLVIPECPAPLLGRDLLTKLKAQIQFSTEGPQVTWEDRPAMCLVLNLEEEYRLHEKPVPPSIDPSWLQLFPMVWAEKAGMGLANQVPPVVVELKSDASPVAVRQYPMSKEAREGIRPHIQRFLDLGILVPCQSPWNTPLLPVKKPGTNDYRPVQDLREVNKRVQDIHPTVPNPYNLLSSLPPSHTWYSVLDLKDAFFCLKLHPNSQPLFAFEWRDPEKGNTGQLTWTRLPQGFKNSPTLFNEALHRDLASFRALNPQVVMLQYVDDLLVAAPTYRDCKEGTRRLLQELSKLGYRVSAKKAQLCREEVTYLGYLLKGGKRWLTPARKATVMKIPTPTTPRQVREFLGKAGFCRLFIPGFASLAAPLYPLTRPKVPFTWTEAHQEAFGRIKEALLSAPALALPDLTKPFALYVDEKEGVARGVLTQTLGPWRRPVAYLSKKLDPVASGWPTCLKAIAAVALLLKDADKLTLGQNVLVIAPHNLESIVRQPPDRWMTNARMTHYQSLLLNERVSFAPPAILNPATLLPVESDDTPIHICSEILAEETGTRPDLRDQPLPGVPAWYTDGSSFIMDGRRQAGAAIVDNKRTVWASNLPEGTSAQKAELIALTQALRLAEGKSINIYTDSRYAFATAHVHGAIYKQRGWLTSAGKDIKNKEEILALLEAIHLPKRVAIIHCPGHQRGTDPVATGNRKADEAAKQAAQSTRILTETTKNAGKRTADGSEFEKRTADGSEFESPKKKAKVE

SEQ ID NO: 1770 - protein, 2218 aa, synthetic construct
MPAAKRVKLDGGDKKYSIGLDIGTNSVGWAVITDEYKVPSKKFKVLGNTDRHSIKKNLIGALLFDSGETAEATRLKRTARRRYTRRKNRICYLQEIFSNEMAKVDDSFFHRLEESFLVEEDKKHERHPIFGNIVDEVAYHEKYPTIYHLRKKLVDSTDKADLRLIYLALAHMIKFRGHFLIEGDLNPDNSDVDKLFIQLVQTYNQLFEENPINASGVDAKAILSARLSKSRRLENLIAQLPGEKKNGLFGNLIALSLGLTPNFKSNFDLAEDAKLQLSKDTYDDDLDNLLAQIGDQYADLFLAAKNLSDAILLSDILRVNTEITKAPLSASMIKRYDEHHQDLTLLKALVRQQLPEKYKEIFFDQSKNGYAGYIDGGASQEEFYKFIKPILEKMDGTEELLVKLNREDLLRKQRTFDNGSIPHQIHLGELHAILRRQEDFYPFLKDNREKIEKILTFRIPYYVGPLARGNSRFAWMTRKSEETITPWNFEEVVDKGASAQSFIERMTNFDKNLPNEKVLPKHSLLYEYFTVYNELTKVKYVTEGMRKPAFLSGEQKKAIVDLLFKTNRKVTVKQLKEDYFKKIECFDSVEISGVEDRFNASLGTYHDLLKIIKDKDFLDNEENEDILEDIVLTLTLFEDREMIEERLKTYAHLFDDKVMKQLKRRRYTGWGRLSRKLINGIRDKQSGKTILDFLKSDGFANRNFMQLIHDDSLTFKEDIQKAQVSGQGDSLHEHIANLAGSPAIKKGILQTVKVVDELVKVMGRHKPENIVIEMARENQTTQKGQKNSRERMKRIEEGIKELGSQILKEHPVENTQLQNEKLYLYYLQNGRDMYVDQELDINRLSDYDVDHIVPQSFLKDDSIDNKVLTRSDKARGKSDNVPSEEVVKKMKNYWRQLLNAKLITQRKFDNLTKAERGGLSELDKAGFIKRQLVETRQITKHVAQILDSRMNTKYDENDKLIREVKVITLKSKLVSDFRKDFQFYKVREINNYHHAHDAYLNAVVGTALIKKYPKLESEFVYGDYKVYDVRKMIAKSEQEIGKATAKYFFYSNIMNFFKTEITLANGEIRKRPLIETNGETGEIVWDKGRDFATVRKVLSMPQVNIVKKTEVQTGGFSKESILPKRNSDKLIARKKDWDPKKYGGFDSPTVAYSVLVVAKVEKGKSKKLKSVKELLGITIMERSSFEKNPIDFLEAKGYKEVKKDLIIKLPKYSLFELENGRKRMLASAGELQKGNELALPSKYVNFLYLASHYEKLKGSPEDNEQKQLFVEQHKHYLDEIIEQISEFSKRVILADANLDKVLSAYNKHRDKPIREQAENIIHLFTLTNLGAPAAFKYFDTTIDRKRYTSTKEVLDATLIHQSITGLYETRIDLSQLGGDGGEAAAKGGGPAPGGTLGDQGSRGSDPLPEPRVTLTVEGIPTEFLVNTGAEHSVLTKPMGKMGSKRTVVAGATGSKVYPWTTKRLLKIGQKQVTHSFLVIPECPAPLLGRDLLTKLKAQIQFSTEGPQVTWEDRPAMCLVLNLEEEYRLHEKPVPPSIDPSWLQLFPMVWAEKAGMGLANQVPPVVVELKSDASPVAVRQYPMSKEAREGIRPHIQRFLDLGILVPCQSPWNTPLLPVKKPGTNDYRPVQDLREVNKRVQDIHPTVPNPYNLLSSLPPSHTWYSVLDLKDAFFCLKLHPNSQPLFAFEWRDPEKGNTGQLTWTRLPQGFKNSPTLFNEALHRDLASFRALNPQVVMLQYVDDLLVAAPTYRDCKEGTRRLLQELSKLGYRVSAKKAQLCREEVTYLGYLLKGGKRWLTPARKATVMKIPTPTTPRQVREFLGKAGFCRLFIPGFASLAAPLYPLTRPKVPFTWTEAHQEAFGRIKEALLSAPALALPDLTKPFALYVDEKEGVARGVLTQTLGPWRRPVAYLSKKLDPVASGWPTCLKAIAAVALLLKDADKLTLGQNVLVIAPHNLESIVRQPPDRWMTNARMTHYQSLLLNERVSFAPPAILNPATLLPVESDDTPIHICSEILAEETGTRPDLRDQPLPGVPAWYTDGSSFIMDGRRQAGAAIVDNKRTVWASNLPEGTSAQKAELIALTQALRLAEGKSINIYTDSRYAFATAHVHGAIYKQRGWLTSAGKDIKNKEEILALLEAIHLPKRVAIIHCPGHQRGTDPVATGNRKADEAAKQAAQSTRILTETTKNAGKRTADGSEFEKRTADGSEFESPKKKAKVE

SEQ ID NO: 1771 - protein, 2218 aa, synthetic construct
MPAAKRVKLDGGDKKYSIGLDIGTNSVGWAVITDEYKVPSKKFKVLGNTDRHSIKKNLIGALLFDSGETAEATRLKRTARRRYTRRKNRICYLQEIFSNEMAKVDDSFFHRLEESFLVEEDKKHERHPIFGNIVDEVAYHEKYPTIYHLRKKLVDSTDKADLRLIYLALAHMIKFRGHFLIEGDLNPDNSDVDKLFIQLVQTYNQLFEENPINASGVDAKAILSARLSKSRRLENLIAQLPGEKKNGLFGNLIALSLGLTPNFKSNFDLAEDAKLQLSKDTYDDDLDNLLAQIGDQYADLFLAAKNLSDAILLSDILRVNTEITKAPLSASMIKRYDEHHQDLTLLKALVRQQLPEKYKEIFFDQSKNGYAGYIDGGASQEEFYKFIKPILEKMDGTEELLVKLNREDLLRKQRTFDNGSIPHQIHLGELHAILRRQEDFYPFLKDNREKIEKILTFRIPYYVGPLARGNSRFAWMTRKSEETITPWNFEEVVDKGASAQSFIERMTNFDKNLPNEKVLPKHSLLYEYFTVYNELTKVKYVTEGMRKPAFLSGEQKKAIVDLLFKTNRKVTVKQLKEDYFKKIECFDSVEISGVEDRFNASLGTYHDLLKIIKDKDFLDNEENEDILEDIVLTLTLFEDREMIEERLKTYAHLFDDKVMKQLKRRRYTGWGRLSRKLINGIRDKQSGKTILDFLKSDGFANRNFMQLIHDDSLTFKEDIQKAQVSGQGDSLHEHIANLAGSPAIKKGILQTVKVVDELVKVMGRHKPENIVIEMARENQTTQKGQKNSRERMKRIEEGIKELGSQILKEHPVENTQLQNEKLYLYYLQNGRDMYVDQELDINRLSDYDVDHIVPQSFLKDDSIDNKVLTRSDKARGKSDNVPSEEVVKKMKNYWRQLLNAKLITQRKFDNLTKAERGGLSELDKAGFIKRQLVETRQITKHVAQILDSRMNTKYDENDKLIREVKVITLKSKLVSDFRKDFQFYKVREINNYHHAHDAYLNAVVGTALIKKYPKLESEFVYGDYKVYDVRKMIAKSEQEIGKATAKYFFYSNIMNFFKTEITLANGEIRKRPLIETNGETGEIVWDKGRDFATVRKVLSMPQVNIVKKTEVQTGGFSKESILPKRNSDKLIARKKDWDPKKYGGFDSPTVAYSVLVVAKVEKGKSKKLKSVKELLGITIMERSSFEKNPIDFLEAKGYKEVKKDLIIKLPKYSLFELENGRKRMLASAGELQKGNELALPSKYVNFLYLASHYEKLKGSPEDNEQKQLFVEQHKHYLDEIIEQISEFSKRVILADANLDKVLSAYNKHRDKPIREQAENIIHLFTLTNLGAPAAFKYFDTTIDRKRYTSTKEVLDATLIHQSITGLYETRIDLSQLGGDGGGGGEAAAKGGSGGTLGDQGSRGSDPLPEPRVTLTVEGIPTEFLVNTGAEHSVLTKPMGKMGSKRTVVAGATGSKVYPWTTKRLLKIGQKQVTHSFLVIPECPAPLLGRDLLTKLKAQIQFSTEGPQVTWEDRPAMCLVLNLEEEYRLHEKPVPPSIDPSWLQLFPMVWAEKAGMGLANQVPPVVVELKSDASPVAVRQYPMSKEAREGIRPHIQRFLDLGILVPCQSPWNTPLLPVKKPGTNDYRPVQDLREVNKRVQDIHPTVPNPYNLLSSLPPSHTWYSVLDLKDAFFCLKLHPNSQPLFAFEWRDPEKGNTGQLTWTRLPQGFKNSPTLFNEALHRDLASFRALNPQVVMLQYVDDLLVAAPTYRDCKEGTRRLLQELSKLGYRVSAKKAQLCREEVTYLGYLLKGGKRWLTPARKATVMKIPTPTTPRQVREFLGKAGFCRLFIPGFASLAAPLYPLTRPKVPFTWTEAHQEAFGRIKEALLSAPALALPDLTKPFALYVDEKEGVARGVLTQTLGPWRRPVAYLSKKLDPVASGWPTCLKAIAAVALLLKDADKLTLGQNVLVIAPHNLESIVRQPPDRWMTNARMTHYQSLLLNERVSFAPPAILNPATLLPVESDDTPIHICSEILAEETGTRPDLRDQPLPGVPAWYTDGSSFIMDGRRQAGAAIVDNKRTVWASNLPEGTSAQKAELIALTQALRLAEGKSINIYTDSRYAFATAHVHGAIYKQRGWLTSAGKDIKNKEEILALLEAIHLPKRVAIIHCPGHQRGTDPVATGNRKADEAAKQAAQSTRILTETTKNAGKRTADGSEFEKRTADGSEFESPKKKAKVE

SEQ ID NO: 1772 - protein, 2213 aa, synthetic construct
MPAAKRVKLDGGDKKYSIGLDIGTNSVGWAVITDEYKVPSKKFKVLGNTDRHSIKKNLIGALLFDSGETAEATRLKRTARRRYTRRKNRICYLQEIFSNEMAKVDDSFFHRLEESFLVEEDKKHERHPIFGNIVDEVAYHEKYPTIYHLRKKLVDSTDKADLRLIYLALAHMIKFRGHFLIEGDLNPDNSDVDKLFIQLVQTYNQLFEENPINASGVDAKAILSARLSKSRRLENLIAQLPGEKKNGLFGNLIALSLGLTPNFKSNFDLAEDAKLQLSKDTYDDDLDNLLAQIGDQYADLFLAAKNLSDAILLSDILRVNTEITKAPLSASMIKRYDEHHQDLTLLKALVRQQLPEKYKEIFFDQSKNGYAGYIDGGASQEEFYKFIKPILEKMDGTEELLVKLNREDLLRKQRTFDNGSIPHQIHLGELHAILRRQEDFYPFLKDNREKIEKILTFRIPYYVGPLARGNSRFAWMTRKSEETITPWNFEEVVDKGASAQSFIERMTNFDKNLPNEKVLPKHSLLYEYFTVYNELTKVKYVTEGMRKPAFLSGEQKKAIVDLLFKTNRKVTVKQLKEDYFKKIECFDSVEISGVEDRFNASLGTYHDLLKIIKDKDFLDNEENEDILEDIVLTLTLFEDREMIEERLKTYAHLFDDKVMKQLKRRRYTGWGRLSRKLINGIRDKQSGKTILDFLKSDGFANRNFMQLIHDDSLTFKEDIQKAQVSGQGDSLHEHIANLAGSPAIKKGILQTVKVVDELVKVMGRHKPENIVIEMARENQTTQKGQKNSRERMKRIEEGIKELGSQILKEHPVENTQLQNEKLYLYYLQNGRDMYVDQELDINRLSDYDVDHIVPQSFLKDDSIDNKVLTRSDKARGKSDNVPSEEVVKKMKNYWRQLLNAKLITQRKFDNLTKAERGGLSELDKAGFIKRQLVETRQITKHVAQILDSRMNTKYDENDKLIREVKVITLKSKLVSDFRKDFQFYKVREINNYHHAHDAYLNAVVGTALIKKYPKLESEFVYGDYKVYDVRKMIAKSEQEIGKATAKYFFYSNIMNFFKTEITLANGEIRKRPLIETNGETGEIVWDKGRDFATVRKVLSMPQVNIVKKTEVQTGGFSKESILPKRNSDKLIARKKDWDPKKYGGFDSPTVAYSVLVVAKVEKGKSKKLKSVKELLGITIMERSSFEKNPIDFLEAKGYKEVKKDLIIKLPKYSLFELENGRKRMLASAGELQKGNELALPSKYVNFLYLASHYEKLKGSPEDNEQKQLFVEQHKHYLDEIIEQISEFSKRVILADANLDKVLSAYNKHRDKPIREQAENIIHLFTLTNLGAPAAFKYFDTTIDRKRYTSTKEVLDATLIHQSITGLYETRIDLSQLGGDGGGGGGSSGGTLGDQGSRGSDPLPEPRVTLTVEGIPTEFLVNTGAEHSVLTKPMGKMGSKRTVVAGATGSKVYPWTTKRLLKIGQKQVTHSFLVIPECPAPLLGRDLLTKLKAQIQFSTEGPQVTWEDRPAMCLVLNLEEEYRLHEKPVPPSIDPSWLQLFPMVWAEKAGMGLANQVPPVVVELKSDASPVAVRQYPMSKEAREGIRPHIQRFLDLGILVPCQSPWNTPLLPVKKPGTNDYRPVQDLREVNKRVQDIHPTVPNPYNLLSSLPPSHTWYSVLDLKDAFFCLKLHPNSQPLFAFEWRDPEKGNTGQLTWTRLPQGFKNSPTLFNEALHRDLASFRALNPQVVMLQYVDDLLVAAPTYRDCKEGTRRLLQELSKLGYRVSAKKAQLCREEVTYLGYLLKGGKRWLTPARKATVMKIPTPTTPRQVREFLGKAGFCRLFIPGFASLAAPLYPLTRPKVPFTWTEAHQEAFGRIKEALLSAPALALPDLTKPFALYVDEKEGVARGVLTQTLGPWRRPVAYLSKKLDPVASGWPTCLKAIAAVALLLKDADKLTLGQNVLVIAPHNLESIVRQPPDRWMTNARMTHYQSLLLNERVSFAPPAILNPATLLPVESDDTPIHICSEILAEETGTRPDLRDQPLPGVPAWYTDGSSFIMDGRRQAGAAIVDNKRTVWASNLPEGTSAQKAELIALTQALRLAEGKSINIYTDSRYAFATAHVHGAIYKQRGWLTSAGKDIKNKEEILALLEAIHLPKRVAIIHCPGHQRGTDPVATGNRKADEAAKQAAQSTRILTETTKNAGKRTADGSEFEKRTADGSEFESPKKKAKVE

SEQ ID NO: 1773 - protein, 2217 aa, synthetic construct
MPAAKRVKLDGGDKKYSIGLDIGTNSVGWAVITDEYKVPSKKFKVLGNTDRHSIKKNLIGALLFDSGETAEATRLKRTARRRYTRRKNRICYLQEIFSNEMAKVDDSFFHRLEESFLVEEDKKHERHPIFGNIVDEVAYHEKYPTIYHLRKKLVDSTDKADLRLIYLALAHMIKFRGHFLIEGDLNPDNSDVDKLFIQLVQTYNQLFEENPINASGVDAKAILSARLSKSRRLENLIAQLPGEKKNGLFGNLIALSLGLTPNFKSNFDLAEDAKLQLSKDTYDDDLDNLLAQIGDQYADLFLAAKNLSDAILLSDILRVNTEITKAPLSASMIKRYDEHHQDLTLLKALVRQQLPEKYKEIFFDQSKNGYAGYIDGGASQEEFYKFIKPILEKMDGTEELLVKLNREDLLRKQRTFDNGSIPHQIHLGELHAILRRQEDFYPFLKDNREKIEKILTFRIPYYVGPLARGNSRFAWMTRKSEETITPWNFEEVVDKGASAQSFIERMTNFDKNLPNEKVLPKHSLLYEYFTVYNELTKVKYVTEGMRKPAFLSGEQKKAIVDLLFKTNRKVTVKQLKEDYFKKIECFDSVEISGVEDRFNASLGTYHDLLKIIKDKDFLDNEENEDILEDIVLTLTLFEDREMIEERLKTYAHLFDDKVMKQLKRRRYTGWGRLSRKLINGIRDKQSGKTILDFLKSDGFANRNFMQLIHDDSLTFKEDIQKAQVSGQGDSLHEHIANLAGSPAIKKGILQTVKVVDELVKVMGRHKPENIVIEMARENQTTQKGQKNSRERMKRIEEGIKELGSQILKEHPVENTQLQNEKLYLYYLQNGRDMYVDQELDINRLSDYDVDHIVPQSFLKDDSIDNKVLTRSDKARGKSDNVPSEEVVKKMKNYWRQLLNAKLITQRKFDNLTKAERGGLSELDKAGFIKRQLVETRQITKHVAQILDSRMNTKYDENDKLIREVKVITLKSKLVSDFRKDFQFYKVREINNYHHAHDAYLNAVVGTALIKKYPKLESEFVYGDYKVYDVRKMIAKSEQEIGKATAKYFFYSNIMNFFKTEITLANGEIRKRPLIETNGETGEIVWDKGRDFATVRKVLSMPQVNIVKKTEVQTGGFSKESILPKRNSDKLIARKKDWDPKKYGGFDSPTVAYSVLVVAKVEKGKSKKLKSVKELLGITIMERSSFEKNPIDFLEAKGYKEVKKDLIIKLPKYSLFELENGRKRMLASAGELQKGNELALPSKYVNFLYLASHYEKLKGSPEDNEQKQLFVEQHKHYLDEIIEQISEFSKRVILADANLDKVLSAYNKHRDKPIREQAENIIHLFTLTNLGAPAAFKYFDTTIDRKRYTSTKEVLDATLIHQSITGLYETRIDLSQLGGDGGEAAAKEAAAKGGTLGDQGSRGSDPLPEPRVTLTVEGIPTEFLVNTGAEHSVLTKPMGKMGSKRTVVAGATGSKVYPWTTKRLLKIGQKQVTHSFLVIPECPAPLLGRDLLTKLKAQIQFSTEGPQVTWEDRPAMCLVLNLEEEYRLHEKPVPPSIDPSWLQLFPMVWAEKAGMGLANQVPPVVVELKSDASPVAVRQYPMSKEAREGIRPHIQRFLDLGILVPCQSPWNTPLLPVKKPGTNDYRPVQDLREVNKRVQDIHPTVPNPYNLLSSLPPSHTWYSVLDLKDAFFCLKLHPNSQPLFAFEWRDPEKGNTGQLTWTRLPQGFKNSPTLFNEALHRDLASFRALNPQVVMLQYVDDLLVAAPTYRDCKEGTRRLLQELSKLGYRVSAKKAQLCREEVTYLGYLLKGGKRWLTPARKATVMKIPTPTTPRQVREFLGKAGFCRLFIPGFASLAAPLYPLTRPKVPFTWTEAHQEAFGRIKEALLSAPALALPDLTKPFALYVDEKEGVARGVLTQTLGPWRRPVAYLSKKLDPVASGWPTCLKAIAAVALLLKDADKLTLGQNVLVIAPHNLESIVRQPPDRWMTNARMTHYQSLLLNERVSFAPPAILNPATLLPVESDDTPIHICSEILAEETGTRPDLRDQPLPGVPAWYTDGSSFIMDGRRQAGAAIVDNKRTVWASNLPEGTSAQKAELIALTQALRLAEGKSINIYTDSRYAFATAHVHGAIYKQRGWLTSAGKDIKNKEEILALLEAIHLPKRVAIIHCPGHQRGTDPVATGNRKADEAAKQAAQSTRILTETTKNAGKRTADGSEFEKRTADGSEFESPKKKAKVE

SEQ ID NO: 1774 - protein, 2216 aa, synthetic construct
MPAAKRVKLDGGDKKYSIGLDIGTNSVGWAVITDEYKVPSKKFKVLGNTDRHSIKKNLIGALLFDSGETAEATRLKRTARRRYTRRKNRICYLQEIFSNEMAKVDDSFFHRLEESFLVEEDKKHERHPIFGNIVDEVAYHEKYPTIYHLRKKLVDSTDKADLRLIYLALAHMIKFRGHFLIEGDLNPDNSDVDKLFIQLVQTYNQLFEENPINASGVDAKAILSARLSKSRRLENLIAQLPGEKKNGLFGNLIALSLGLTPNFKSNFDLAEDAKLQLSKDTYDDDLDNLLAQIGDQYADLFLAAKNLSDAILLSDILRVNTEITKAPLSASMIKRYDEHHQDLTLLKALVRQQLPEKYKEIFFDQSKNGYAGYIDGGASQEEFYKFIKPILEKMDGTEELLVKLNREDLLRKQRTFDNGSIPHQIHLGELHAILRRQEDFYPFLKDNREKIEKILTFRIPYYVGPLARGNSRFAWMTRKSEETITPWNFEEVVDKGASAQSFIERMTNFDKNLPNEKVLPKHSLLYEYFTVYNELTKVKYVTEGMRKPAFLSGEQKKAIVDLLFKTNRKVTVKQLKEDYFKKIECFDSVEISGVEDRFNASLGTYHDLLKIIKDKDFLDNEENEDILEDIVLTLTLFEDREMIEERLKTYAHLFDDKVMKQLKRRRYTGWGRLSRKLINGIRDKQSGKTILDFLKSDGFANRNFMQLIHDDSLTFKEDIQKAQVSGQGDSLHEHIANLAGSPAIKKGILQTVKVVDELVKVMGRHKPENIVIEMARENQTTQKGQKNSRERMKRIEEGIKELGSQILKEHPVENTQLQNEKLYLYYLQNGRDMYVDQELDINRLSDYDVDHIVPQSFLKDDSIDNKVLTRSDKARGKSDNVPSEEVVKKMKNYWRQLLNAKLITQRKFDNLTKAERGGLSELDKAGFIKRQLVETRQITKHVAQILDSRMNTKYDENDKLIREVKVITLKSKLVSDFRKDFQFYKVREINNYHHAHDAYLNAVVGTALIKKYPKLESEFVYGDYKVYDVRKMIAKSEQEIGKATAKYFFYSNIMNFFKTEITLANGEIRKRPLIETNGETGEIVWDKGRDFATVRKVLSMPQVNIVKKTEVQTGGFSKESILPKRNSDKLIARKKDWDPKKYGGFDSPTVAYSVLVVAKVEKGKSKKLKSVKELLGITIMERSSFEKNPIDFLEAKGYKEVKKDLIIKLPKYSLFELENGRKRMLASAGELQKGNELALPSKYVNFLYLASHYEKLKGSPEDNEQKQLFVEQHKHYLDEIIEQISEFSKRVILADANLDKVLSAYNKHRDKPIREQAENIIHLFTLTNLGAPAAFKYFDTTIDRKRYTSTKEVLDATLIHQSITGLYETRIDLSQLGGDGGPAPGGGGSSGGTLGDQGSRGSDPLPEPRVTLTVEGIPTEFLVNTGAEHSVLTKPMGKMGSKRTVVAGATGSKVYPWTTKRLLKIGQKQVTHSFLVIPECPAPLLGRDLLTKLKAQIQFSTEGPQVTWEDRPAMCLVLNLEEEYRLHEKPVPPSIDPSWLQLFPMVWAEKAGMGLANQVPPVVVELKSDASPVAVRQYPMSKEAREGIRPHIQRFLDLGILVPCQSPWNTPLLPVKKPGTNDYRPVQDLREVNKRVQDIHPTVPNPYNLLSSLPPSHTWYSVLDLKDAFFCLKLHPNSQPLFAFEWRDPEKGNTGQLTWTRLPQGFKNSPTLFNEALHRDLASFRALNPQVVMLQYVDDLLVAAPTYRDCKEGTRRLLQELSKLGYRVSAKKAQLCREEVTYLGYLLKGGKRWLTPARKATVMKIPTPTTPRQVREFLGKAGFCRLFIPGFASLAAPLYPLTRPKVPFTWTEAHQEAFGRIKEALLSAPALALPDLTKPFALYVDEKEGVARGVLTQTLGPWRRPVAYLSKKLDPVASGWPTCLKAIAAVALLLKDADKLTLGQNVLVIAPHNLESIVRQPPDRWMTNARMTHYQSLLLNERVSFAPPAILNPATLLPVESDDTPIHICSEILAEETGTRPDLRDQPLPGVPAWYTDGSSFIMDGRRQAGAAIVDNKRTVWASNLPEGTSAQKAELIALTQALRLAEGKSINIYTDSRYAFATAHVHGAIYKQRGWLTSAGKDIKNKEEILALLEAIHLPKRVAIIHCPGHQRGTDPVATGNRKADEAAKQAAQSTRILTETTKNAGKRTADGSEFEKRTADGSEFESPKKKAKVE

SEQ ID NO: 1775 - protein, 2216 aa, synthetic construct
MPAAKRVKLDGGDKKYSIGLDIGTNSVGWAVITDEYKVPSKKFKVLGNTDRHSIKKNLIGALLFDSGETAEATRLKRTARRRYTRRKNRICYLQEIFSNEMAKVDDSFFHRLEESFLVEEDKKHERHPIFGNIVDEVAYHEKYPTIYHLRKKLVDSTDKADLRLIYLALAHMIKFRGHFLIEGDLNPDNSDVDKLFIQLVQTYNQLFEENPINASGVDAKAILSARLSKSRRLENLIAQLPGEKKNGLFGNLIALSLGLTPNFKSNFDLAEDAKLQLSKDTYDDDLDNLLAQIGDQYADLFLAAKNLSDAILLSDILRVNTEITKAPLSASMIKRYDEHHQDLTLLKALVRQQLPEKYKEIFFDQSKNGYAGYIDGGASQEEFYKFIKPILEKMDGTEELLVKLNREDLLRKQRTFDNGSIPHQIHLGELHAILRRQEDFYPFLKDNREKIEKILTFRIPYYVGPLARGNSRFAWMTRKSEETITPWNFEEVVDKGASAQSFIERMTNFDKNLPNEKVLPKHSLLYEYFTVYNELTKVKYVTEGMRKPAFLSGEQKKAIVDLLFKTNRKVTVKQLKEDYFKKIECFDSVEISGVEDRFNASLGTYHDLLKIIKDKDFLDNEENEDILEDIVLTLTLFEDREMIEERLKTYAHLFDDKVMKQLKRRRYTGWGRLSRKLINGIRDKQSGKTILDFLKSDGFANRNFMQLIHDDSLTFKEDIQKAQVSGQGDSLHEHIANLAGSPAIKKGILQTVKVVDELVKVMGRHKPENIVIEMARENQTTQKGQKNSRERMKRIEEGIKELGSQILKEHPVENTQLQNEKLYLYYLQNGRDMYVDQELDINRLSDYDVDHIVPQSFLKDDSIDNKVLTRSDKARGKSDNVPSEEVVKKMKNYWRQLLNAKLITQRKFDNLTKAERGGLSELDKAGFIKRQLVETRQITKHVAQILDSRMNTKYDENDKLIREVKVITLKSKLVSDFRKDFQFYKVREINNYHHAHDAYLNAVVGTALIKKYPKLESEFVYGDYKVYDVRKMIAKSEQEIGKATAKYFFYSNIMNFFKTEITLANGEIRKRPLIETNGETGEIVWDKGRDFATVRKVLSMPQVNIVKKTEVQTGGFSKESILPKRNSDKLIARKKDWDPKKYGGFDSPTVAYSVLVVAKVEKGKSKKLKSVKELLGITIMERSSFEKNPIDFLEAKGYKEVKKDLIIKLPKYSLFELENGRKRMLASAGELQKGNELALPSKYVNFLYLASHYEKLKGSPEDNEQKQLFVEQHKHYLDEIIEQISEFSKRVILADANLDKVLSAYNKHRDKPIREQAENIIHLFTLTNLGAPAAFKYFDTTIDRKRYTSTKEVLDATLIHQSITGLYETRIDLSQLGGDGGGGGGGSGSSGGTLGDQGSRGSDPLPEPRVTLTVEGIPTEFLVNTGAEHSVLTKPMGKMGSKRTVVAGATGSKVYPWTTKRLLKIGQKQVTHSFLVIPECPAPLLGRDLLTKLKAQIQFSTEGPQVTWEDRPAMCLVLNLEEEYRLHEKPVPPSIDPSWLQLFPMVWAEKAGMGLANQVPPVVVELKSDASPVAVRQYPMSKEAREGIRPHIQRFLDLGILVPCQSPWNTPLLPVKKPGTNDYRPVQDLREVNKRVQDIHPTVPNPYNLLSSLPPSHTWYSVLDLKDAFFCLKLHPNSQPLFAFEWRDPEKGNTGQLTWTRLPQGFKNSPTLFNEALHRDLASFRALNPQVVMLQYVDDLLVAAPTYRDCKEGTRRLLQELSKLGYRVSAKKAQLCREEVTYLGYLLKGGKRWLTPARKATVMKIPTPTTPRQVREFLGKAGFCRLFIPGFASLAAPLYPLTRPKVPFTWTEAHQEAFGRIKEALLSAPALALPDLTKPFALYVDEKEGVARGVLTQTLGPWRRPVAYLSKKLDPVASGWPTCLKAIAAVALLLKDADKLTLGQNVLVIAPHNLESIVRQPPDRWMTNARMTHYQSLLLNERVSFAPPAILNPATLLPVESDDTPIHICSEILAEETGTRPDLRDQPLPGVPAWYTDGSSFIMDGRRQAGAAIVDNKRTVWASNLPEGTSAQKAELIALTQALRLAEGKSINIYTDSRYAFATAHVHGAIYKQRGWLTSAGKDIKNKEEILALLEAIHLPKRVAIIHCPGHQRGTDPVATGNRKADEAAKQAAQSTRILTETTKNAGKRTADGSEFEKRTADGSEFESPKKKAKVE

SEQ ID NO: 1776 - protein, 2210 aa, synthetic construct
MPAAKRVKLDGGDKKYSIGLDIGTNSVGWAVITDEYKVPSKKFKVLGNTDRHSIKKNLIGALLFDSGETAEATRLKRTARRRYTRRKNRICYLQEIFSNEMAKVDDSFFHRLEESFLVEEDKKHERHPIFGNIVDEVAYHEKYPTIYHLRKKLVDSTDKADLRLIYLALAHMIKFRGHFLIEGDLNPDNSDVDKLFIQLVQTYNQLFEENPINASGVDAKAILSARLSKSRRLENLIAQLPGEKKNGLFGNLIALSLGLTPNFKSNFDLAEDAKLQLSKDTYDDDLDNLLAQIGDQYADLFLAAKNLSDAILLSDILRVNTEITKAPLSASMIKRYDEHHQDLTLLKALVRQQLPEKYKEIFFDQSKNGYAGYIDGGASQEEFYKFIKPILEKMDGTEELLVKLNREDLLRKQRTFDNGSIPHQIHLGELHAILRRQEDFYPFLKDNREKIEKILTFRIPYYVGPLARGNSRFAWMTRKSEETITPWNFEEVVDKGASAQSFIERMTNFDKNLPNEKVLPKHSLLYEYFTVYNELTKVKYVTEGMRKPAFLSGEQKKAIVDLLFKTNRKVTVKQLKEDYFKKIECFDSVEISGVEDRFNASLGTYHDLLKIIKDKDFLDNEENEDILEDIVLTLTLFEDREMIEERLKTYAHLFDDKVMKQLKRRRYTGWGRLSRKLINGIRDKQSGKTILDFLKSDGFANRNFMQLIHDDSLTFKEDIQKAQVSGQGDSLHEHIANLAGSPAIKKGILQTVKVVDELVKVMGRHKPENIVIEMARENQTTQKGQKNSRERMKRIEEGIKELGSQILKEHPVENTQLQNEKLYLYYLQNGRDMYVDQELDINRLSDYDVDHIVPQSFLKDDSIDNKVLTRSDKARGKSDNVPSEEVVKKMKNYWRQLLNAKLITQRKFDNLTKAERGGLSELDKAGFIKRQLVETRQITKHVAQILDSRMNTKYDENDKLIREVKVITLKSKLVSDFRKDFQFYKVREINNYHHAHDAYLNAVVGTALIKKYPKLESEFVYGDYKVYDVRKMIAKSEQEIGKATAKYFFYSNIMNFFKTEITLANGEIRKRPLIETNGETGEIVWDKGRDFATVRKVLSMPQVNIVKKTEVQTGGFSKESILPKRNSDKLIARKKDWDPKKYGGFDSPTVAYSVLVVAKVEKGKSKKLKSVKELLGITIMERSSFEKNPIDFLEAKGYKEVKKDLIIKLPKYSLFELENGRKRMLASAGELQKGNELALPSKYVNFLYLASHYEKLKGSPEDNEQKQLFVEQHKHYLDEIIEQISEFSKRVILADANLDKVLSAYNKHRDKPIREQAENIIHLFTLTNLGAPAAFKYFDTTIDRKRYTSTKEVLDATLIHQSITGLYETRIDLSQLGGDGGGSSGGTLGDQGSRGSDPLPEPRVTLTVEGIPTEFLVNTGAEHSVLTKPMGKMGSKRTVVAGATGSKVYPWTTKRLLKIGQKQVTHSFLVIPECPAPLLGRDLLTKLKAQIQFSTEGPQVTWEDRPAMCLVLNLEEEYRLHEKPVPPSIDPSWLQLFPMVWAEKAGMGLANQVPPVVVELKSDASPVAVRQYPMSKEAREGIRPHIQRFLDLGILVPCQSPWNTPLLPVKKPGTNDYRPVQDLREVNKRVQDIHPTVPNPYNLLSSLPPSHTWYSVLDLKDAFFCLKLHPNSQPLFAFEWRDPEKGNTGQLTWTRLPQGFKNSPTLFNEALHRDLASFRALNPQVVMLQYVDDLLVAAPTYRDCKEGTRRLLQELSKLGYRVSAKKAQLCREEVTYLGYLLKGGKRWLTPARKATVMKIPTPTTPRQVREFLGKAGFCRLFIPGFASLAAPLYPLTRPKVPFTWTEAHQEAFGRIKEALLSAPALALPDLTKPFALYVDEKEGVARGVLTQTLGPWRRPVAYLSKKLDPVASGWPTCLKAIAAVALLLKDADKLTLGQNVLVIAPHNLESIVRQPPDRWMTNARMTHYQSLLLNERVSFAPPAILNPATLLPVESDDTPIHICSEILAEETGTRPDLRDQPLPGVPAWYTDGSSFIMDGRRQAGAAIVDNKRTVWASNLPEGTSAQKAELIALTQALRLAEGKSINIYTDSRYAFATAHVHGAIYKQRGWLTSAGKDIKNKEEILALLEAIHLPKRVAIIHCPGHQRGTDPVATGNRKADEAAKQAAQSTRILTETTKNAGKRTADGSEFEKRTADGSEFESPKKKAKVE

SEQ ID NO: 1777 - protein, 2222 aa, synthetic construct
MPAAKRVKLDGGDKKYSIGLDIGTNSVGWAVITDEYKVPSKKFKVLGNTDRHSIKKNLIGALLFDSGETAEATRLKRTARRRYTRRKNRICYLQEIFSNEMAKVDDSFFHRLEESFLVEEDKKHERHPIFGNIVDEVAYHEKYPTIYHLRKKLVDSTDKADLRLIYLALAHMIKFRGHFLIEGDLNPDNSDVDKLFIQLVQTYNQLFEENPINASGVDAKAILSARLSKSRRLENLIAQLPGEKKNGLFGNLIALSLGLTPNFKSNFDLAEDAKLQLSKDTYDDDLDNLLAQIGDQYADLFLAAKNLSDAILLSDILRVNTEITKAPLSASMIKRYDEHHQDLTLLKALVRQQLPEKYKEIFFDQSKNGYAGYIDGGASQEEFYKFIKPILEKMDGTEELLVKLNREDLLRKQRTFDNGSIPHQIHLGELHAILRRQEDFYPFLKDNREKIEKILTFRIPYYVGPLARGNSRFAWMTRKSEETITPWNFEEVVDKGASAQSFIERMTNFDKNLPNEKVLPKHSLLYEYFTVYNELTKVKYVTEGMRKPAFLSGEQKKAIVDLLFKTNRKVTVKQLKEDYFKKIECFDSVEISGVEDRFNASLGTYHDLLKIIKDKDFLDNEENEDILEDIVLTLTLFEDREMIEERLKTYAHLFDDKVMKQLKRRRYTGWGRLSRKLINGIRDKQSGKTILDFLKSDGFANRNFMQLIHDDSLTFKEDIQKAQVSGQGDSLHEHIANLAGSPAIKKGILQTVKVVDELVKVMGRHKPENIVIEMARENQTTQKGQKNSRERMKRIEEGIKELGSQILKEHPVENTQLQNEKLYLYYLQNGRDMYVDQELDINRLSDYDVDHIVPQSFLKDDSIDNKVLTRSDKARGKSDNVPSEEVVKKMKNYWRQLLNAKLITQRKFDNLTKAERGGLSELDKAGFIKRQLVETRQITKHVAQILDSRMNTKYDENDKLIREVKVITLKSKLVSDFRKDFQFYKVREINNYHHAHDAYLNAVVGTALIKKYPKLESEFVYGDYKVYDVRKMIAKSEQEIGKATAKYFFYSNIMNFFKTEITLANGEIRKRPLIETNGETGEIVWDKGRDFATVRKVLSMPQVNIVKKTEVQTGGFSKESILPKRNSDKLIARKKDWDPKKYGGFDSPTVAYSVLVVAKVEKGKSKKLKSVKELLGITIMERSSFEKNPIDFLEAKGYKEVKKDLIIKLPKYSLFELENGRKRMLASAGELQKGNELALPSKYVNFLYLASHYEKLKGSPEDNEQKQLFVEQHKHYLDEIIEQISEFSKRVILADANLDKVLSAYNKHRDKPIREQAENIIHLFTLTNLGAPAAFKYFDTTIDRKRYTSTKEVLDATLIHQSITGLYETRIDLSQLGGDGGGGGGSEAAAKGGGGSGGTLGDQGSRGSDPLPEPRVTLTVEGIPTEFLVNTGAEHSVLTKPMGKMGSKRTVVAGATGSKVYPWTTKRLLKIGQKQVTHSFLVIPECPAPLLGRDLLTKLKAQIQFSTEGPQVTWEDRPAMCLVLNLEEEYRLHEKPVPPSIDPSWLQLFPMVWAEKAGMGLANQVPPVVVELKSDASPVAVRQYPMSKEAREGIRPHIQRFLDLGILVPCQSPWNTPLLPVKKPGTNDYRPVQDLREVNKRVQDIHPTVPNPYNLLSSLPPSHTWYSVLDLKDAFFCLKLHPNSQPLFAFEWRDPEKGNTGQLTWTRLPQGFKNSPTLFNEALHRDLASFRALNPQVVMLQYVDDLLVAAPTYRDCKEGTRRLLQELSKLGYRVSAKKAQLCREEVTYLGYLLKGGKRWLTPARKATVMKIPTPTTPRQVREFLGKAGFCRLFIPGFASLAAPLYPLTRPKVPFTWTEAHQEAFGRIKEALLSAPALALPDLTKPFALYVDEKEGVARGVLTQTLGPWRRPVAYLSKKLDPVASGWPTCLKAIAAVALLLKDADKLTLGQNVLVIAPHNLESIVRQPPDRWMTNARMTHYQSLLLNERVSFAPPAILNPATLLPVESDDTPIHICSEILAEETGTRPDLRDQPLPGVPAWYTDGSSFIMDGRRQAGAAIVDNKRTVWASNLPEGTSAQKAELIALTQALRLAEGKSINIYTDSRYAFATAHVHGAIYKQRGWLTSAGKDIKNKEEILALLEAIHLPKRVAIIHCPGHQRGTDPVATGNRKADEAAKQAAQSTRILTETTKNAGKRTADGSEFEKRTADGSEFESPKKKAKVE

SEQ ID NO: 1778 - protein, 2237 aa, synthetic construct
MPAAKRVKLDGGDKKYSIGLDIGTNSVGWAVITDEYKVPSKKFKVLGNTDRHSIKKNLIGALLFDSGETAEATRLKRTARRRYTRRKNRICYLQEIFSNEMAKVDDSFFHRLEESFLVEEDKKHERHPIFGNIVDEVAYHEKYPTIYHLRKKLVDSTDKADLRLIYLALAHMIKFRGHFLIEGDLNPDNSDVDKLFIQLVQTYNQLFEENPINASGVDAKAILSARLSKSRRLENLIAQLPGEKKNGLFGNLIALSLGLTPNFKSNFDLAEDAKLQLSKDTYDDDLDNLLAQIGDQYADLFLAAKNLSDAILLSDILRVNTEITKAPLSASMIKRYDEHHQDLTLLKALVRQQLPEKYKEIFFDQSKNGYAGYIDGGASQEEFYKFIKPILEKMDGTEELLVKLNREDLLRKQRTFDNGSIPHQIHLGELHAILRRQEDFYPFLKDNREKIEKILTFRIPYYVGPLARGNSRFAWMTRKSEETITPWNFEEVVDKGASAQSFIERMTNFDKNLPNEKVLPKHSLLYEYFTVYNELTKVKYVTEGMRKPAFLSGEQKKAIVDLLFKTNRKVTVKQLKEDYFKKIECFDSVEISGVEDRFNASLGTYHDLLKIIKDKDFLDNEENEDILEDIVLTLTLFEDREMIEERLKTYAHLFDDKVMKQLKRRRYTGWGRLSRKLINGIRDKQSGKTILDFLKSDGFANRNFMQLIHDDSLTFKEDIQKAQVSGQGDSLHEHIANLAGSPAIKKGILQTVKVVDELVKVMGRHKPENIVIEMARENQTTQKGQKNSRERMKRIEEGIKELGSQILKEHPVENTQLQNEKLYLYYLQNGRDMYVDQELDINRLSDYDVDHIVPQSFLKDDSIDNKVLTRSDKARGKSDNVPSEEVVKKMKNYWRQLLNAKLITQRKFDNLTKAERGGLSELDKAGFIKRQLVETRQITKHVAQILDSRMNTKYDENDKLIREVKVITLKSKLVSDFRKDFQFYKVREINNYHHAHDAYLNAVVGTALIKKYPKLESEFVYGDYKVYDVRKMIAKSEQEIGKATAKYFFYSNIMNFFKTEITLANGEIRKRPLIETNGETGEIVWDKGRDFATVRKVLSMPQVNIVKKTEVQTGGFSKESILPKRNSDKLIARKKDWDPKKYGGFDSPTVAYSVLVVAKVEKGKSKKLKSVKELLGITIMERSSFEKNPIDFLEAKGYKEVKKDLIIKLPKYSLFELENGRKRMLASAGELQKGNELALPSKYVNFLYLASHYEKLKGSPEDNEQKQLFVEQHKHYLDEIIEQISEFSKRVILADANLDKVLSAYNKHRDKPIREQAENIIHLFTLTNLGAPAAFKYFDTTIDRKRYTSTKEVLDATLIHQSITGLYETRIDLSQLGGDGGEAAAKEAAAKEAAAKEAAAKEAAAKEAAAKGGTLGDQGSRGSDPLPEPRVTLTVEGIPTEFLVNTGAEHSVLTKPMGKMGSKRTVVAGATGSKVYPWTTKRLLKIGQKQVTHSFLVIPECPAPLLGRDLLTKLKAQIQFSTEGPQVTWEDRPAMCLVLNLEEEYRLHEKPVPPSIDPSWLQLFPMVWAEKAGMGLANQVPPVVVELKSDASPVAVRQYPMSKEAREGIRPHIQRFLDLGILVPCQSPWNTPLLPVKKPGTNDYRPVQDLREVNKRVQDIHPTVPNPYNLLSSLPPSHTWYSVLDLKDAFFCLKLHPNSQPLFAFEWRDPEKGNTGQLTWTRLPQGFKNSPTLFNEALHRDLASFRALNPQVVMLQYVDDLLVAAPTYRDCKEGTRRLLQELSKLGYRVSAKKAQLCREEVTYLGYLLKGGKRWLTPARKATVMKIPTPTTPRQVREFLGKAGFCRLFIPGFASLAAPLYPLTRPKVPFTWTEAHQEAFGRIKEALLSAPALALPDLTKPFALYVDEKEGVARGVLTQTLGPWRRPVAYLSKKLDPVASGWPTCLKAIAAVALLLKDADKLTLGQNVLVIAPHNLESIVRQPPDRWMTNARMTHYQSLLLNERVSFAPPAILNPATLLPVESDDTPIHICSEILAEETGTRPDLRDQPLPGVPAWYTDGSSFIMDGRRQAGAAIVDNKRTVWASNLPEGTSAQKAELIALTQALRLAEGKSINIYTDSRYAFATAHVHGAIYKQRGWLTSAGKDIKNKEEILALLEAIHLPKRVAIIHCPGHQRGTDPVATGNRKADEAAKQAAQSTRILTETTKNAGKRTADGSEFEKRTADGSEFESPKKKAKVE

SEQ ID NO: 1779 - protein, 2216 aa, synthetic construct
MPAAKRVKLDGGDKKYSIGLDIGTNSVGWAVITDEYKVPSKKFKVLGNTDRHSIKKNLIGALLFDSGETAEATRLKRTARRRYTRRKNRICYLQEIFSNEMAKVDDSFFHRLEESFLVEEDKKHERHPIFGNIVDEVAYHEKYPTIYHLRKKLVDSTDKADLRLIYLALAHMIKFRGHFLIEGDLNPDNSDVDKLFIQLVQTYNQLFEENPINASGVDAKAILSARLSKSRRLENLIAQLPGEKKNGLFGNLIALSLGLTPNFKSNFDLAEDAKLQLSKDTYDDDLDNLLAQIGDQYADLFLAAKNLSDAILLSDILRVNTEITKAPLSASMIKRYDEHHQDLTLLKALVRQQLPEKYKEIFFDQSKNGYAGYIDGGASQEEFYKFIKPILEKMDGTEELLVKLNREDLLRKQRTFDNGSIPHQIHLGELHAILRRQEDFYPFLKDNREKIEKILTFRIPYYVGPLARGNSRFAWMTRKSEETITPWNFEEVVDKGASAQSFIERMTNFDKNLPNEKVLPKHSLLYEYFTVYNELTKVKYVTEGMRKPAFLSGEQKKAIVDLLFKTNRKVTVKQLKEDYFKKIECFDSVEISGVEDRFNASLGTYHDLLKIIKDKDFLDNEENEDILEDIVLTLTLFEDREMIEERLKTYAHLFDDKVMKQLKRRRYTGWGRLSRKLINGIRDKQSGKTILDFLKSDGFANRNFMQLIHDDSLTFKEDIQKAQVSGQGDSLHEHIANLAGSPAIKKGILQTVKVVDELVKVMGRHKPENIVIEMARENQTTQKGQKNSRERMKRIEEGIKELGSQILKEHPVENTQLQNEKLYLYYLQNGRDMYVDQELDINRLSDYDVDHIVPQSFLKDDSIDNKVLTRSDKARGKSDNVPSEEVVKKMKNYWRQLLNAKLITQRKFDNLTKAERGGLSELDKAGFIKRQLVETRQITKHVAQILDSRMNTKYDENDKLIREVKVITLKSKLVSDFRKDFQFYKVREINNYHHAHDAYLNAVVGTALIKKYPKLESEFVYGDYKVYDVRKMIAKSEQEIGKATAKYFFYSNIMNFFKTEITLANGEIRKRPLIETNGETGEIVWDKGRDFATVRKVLSMPQVNIVKKTEVQTGGFSKESILPKRNSDKLIARKKDWDPKKYGGFDSPTVAYSVLVVAKVEKGKSKKLKSVKELLGITIMERSSFEKNPIDFLEAKGYKEVKKDLIIKLPKYSLFELENGRKRMLASAGELQKGNELALPSKYVNFLYLASHYEKLKGSPEDNEQKQLFVEQHKHYLDEIIEQISEFSKRVILADANLDKVLSAYNKHRDKPIREQAENIIHLFTLTNLGAPAAFKYFDTTIDRKRYTSTKEVLDATLIHQSITGLYETRIDLSQLGGDGGGGSPAPGGGGGTLGDQGSRGSDPLPEPRVTLTVEGIPTEFLVNTGAEHSVLTKPMGKMGSKRTVVAGATGSKVYPWTTKRLLKIGQKQVTHSFLVIPECPAPLLGRDLLTKLKAQIQFSTEGPQVTWEDRPAMCLVLNLEEEYRLHEKPVPPSIDPSWLQLFPMVWAEKAGMGLANQVPPVVVELKSDASPVAVRQYPMSKEAREGIRPHIQRFLDLGILVPCQSPWNTPLLPVKKPGTNDYRPVQDLREVNKRVQDIHPTVPNPYNLLSSLPPSHTWYSVLDLKDAFFCLKLHPNSQPLFAFEWRDPEKGNTGQLTWTRLPQGFKNSPTLFNEALHRDLASFRALNPQVVMLQYVDDLLVAAPTYRDCKEGTRRLLQELSKLGYRVSAKKAQLCREEVTYLGYLLKGGKRWLTPARKATVMKIPTPTTPRQVREFLGKAGFCRLFIPGFASLAAPLYPLTRPKVPFTWTEAHQEAFGRIKEALLSAPALALPDLTKPFALYVDEKEGVARGVLTQTLGPWRRPVAYLSKKLDPVASGWPTCLKAIAAVALLLKDADKLTLGQNVLVIAPHNLESIVRQPPDRWMTNARMTHYQSLLLNERVSFAPPAILNPATLLPVESDDTPIHICSEILAEETGTRPDLRDQPLPGVPAWYTDGSSFIMDGRRQAGAAIVDNKRTVWASNLPEGTSAQKAELIALTQALRLAEGKSINIYTDSRYAFATAHVHGAIYKQRGWLTSAGKDIKNKEEILALLEAIHLPKRVAIIHCPGHQRGTDPVATGNRKADEAAKQAAQSTRILTETTKNAGKRTADGSEFEKRTADGSEFESPKKKAKVE

SEQ ID NO: 1780 - protein, 2213 aa, synthetic construct
MPAAKRVKLDGGDKKYSIGLDIGTNSVGWAVITDEYKVPSKKFKVLGNTDRHSIKKNLIGALLFDSGETAEATRLKRTARRRYTRRKNRICYLQEIFSNEMAKVDDSFFHRLEESFLVEEDKKHERHPIFGNIVDEVAYHEKYPTIYHLRKKLVDSTDKADLRLIYLALAHMIKFRGHFLIEGDLNPDNSDVDKLFIQLVQTYNQLFEENPINASGVDAKAILSARLSKSRRLENLIAQLPGEKKNGLFGNLIALSLGLTPNFKSNFDLAEDAKLQLSKDTYDDDLDNLLAQIGDQYADLFLAAKNLSDAILLSDILRVNTEITKAPLSASMIKRYDEHHQDLTLLKALVRQQLPEKYKEIFFDQSKNGYAGYIDGGASQEEFYKFIKPILEKMDGTEELLVKLNREDLLRKQRTFDNGSIPHQIHLGELHAILRRQEDFYPFLKDNREKIEKILTFRIPYYVGPLARGNSRFAWMTRKSEETITPWNFEEVVDKGASAQSFIERMTNFDKNLPNEKVLPKHSLLYEYFTVYNELTKVKYVTEGMRKPAFLSGEQKKAIVDLLFKTNRKVTVKQLKEDYFKKIECFDSVEISGVEDRFNASLGTYHDLLKIIKDKDFLDNEENEDILEDIVLTLTLFEDREMIEERLKTYAHLFDDKVMKQLKRRRYTGWGRLSRKLINGIRDKQSGKTILDFLKSDGFANRNFMQLIHDDSLTFKEDIQKAQVSGQGDSLHEHIANLAGSPAIKKGILQTVKVVDELVKVMGRHKPENIVIEMARENQTTQKGQKNSRERMKRIEEGIKELGSQILKEHPVENTQLQNEKLYLYYLQNGRDMYVDQELDINRLSDYDVDHIVPQSFLKDDSIDNKVLTRSDKARGKSDNVPSEEVVKKMKNYWRQLLNAKLITQRKFDNLTKAERGGLSELDKAGFIKRQLVETRQITKHVAQILDSRMNTKYDENDKLIREVKVITLKSKLVSDFRKDFQFYKVREINNYHHAHDAYLNAVVGTALIKKYPKLESEFVYGDYKVYDVRKMIAKSEQEIGKATAKYFFYSNIMNFFKTEITLANGEIRKRPLIETNGETGEIVWDKGRDFATVRKVLSMPQVNIVKKTEVQTGGFSKESILPKRNSDKLIARKKDWDPKKYGGFDSPTVAYSVLVVAKVEKGKSKKLKSVKELLGITIMERSSFEKNPIDFLEAKGYKEVKKDLIIKLPKYSLFELENGRKRMLASAGELQKGNELALPSKYVNFLYLASHYEKLKGSPEDNEQKQLFVEQHKHYLDEIIEQISEFSKRVILADANLDKVLSAYNKHRDKPIREQAENIIHLFTLTNLGAPAAFKYFDTTIDRKRYTSTKEVLDATLIHQSITGLYETRIDLSQLGGDGGPAPGSSGGTLGDQGSRGSDPLPEPRVTLTVEGIPTEFLVNTGAEHSVLTKPMGKMGSKRTVVAGATGSKVYPWTTKRLLKIGQKQVTHSFLVIPECPAPLLGRDLLTKLKAQIQFSTEGPQVTWEDRPAMCLVLNLEEEYRLHEKPVPPSIDPSWLQLFPMVWAEKAGMGLANQVPPVVVELKSDASPVAVRQYPMSKEAREGIRPHIQRFLDLGILVPCQSPWNTPLLPVKKPGTNDYRPVQDLREVNKRVQDIHPTVPNPYNLLSSLPPSHTWYSVLDLKDAFFCLKLHPNSQPLFAFEWRDPEKGNTGQLTWTRLPQGFKNSPTLFNEALHRDLASFRALNPQVVMLQYVDDLLVAAPTYRDCKEGTRRLLQELSKLGYRVSAKKAQLCREEVTYLGYLLKGGKRWLTPARKATVMKIPTPTTPRQVREFLGKAGFCRLFIPGFASLAAPLYPLTRPKVPFTWTEAHQEAFGRIKEALLSAPALALPDLTKPFALYVDEKEGVARGVLTQTLGPWRRPVAYLSKKLDPVASGWPTCLKAIAAVALLLKDADKLTLGQNVLVIAPHNLESIVRQPPDRWMTNARMTHYQSLLLNERVSFAPPAILNPATLLPVESDDTPIHICSEILAEETGTRPDLRDQPLPGVPAWYTDGSSFIMDGRRQAGAAIVDNKRTVWASNLPEGTSAQKAELIALTQALRLAEGKSINIYTDSRYAFATAHVHGAIYKQRGWLTSAGKDIKNKEEILALLEAIHLPKRVAIIHCPGHQRGTDPVATGNRKADEAAKQAAQSTRILTETTKNAGKRTADGSEFEKRTADGSEFESPKKKAKVE

SEQ ID NO: 1781 - protein, 2222 aa, synthetic construct
MPAAKRVKLDGGDKKYSIGLDIGTNSVGWAVITDEYKVPSKKFKVLGNTDRHSIKKNLIGALLFDSGETAEATRLKRTARRRYTRRKNRICYLQEIFSNEMAKVDDSFFHRLEESFLVEEDKKHERHPIFGNIVDEVAYHEKYPTIYHLRKKLVDSTDKADLRLIYLALAHMIKFRGHFLIEGDLNPDNSDVDKLFIQLVQTYNQLFEENPINASGVDAKAILSARLSKSRRLENLIAQLPGEKKNGLFGNLIALSLGLTPNFKSNFDLAEDAKLQLSKDTYDDDLDNLLAQIGDQYADLFLAAKNLSDAILLSDILRVNTEITKAPLSASMIKRYDEHHQDLTLLKALVRQQLPEKYKEIFFDQSKNGYAGYIDGGASQEEFYKFIKPILEKMDGTEELLVKLNREDLLRKQRTFDNGSIPHQIHLGELHAILRRQEDFYPFLKDNREKIEKILTFRIPYYVGPLARGNSRFAWMTRKSEETITPWNFEEVVDKGASAQSFIERMTNFDKNLPNEKVLPKHSLLYEYFTVYNELTKVKYVTEGMRKPAFLSGEQKKAIVDLLFKTNRKVTVKQLKEDYFKKIECFDSVEISGVEDRFNASLGTYHDLLKIIKDKDFLDNEENEDILEDIVLTLTLFEDREMIEERLKTYAHLFDDKVMKQLKRRRYTGWGRLSRKLINGIRDKQSGKTILDFLKSDGFANRNFMQLIHDDSLTFKEDIQKAQVSGQGDSLHEHIANLAGSPAIKKGILQTVKVVDELVKVMGRHKPENIVIEMARENQTTQKGQKNSRERMKRIEEGIKELGSQILKEHPVENTQLQNEKLYLYYLQNGRDMYVDQELDINRLSDYDVDHIVPQSFLKDDSIDNKVLTRSDKARGKSDNVPSEEVVKKMKNYWRQLLNAKLITQRKFDNLTKAERGGLSELDKAGFIKRQLVETRQITKHVAQILDSRMNTKYDENDKLIREVKVITLKSKLVSDFRKDFQFYKVREINNYHHAHDAYLNAVVGTALIKKYPKLESEFVYGDYKVYDVRKMIAKSEQEIGKATAKYFFYSNIMNFFKTEITLANGEIRKRPLIETNGETGEIVWDKGRDFATVRKVLSMPQVNIVKKTEVQTGGFSKESILPKRNSDKLIARKKDWDPKKYGGFDSPTVAYSVLVVAKVEKGKSKKLKSVKELLGITIMERSSFEKNPIDFLEAKGYKEVKKDLIIKLPKYSLFELENGRKRMLASAGELQKGNELALPSKYVNFLYLASHYEKLKGSPEDNEQKQLFVEQHKHYLDEIIEQISEFSKRVILADANLDKVLSAYNKHRDKPIREQAENIIHLFTLTNLGAPAAFKYFDTTIDRKRYTSTKEVLDATLIHQSITGLYETRIDLSQLGGDGGEAAAKGGGGSEAAAKGGTLGDQGSRGSDPLPEPRVTLTVEGIPTEFLVNTGAEHSVLTKPMGKMGSKRTVVAGATGSKVYPWTTKRLLKIGQKQVTHSFLVIPECPAPLLGRDLLTKLKAQIQFSTEGPQVTWEDRPAMCLVLNLEEEYRLHEKPVPPSIDPSWLQLFPMVWAEKAGMGLANQVPPVVVELKSDASPVAVRQYPMSKEAREGIRPHIQRFLDLGILVPCQSPWNTPLLPVKKPGTNDYRPVQDLREVNKRVQDIHPTVPNPYNLLSSLPPSHTWYSVLDLKDAFFCLKLHPNSQPLFAFEWRDPEKGNTGQLTWTRLPQGFKNSPTLFNEALHRDLASFRALNPQVVMLQYVDDLLVAAPTYRDCKEGTRRLLQELSKLGYRVSAKKAQLCREEVTYLGYLLKGGKRWLTPARKATVMKIPTPTTPRQVREFLGKAGFCRLFIPGFASLAAPLYPLTRPKVPFTWTEAHQEAFGRIKEALLSAPALALPDLTKPFALYVDEKEGVARGVLTQTLGPWRRPVAYLSKKLDPVASGWPTCLKAIAAVALLLKDADKLTLGQNVLVIAPHNLESIVRQPPDRWMTNARMTHYQSLLLNERVSFAPPAILNPATLLPVESDDTPIHICSEILAEETGTRPDLRDQPLPGVPAWYTDGSSFIMDGRRQAGAAIVDNKRTVWASNLPEGTSAQKAELIALTQALRLAEGKSINIYTDSRYAFATAHVHGAIYKQRGWLTSAGKDIKNKEEILALLEAIHLPKRVAIIHCPGHQRGTDPVATGNRKADEAAKQAAQSTRILTETTKNAGKRTADGSEFEKRTADGSEFESPKKKAKVE

SEQ ID NO: 1782 - protein, 2219 aa, synthetic construct
MPAAKRVKLDGGDKKYSIGLDIGTNSVGWAVITDEYKVPSKKFKVLGNTDRHSIKKNLIGALLFDSGETAEATRLKRTARRRYTRRKNRICYLQEIFSNEMAKVDDSFFHRLEESFLVEEDKKHERHPIFGNIVDEVAYHEKYPTIYHLRKKLVDSTDKADLRLIYLALAHMIKFRGHFLIEGDLNPDNSDVDKLFIQLVQTYNQLFEENPINASGVDAKAILSARLSKSRRLENLIAQLPGEKKNGLFGNLIALSLGLTPNFKSNFDLAEDAKLQLSKDTYDDDLDNLLAQIGDQYADLFLAAKNLSDAILLSDILRVNTEITKAPLSASMIKRYDEHHQDLTLLKALVRQQLPEKYKEIFFDQSKNGYAGYIDGGASQEEFYKFIKPILEKMDGTEELLVKLNREDLLRKQRTFDNGSIPHQIHLGELHAILRRQEDFYPFLKDNREKIEKILTFRIPYYVGPLARGNSRFAWMTRKSEETITPWNFEEVVDKGASAQSFIERMTNFDKNLPNEKVLPKHSLLYEYFTVYNELTKVKYVTEGMRKPAFLSGEQKKAIVDLLFKTNRKVTVKQLKEDYFKKIECFDSVEISGVEDRFNASLGTYHDLLKIIKDKDFLDNEENEDILEDIVLTLTLFEDREMIEERLKTYAHLFDDKVMKQLKRRRYTGWGRLSRKLINGIRDKQSGKTILDFLKSDGFANRNFMQLIHDDSLTFKEDIQKAQVSGQGDSLHEHIANLAGSPAIKKGILQTVKVVDELVKVMGRHKPENIVIEMARENQTTQKGQKNSRERMKRIEEGIKELGSQILKEHPVENTQLQNEKLYLYYLQNGRDMYVDQELDINRLSDYDVDHIVPQSFLKDDSIDNKVLTRSDKARGKSDNVPSEEVVKKMKNYWRQLLNAKLITQRKFDNLTKAERGGLSELDKAGFIKRQLVETRQITKHVAQILDSRMNTKYDENDKLIREVKVITLKSKLVSDFRKDFQFYKVREINNYHHAHDAYLNAVVGTALIKKYPKLESEFVYGDYKVYDVRKMIAKSEQEIGKATAKYFFYSNIMNFFKTEITLANGEIRKRPLIETNGETGEIVWDKGRDFATVRKVLSMPQVNIVKKTEVQTGGFSKESILPKRNSDKLIARKKDWDPKKYGGFDSPTVAYSVLVVAKVEKGKSKKLKSVKELLGITIMERSSFEKNPIDFLEAKGYKEVKKDLIIKLPKYSLFELENGRKRMLASAGELQKGNELALPSKYVNFLYLASHYEKLKGSPEDNEQKQLFVEQHKHYLDEIIEQISEFSKRVILADANLDKVLSAYNKHRDKPIREQAENIIHLFTLTNLGAPAAFKYFDTTIDRKRYTSTKEVLDATLIHQSITGLYETRIDLSQLGGDGGGSAGSAAGSGEFGGTLGDQGSRGSDPLPEPRVTLTVEGIPTEFLVNTGAEHSVLTKPMGKMGSKRTVVAGATGSKVYPWTTKRLLKIGQKQVTHSFLVIPECPAPLLGRDLLTKLKAQIQFSTEGPQVTWEDRPAMCLVLNLEEEYRLHEKPVPPSIDPSWLQLFPMVWAEKAGMGLANQVPPVVVELKSDASPVAVRQYPMSKEAREGIRPHIQRFLDLGILVPCQSPWNTPLLPVKKPGTNDYRPVQDLREVNKRVQDIHPTVPNPYNLLSSLPPSHTWYSVLDLKDAFFCLKLHPNSQPLFAFEWRDPEKGNTGQLTWTRLPQGFKNSPTLFNEALHRDLASFRALNPQVVMLQYVDDLLVAAPTYRDCKEGTRRLLQELSKLGYRVSAKKAQLCREEVTYLGYLLKGGKRWLTPARKATVMKIPTPTTPRQVREFLGKAGFCRLFIPGFASLAAPLYPLTRPKVPFTWTEAHQEAFGRIKEALLSAPALALPDLTKPFALYVDEKEGVARGVLTQTLGPWRRPVAYLSKKLDPVASGWPTCLKAIAAVALLLKDADKLTLGQNVLVIAPHNLESIVRQPPDRWMTNARMTHYQSLLLNERVSFAPPAILNPATLLPVESDDTPIHICSEILAEETGTRPDLRDQPLPGVPAWYTDGSSFIMDGRRQAGAAIVDNKRTVWASNLPEGTSAQKAELIALTQALRLAEGKSINIYTDSRYAFATAHVHGAIYKQRGWLTSAGKDIKNKEEILALLEAIHLPKRVAIIHCPGHQRGTDPVATGNRKADEAAKQAAQSTRILTETTKNAGKRTADGSEFEKRTADGSEFESPKKKAKVE

SEQ ID NO: 1783 - protein, 2218 aa, synthetic construct
MPAAKRVKLDGGDKKYSIGLDIGTNSVGWAVITDEYKVPSKKFKVLGNTDRHSIKKNLIGALLFDSGETAEATRLKRTARRRYTRRKNRICYLQEIFSNEMAKVDDSFFHRLEESFLVEEDKKHERHPIFGNIVDEVAYHEKYPTIYHLRKKLVDSTDKADLRLIYLALAHMIKFRGHFLIEGDLNPDNSDVDKLFIQLVQTYNQLFEENPINASGVDAKAILSARLSKSRRLENLIAQLPGEKKNGLFGNLIALSLGLTPNFKSNFDLAEDAKLQLSKDTYDDDLDNLLAQIGDQYADLFLAAKNLSDAILLSDILRVNTEITKAPLSASMIKRYDEHHQDLTLLKALVRQQLPEKYKEIFFDQSKNGYAGYIDGGASQEEFYKFIKPILEKMDGTEELLVKLNREDLLRKQRTFDNGSIPHQIHLGELHAILRRQEDFYPFLKDNREKIEKILTFRIPYYVGPLARGNSRFAWMTRKSEETITPWNFEEVVDKGASAQSFIERMTNFDKNLPNEKVLPKHSLLYEYFTVYNELTKVKYVTEGMRKPAFLSGEQKKAIVDLLFKTNRKVTVKQLKEDYFKKIECFDSVEISGVEDRFNASLGTYHDLLKIIKDKDFLDNEENEDILEDIVLTLTLFEDREMIEERLKTYAHLFDDKVMKQLKRRRYTGWGRLSRKLINGIRDKQSGKTILDFLKSDGFANRNFMQLIHDDSLTFKEDIQKAQVSGQGDSLHEHIANLAGSPAIKKGILQTVKVVDELVKVMGRHKPENIVIEMARENQTTQKGQKNSRERMKRIEEGIKELGSQILKEHPVENTQLQNEKLYLYYLQNGRDMYVDQELDINRLSDYDVDHIVPQSFLKDDSIDNKVLTRSDKARGKSDNVPSEEVVKKMKNYWRQLLNAKLITQRKFDNLTKAERGGLSELDKAGFIKRQLVETRQITKHVAQILDSRMNTKYDENDKLIREVKVITLKSKLVSDFRKDFQFYKVREINNYHHAHDAYLNAVVGTALIKKYPKLESEFVYGDYKVYDVRKMIAKSEQEIGKATAKYFFYSNIMNFFKTEITLANGEIRKRPLIETNGETGEIVWDKGRDFATVRKVLSMPQVNIVKKTEVQTGGFSKESILPKRNSDKLIARKKDWDPKKYGGFDSPTVAYSVLVVAKVEKGKSKKLKSVKELLGITIMERSSFEKNPIDFLEAKGYKEVKKDLIIKLPKYSLFELENGRKRMLASAGELQKGNELALPSKYVNFLYLASHYEKLKGSPEDNEQKQLFVEQHKHYLDEIIEQISEFSKRVILADANLDKVLSAYNKHRDKPIREQAENIIHLFTLTNLGAPAAFKYFDTTIDRKRYTSTKEVLDATLIHQSITGLYETRIDLSQLGGDGGPAPAPAPAPAPGGTLGDQGSRGSDPLPEPRVTLTVEGIPTEFLVNTGAEHSVLTKPMGKMGSKRTVVAGATGSKVYPWTTKRLLKIGQKQVTHSFLVIPECPAPLLGRDLLTKLKAQIQFSTEGPQVTWEDRPAMCLVLNLEEEYRLHEKPVPPSIDPSWLQLFPMVWAEKAGMGLANQVPPVVVELKSDASPVAVRQYPMSKEAREGIRPHIQRFLDLGILVPCQSPWNTPLLPVKKPGTNDYRPVQDLREVNKRVQDIHPTVPNPYNLLSSLPPSHTWYSVLDLKDAFFCLKLHPNSQPLFAFEWRDPEKGNTGQLTWTRLPQGFKNSPTLFNEALHRDLASFRALNPQVVMLQYVDDLLVAAPTYRDCKEGTRRLLQELSKLGYRVSAKKAQLCREEVTYLGYLLKGGKRWLTPARKATVMKIPTPTTPRQVREFLGKAGFCRLFIPGFASLAAPLYPLTRPKVPFTWTEAHQEAFGRIKEALLSAPALALPDLTKPFALYVDEKEGVARGVLTQTLGPWRRPVAYLSKKLDPVASGWPTCLKAIAAVALLLKDADKLTLGQNVLVIAPHNLESIVRQPPDRWMTNARMTHYQSLLLNERVSFAPPAILNPATLLPVESDDTPIHICSEILAEETGTRPDLRDQPLPGVPAWYTDGSSFIMDGRRQAGAAIVDNKRTVWASNLPEGTSAQKAELIALTQALRLAEGKSINIYTDSRYAFATAHVHGAIYKQRGWLTSAGKDIKNKEEILALLEAIHLPKRVAIIHCPGHQRGTDPVATGNRKADEAAKQAAQSTRILTETTKNAGKRTADGSEFEKRTADGSEFESPKKKAKVE

SEQ ID NO: 1784 - protein, 2253 aa, synthetic construct
MPAAKRVKLDGGDKKYSIGLDIGTNSVGWAVITDEYKVPSKKFKVLGNTDRHSIKKNLIGALLFDSGETAEATRLKRTARRRYTRRKNRICYLQEIFSNEMAKVDDSFFHRLEESFLVEEDKKHERHPIFGNIVDEVAYHEKYPTIYHLRKKLVDSTDKADLRLIYLALAHMIKFRGHFLIEGDLNPDNSDVDKLFIQLVQTYNQLFEENPINASGVDAKAILSARLSKSRRLENLIAQLPGEKKNGLFGNLIALSLGLTPNFKSNFDLAEDAKLQLSKDTYDDDLDNLLAQIGDQYADLFLAAKNLSDAILLSDILRVNTEITKAPLSASMIKRYDEHHQDLTLLKALVRQQLPEKYKEIFFDQSKNGYAGYIDGGASQEEFYKFIKPILEKMDGTEELLVKLNREDLLRKQRTFDNGSIPHQIHLGELHAILRRQEDFYPFLKDNREKIEKILTFRIPYYVGPLARGNSRFAWMTRKSEETITPWNFEEVVDKGASAQSFIERMTNFDKNLPNEKVLPKHSLLYEYFTVYNELTKVKYVTEGMRKPAFLSGEQKKAIVDLLFKTNRKVTVKQLKEDYFKKIECFDSVEISGVEDRFNASLGTYHDLLKIIKDKDFLDNEENEDILEDIVLTLTLFEDREMIEERLKTYAHLFDDKVMKQLKRRRYTGWGRLSRKLINGIRDKQSGKTILDFLKSDGFANRNFMQLIHDDSLTFKEDIQKAQVSGQGDSLHEHIANLAGSPAIKKGILQTVKVVDELVKVMGRHKPENIVIEMARENQTTQKGQKNSRERMKRIEEGIKELGSQILKEHPVENTQLQNEKLYLYYLQNGRDMYVDQELDINRLSDYDVDHIVPQSFLKDDSIDNKVLTRSDKARGKSDNVPSEEVVKKMKNYWRQLLNAKLITQRKFDNLTKAERGGLSELDKAGFIKRQLVETRQITKHVAQILDSRMNTKYDENDKLIREVKVITLKSKLVSDFRKDFQFYKVREINNYHHAHDAYLNAVVGTALIKKYPKLESEFVYGDYKVYDVRKMIAKSEQEIGKATAKYFFYSNIMNFFKTEITLANGEIRKRPLIETNGETGEIVWDKGRDFATVRKVLSMPQVNIVKKTEVQTGGFSKESILPKRNSDKLIARKKDWDPKKYGGFDSPTVAYSVLVVAKVEKGKSKKLKSVKELLGITIMERSSFEKNPIDFLEAKGYKEVKKDLIIKLPKYSLFELENGRKRMLASAGELQKGNELALPSKYVNFLYLASHYEKLKGSPEDNEQKQLFVEQHKHYLDEIIEQISEFSKRVILADANLDKVLSAYNKHRDKPIREQAENIIHLFTLTNLGAPAAFKYFDTTIDRKRYTSTKEVLDATLIHQSITGLYETRIDLSQLGGDGGAEAAAKEAAAKEAAAKEAAAKALEAEAAAKEAAAKEAAAKEAAAKAGGTLGDQGSRGSDPLPEPRVTLTVEGIPTEFLVNTGAEHSVLTKPMGKMGSKRTVVAGATGSKVYPWTTKRLLKIGQKQVTHSFLVIPECPAPLLGRDLLTKLKAQIQFSTEGPQVTWEDRPAMCLVLNLEEEYRLHEKPVPPSIDPSWLQLFPMVWAEKAGMGLANQVPPVVVELKSDASPVAVRQYPMSKEAREGIRPHIQRFLDLGILVPCQSPWNTPLLPVKKPGTNDYRPVQDLREVNKRVQDIHPTVPNPYNLLSSLPPSHTWYSVLDLKDAFFCLKLHPNSQPLFAFEWRDPEKGNTGQLTWTRLPQGFKNSPTLFNEALHRDLASFRALNPQVVMLQYVDDLLVAAPTYRDCKEGTRRLLQELSKLGYRVSAKKAQLCREEVTYLGYLLKGGKRWLTPARKATVMKIPTPTTPRQVREFLGKAGFCRLFIPGFASLAAPLYPLTRPKVPFTWTEAHQEAFGRIKEALLSAPALALPDLTKPFALYVDEKEGVARGVLTQTLGPWRRPVAYLSKKLDPVASGWPTCLKAIAAVALLLKDADKLTLGQNVLVIAPHNLESIVRQPPDRWMTNARMTHYQSLLLNERVSFAPPAILNPATLLPVESDDTPIHICSEILAEETGTRPDLRDQPLPGVPAWYTDGSSFIMDGRRQAGAAIVDNKRTVWASNLPEGTSAQKAELIALTQALRLAEGKSINIYTDSRYAFATAHVHGAIYKQRGWLTSAGKDIKNKEEILALLEAIHLPKRVAIIHCPGHQRGTDPVATGNRKADEAAKQAAQSTRILTETTKNAGKRTADGSEFEKRTADGSEFESPKKKAKVE

SEQ ID NO: 1785 - protein, 2216 aa, synthetic construct
MPAAKRVKLDGGDKKYSIGLDIGTNSVGWAVITDEYKVPSKKFKVLGNTDRHSIKKNLIGALLFDSGETAEATRLKRTARRRYTRRKNRICYLQEIFSNEMAKVDDSFFHRLEESFLVEEDKKHERHPIFGNIVDEVAYHEKYPTIYHLRKKLVDSTDKADLRLIYLALAHMIKFRGHFLIEGDLNPDNSDVDKLFIQLVQTYNQLFEENPINASGVDAKAILSARLSKSRRLENLIAQLPGEKKNGLFGNLIALSLGLTPNFKSNFDLAEDAKLQLSKDTYDDDLDNLLAQIGDQYADLFLAAKNLSDAILLSDILRVNTEITKAPLSASMIKRYDEHHQDLTLLKALVRQQLPEKYKEIFFDQSKNGYAGYIDGGASQEEFYKFIKPILEKMDGTEELLVKLNREDLLRKQRTFDNGSIPHQIHLGELHAILRRQEDFYPFLKDNREKIEKILTFRIPYYVGPLARGNSRFAWMTRKSEETITPWNFEEVVDKGASAQSFIERMTNFDKNLPNEKVLPKHSLLYEYFTVYNELTKVKYVTEGMRKPAFLSGEQKKAIVDLLFKTNRKVTVKQLKEDYFKKIECFDSVEISGVEDRFNASLGTYHDLLKIIKDKDFLDNEENEDILEDIVLTLTLFEDREMIEERLKTYAHLFDDKVMKQLKRRRYTGWGRLSRKLINGIRDKQSGKTILDFLKSDGFANRNFMQLIHDDSLTFKEDIQKAQVSGQGDSLHEHIANLAGSPAIKKGILQTVKVVDELVKVMGRHKPENIVIEMARENQTTQKGQKNSRERMKRIEEGIKELGSQILKEHPVENTQLQNEKLYLYYLQNGRDMYVDQELDINRLSDYDVDHIVPQSFLKDDSIDNKVLTRSDKARGKSDNVPSEEVVKKMKNYWRQLLNAKLITQRKFDNLTKAERGGLSELDKAGFIKRQLVETRQITKHVAQILDSRMNTKYDENDKLIREVKVITLKSKLVSDFRKDFQFYKVREINNYHHAHDAYLNAVVGTALIKKYPKLESEFVYGDYKVYDVRKMIAKSEQEIGKATAKYFFYSNIMNFFKTEITLANGEIRKRPLIETNGETGEIVWDKGRDFATVRKVLSMPQVNIVKKTEVQTGGFSKESILPKRNSDKLIARKKDWDPKKYGGFDSPTVAYSVLVVAKVEKGKSKKLKSVKELLGITIMERSSFEKNPIDFLEAKGYKEVKKDLIIKLPKYSLFELENGRKRMLASAGELQKGNELALPSKYVNFLYLASHYEKLKGSPEDNEQKQLFVEQHKHYLDEIIEQISEFSKRVILADANLDKVLSAYNKHRDKPIREQAENIIHLFTLTNLGAPAAFKYFDTTIDRKRYTSTKEVLDATLIHQSITGLYETRIDLSQLGGDGGGGSGSSGGGGGTLGDQGSRGSDPLPEPRVTLTVEGIPTEFLVNTGAEHSVLTKPMGKMGSKRTVVAGATGSKVYPWTTKRLLKIGQKQVTHSFLVIPECPAPLLGRDLLTKLKAQIQFSTEGPQVTWEDRPAMCLVLNLEEEYRLHEKPVPPSIDPSWLQLFPMVWAEKAGMGLANQVPPVVVELKSDASPVAVRQYPMSKEAREGIRPHIQRFLDLGILVPCQSPWNTPLLPVKKPGTNDYRPVQDLREVNKRVQDIHPTVPNPYNLLSSLPPSHTWYSVLDLKDAFFCLKLHPNSQPLFAFEWRDPEKGNTGQLTWTRLPQGFKNSPTLFNEALHRDLASFRALNPQVVMLQYVDDLLVAAPTYRDCKEGTRRLLQELSKLGYRVSAKKAQLCREEVTYLGYLLKGGKRWLTPARKATVMKIPTPTTPRQVREFLGKAGFCRLFIPGFASLAAPLYPLTRPKVPFTWTEAHQEAFGRIKEALLSAPALALPDLTKPFALYVDEKEGVARGVLTQTLGPWRRPVAYLSKKLDPVASGWPTCLKAIAAVALLLKDADKLTLGQNVLVIAPHNLESIVRQPPDRWMTNARMTHYQSLLLNERVSFAPPAILNPATLLPVESDDTPIHICSEILAEETGTRPDLRDQPLPGVPAWYTDGSSFIMDGRRQAGAAIVDNKRTVWASNLPEGTSAQKAELIALTQALRLAEGKSINIYTDSRYAFATAHVHGAIYKQRGWLTSAGKDIKNKEEILALLEAIHLPKRVAIIHCPGHQRGTDPVATGNRKADEAAKQAAQSTRILTETTKNAGKRTADGSEFEKRTADGSEFESPKKKAKVE

SEQ ID NO: 1786 - protein, 2218 aa, synthetic construct
MPAAKRVKLDGGDKKYSIGLDIGTNSVGWAVITDEYKVPSKKFKVLGNTDRHSIKKNLIGALLFDSGETAEATRLKRTARRRYTRRKNRICYLQEIFSNEMAKVDDSFFHRLEESFLVEEDKKHERHPIFGNIVDEVAYHEKYPTIYHLRKKLVDSTDKADLRLIYLALAHMIKFRGHFLIEGDLNPDNSDVDKLFIQLVQTYNQLFEENPINASGVDAKAILSARLSKSRRLENLIAQLPGEKKNGLFGNLIALSLGLTPNFKSNFDLAEDAKLQLSKDTYDDDLDNLLAQIGDQYADLFLAAKNLSDAILLSDILRVNTEITKAPLSASMIKRYDEHHQDLTLLKALVRQQLPEKYKEIFFDQSKNGYAGYIDGGASQEEFYKFIKPILEKMDGTEELLVKLNREDLLRKQRTFDNGSIPHQIHLGELHAILRRQEDFYPFLKDNREKIEKILTFRIPYYVGPLARGNSRFAWMTRKSEETITPWNFEEVVDKGASAQSFIERMTNFDKNLPNEKVLPKHSLLYEYFTVYNELTKVKYVTEGMRKPAFLSGEQKKAIVDLLFKTNRKVTVKQLKEDYFKKIECFDSVEISGVEDRFNASLGTYHDLLKIIKDKDFLDNEENEDILEDIVLTLTLFEDREMIEERLKTYAHLFDDKVMKQLKRRRYTGWGRLSRKLINGIRDKQSGKTILDFLKSDGFANRNFMQLIHDDSLTFKEDIQKAQVSGQGDSLHEHIANLAGSPAIKKGILQTVKVVDELVKVMGRHKPENIVIEMARENQTTQKGQKNSRERMKRIEEGIKELGSQILKEHPVENTQLQNEKLYLYYLQNGRDMYVDQELDINRLSDYDVDHIVPQSFLKDDSIDNKVLTRSDKARGKSDNVPSEEVVKKMKNYWRQLLNAKLITQRKFDNLTKAERGGLSELDKAGFIKRQLVETRQITKHVAQILDSRMNTKYDENDKLIREVKVITLKSKLVSDFRKDFQFYKVREINNYHHAHDAYLNAVVGTALIKKYPKLESEFVYGDYKVYDVRKMIAKSEQEIGKATAKYFFYSNIMNFFKTEITLANGEIRKRPLIETNGETGEIVWDKGRDFATVRKVLSMPQVNIVKKTEVQTGGFSKESILPKRNSDKLIARKKDWDPKKYGGFDSPTVAYSVLVVAKVEKGKSKKLKSVKELLGITIMERSSFEKNPIDFLEAKGYKEVKKDLIIKLPKYSLFELENGRKRMLASAGELQKGNELALPSKYVNFLYLASHYEKLKGSPEDNEQKQLFVEQHKHYLDEIIEQISEFSKRVILADANLDKVLSAYNKHRDKPIREQAENIIHLFTLTNLGAPAAFKYFDTTIDRKRYTSTKEVLDATLIHQSITGLYETRIDLSQLGGDGGEAAAKPAPGGSGGTLGDQGSRGSDPLPEPRVTLTVEGIPTEFLVNTGAEHSVLTKPMGKMGSKRTVVAGATGSKVYPWTTKRLLKIGQKQVTHSFLVIPECPAPLLGRDLLTKLKAQIQFSTEGPQVTWEDRPAMCLVLNLEEEYRLHEKPVPPSIDPSWLQLFPMVWAEKAGMGLANQVPPVVVELKSDASPVAVRQYPMSKEAREGIRPHIQRFLDLGILVPCQSPWNTPLLPVKKPGTNDYRPVQDLREVNKRVQDIHPTVPNPYNLLSSLPPSHTWYSVLDLKDAFFCLKLHPNSQPLFAFEWRDPEKGNTGQLTWTRLPQGFKNSPTLFNEALHRDLASFRALNPQVVMLQYVDDLLVAAPTYRDCKEGTRRLLQELSKLGYRVSAKKAQLCREEVTYLGYLLKGGKRWLTPARKATVMKIPTPTTPRQVREFLGKAGFCRLFIPGFASLAAPLYPLTRPKVPFTWTEAHQEAFGRIKEALLSAPALALPDLTKPFALYVDEKEGVARGVLTQTLGPWRRPVAYLSKKLDPVASGWPTCLKAIAAVALLLKDADKLTLGQNVLVIAPHNLESIVRQPPDRWMTNARMTHYQSLLLNERVSFAPPAILNPATLLPVESDDTPIHICSEILAEETGTRPDLRDQPLPGVPAWYTDGSSFIMDGRRQAGAAIVDNKRTVWASNLPEGTSAQKAELIALTQALRLAEGKSINIYTDSRYAFATAHVHGAIYKQRGWLTSAGKDIKNKEEILALLEAIHLPKRVAIIHCPGHQRGTDPVATGNRKADEAAKQAAQSTRILTETTKNAGKRTADGSEFEKRTADGSEFESPKKKAKVE

SEQ ID NO: 1787 - protein, 2218 aa, synthetic construct
MPAAKRVKLDGGDKKYSIGLDIGTNSVGWAVITDEYKVPSKKFKVLGNTDRHSIKKNLIGALLFDSGETAEATRLKRTARRRYTRRKNRICYLQEIFSNEMAKVDDSFFHRLEESFLVEEDKKHERHPIFGNIVDEVAYHEKYPTIYHLRKKLVDSTDKADLRLIYLALAHMIKFRGHFLIEGDLNPDNSDVDKLFIQLVQTYNQLFEENPINASGVDAKAILSARLSKSRRLENLIAQLPGEKKNGLFGNLIALSLGLTPNFKSNFDLAEDAKLQLSKDTYDDDLDNLLAQIGDQYADLFLAAKNLSDAILLSDILRVNTEITKAPLSASMIKRYDEHHQDLTLLKALVRQQLPEKYKEIFFDQSKNGYAGYIDGGASQEEFYKFIKPILEKMDGTEELLVKLNREDLLRKQRTFDNGSIPHQIHLGELHAILRRQEDFYPFLKDNREKIEKILTFRIPYYVGPLARGNSRFAWMTRKSEETITPWNFEEVVDKGASAQSFIERMTNFDKNLPNEKVLPKHSLLYEYFTVYNELTKVKYVTEGMRKPAFLSGEQKKAIVDLLFKTNRKVTVKQLKEDYFKKIECFDSVEISGVEDRFNASLGTYHDLLKIIKDKDFLDNEENEDILEDIVLTLTLFEDREMIEERLKTYAHLFDDKVMKQLKRRRYTGWGRLSRKLINGIRDKQSGKTILDFLKSDGFANRNFMQLIHDDSLTFKEDIQKAQVSGQGDSLHEHIANLAGSPAIKKGILQTVKVVDELVKVMGRHKPENIVIEMARENQTTQKGQKNSRERMKRIEEGIKELGSQILKEHPVENTQLQNEKLYLYYLQNGRDMYVDQELDINRLSDYDVDHIVPQSFLKDDSIDNKVLTRSDKARGKSDNVPSEEVVKKMKNYWRQLLNAKLITQRKFDNLTKAERGGLSELDKAGFIKRQLVETRQITKHVAQILDSRMNTKYDENDKLIREVKVITLKSKLVSDFRKDFQFYKVREINNYHHAHDAYLNAVVGTALIKKYPKLESEFVYGDYKVYDVRKMIAKSEQEIGKATAKYFFYSNIMNFFKTEITLANGEIRKRPLIETNGETGEIVWDKGRDFATVRKVLSMPQVNIVKKTEVQTGGFSKESILPKRNSDKLIARKKDWDPKKYGGFDSPTVAYSVLVVAKVEKGKSKKLKSVKELLGITIMERSSFEKNPIDFLEAKGYKEVKKDLIIKLPKYSLFELENGRKRMLASAGELQKGNELALPSKYVNFLYLASHYEKLKGSPEDNEQKQLFVEQHKHYLDEIIEQISEFSKRVILADANLDKVLSAYNKHRDKPIREQAENIIHLFTLTNLGAPAAFKYFDTTIDRKRYTSTKEVLDATLIHQSITGLYETRIDLSQLGGDGGGGSPAPEAAAKGGTLGDQGSRGSDPLPEPRVTLTVEGIPTEFLVNTGAEHSVLTKPMGKMGSKRTVVAGATGSKVYPWTTKRLLKIGQKQVTHSFLVIPECPAPLLGRDLLTKLKAQIQFSTEGPQVTWEDRPAMCLVLNLEEEYRLHEKPVPPSIDPSWLQLFPMVWAEKAGMGLANQVPPVVVELKSDASPVAVRQYPMSKEAREGIRPHIQRFLDLGILVPCQSPWNTPLLPVKKPGTNDYRPVQDLREVNKRVQDIHPTVPNPYNLLSSLPPSHTWYSVLDLKDAFFCLKLHPNSQPLFAFEWRDPEKGNTGQLTWTRLPQGFKNSPTLFNEALHRDLASFRALNPQVVMLQYVDDLLVAAPTYRDCKEGTRRLLQELSKLGYRVSAKKAQLCREEVTYLGYLLKGGKRWLTPARKATVMKIPTPTTPRQVREFLGKAGFCRLFIPGFASLAAPLYPLTRPKVPFTWTEAHQEAFGRIKEALLSAPALALPDLTKPFALYVDEKEGVARGVLTQTLGPWRRPVAYLSKKLDPVASGWPTCLKAIAAVALLLKDADKLTLGQNVLVIAPHNLESIVRQPPDRWMTNARMTHYQSLLLNERVSFAPPAILNPATLLPVESDDTPIHICSEILAEETGTRPDLRDQPLPGVPAWYTDGSSFIMDGRRQAGAAIVDNKRTVWASNLPEGTSAQKAELIALTQALRLAEGKSINIYTDSRYAFATAHVHGAIYKQRGWLTSAGKDIKNKEEILALLEAIHLPKRVAIIHCPGHQRGTDPVATGNRKADEAAKQAAQSTRILTETTKNAGKRTADGSEFEKRTADGSEFESPKKKAKVE

SEQ ID NO: 1788 - protein, 2212 aa, synthetic construct
MPAAKRVKLDGGDKKYSIGLDIGTNSVGWAVITDEYKVPSKKFKVLGNTDRHSIKKNLIGALLFDSGETAEATRLKRTARRRYTRRKNRICYLQEIFSNEMAKVDDSFFHRLEESFLVEEDKKHERHPIFGNIVDEVAYHEKYPTIYHLRKKLVDSTDKADLRLIYLALAHMIKFRGHFLIEGDLNPDNSDVDKLFIQLVQTYNQLFEENPINASGVDAKAILSARLSKSRRLENLIAQLPGEKKNGLFGNLIALSLGLTPNFKSNFDLAEDAKLQLSKDTYDDDLDNLLAQIGDQYADLFLAAKNLSDAILLSDILRVNTEITKAPLSASMIKRYDEHHQDLTLLKALVRQQLPEKYKEIFFDQSKNGYAGYIDGGASQEEFYKFIKPILEKMDGTEELLVKLNREDLLRKQRTFDNGSIPHQIHLGELHAILRRQEDFYPFLKDNREKIEKILTFRIPYYVGPLARGNSRFAWMTRKSEETITPWNFEEVVDKGASAQSFIERMTNFDKNLPNEKVLPKHSLLYEYFTVYNELTKVKYVTEGMRKPAFLSGEQKKAIVDLLFKTNRKVTVKQLKEDYFKKIECFDSVEISGVEDRFNASLGTYHDLLKIIKDKDFLDNEENEDILEDIVLTLTLFEDREMIEERLKTYAHLFDDKVMKQLKRRRYTGWGRLSRKLINGIRDKQSGKTILDFLKSDGFANRNFMQLIHDDSLTFKEDIQKAQVSGQGDSLHEHIANLAGSPAIKKGILQTVKVVDELVKVMGRHKPENIVIEMARENQTTQKGQKNSRERMKRIEEGIKELGSQILKEHPVENTQLQNEKLYLYYLQNGRDMYVDQELDINRLSDYDVDHIVPQSFLKDDSIDNKVLTRSDKARGKSDNVPSEEVVKKMKNYWRQLLNAKLITQRKFDNLTKAERGGLSELDKAGFIKRQLVETRQITKHVAQILDSRMNTKYDENDKLIREVKVITLKSKLVSDFRKDFQFYKVREINNYHHAHDAYLNAVVGTALIKKYPKLESEFVYGDYKVYDVRKMIAKSEQEIGKATAKYFFYSNIMNFFKTEITLANGEIRKRPLIETNGETGEIVWDKGRDFATVRKVLSMPQVNIVKKTEVQTGGFSKESILPKRNSDKLIARKKDWDPKKYGGFDSPTVAYSVLVVAKVEKGKSKKLKSVKELLGITIMERSSFEKNPIDFLEAKGYKEVKKDLIIKLPKYSLFELENGRKRMLASAGELQKGNELALPSKYVNFLYLASHYEKLKGSPEDNEQKQLFVEQHKHYLDEIIEQISEFSKRVILADANLDKVLSAYNKHRDKPIREQAENIIHLFTLTNLGAPAAFKYFDTTIDRKRYTSTKEVLDATLIHQSITGLYETRIDLSQLGGDGGGGGGSGGTLGDQGSRGSDPLPEPRVTLTVEGIPTEFLVNTGAEHSVLTKPMGKMGSKRTVVAGATGSKVYPWTTKRLLKIGQKQVTHSFLVIPECPAPLLGRDLLTKLKAQIQFSTEGPQVTWEDRPAMCLVLNLEEEYRLHEKPVPPSIDPSWLQLFPMVWAEKAGMGLANQVPPVVVELKSDASPVAVRQYPMSKEAREGIRPHIQRFLDLGILVPCQSPWNTPLLPVKKPGTNDYRPVQDLREVNKRVQDIHPTVPNPYNLLSSLPPSHTWYSVLDLKDAFFCLKLHPNSQPLFAFEWRDPEKGNTGQLTWTRLPQGFKNSPTLFNEALHRDLASFRALNPQVVMLQYVDDLLVAAPTYRDCKEGTRRLLQELSKLGYRVSAKKAQLCREEVTYLGYLLKGGKRWLTPARKATVMKIPTPTTPRQVREFLGKAGFCRLFIPGFASLAAPLYPLTRPKVPFTWTEAHQEAFGRIKEALLSAPALALPDLTKPFALYVDEKEGVARGVLTQTLGPWRRPVAYLSKKLDPVASGWPTCLKAIAAVALLLKDADKLTLGQNVLVIAPHNLESIVRQPPDRWMTNARMTHYQSLLLNERVSFAPPAILNPATLLPVESDDTPIHICSEILAEETGTRPDLRDQPLPGVPAWYTDGSSFIMDGRRQAGAAIVDNKRTVWASNLPEGTSAQKAELIALTQALRLAEGKSINIYTDSRYAFATAHVHGAIYKQRGWLTSAGKDIKNKEEILALLEAIHLPKRVAIIHCPGHQRGTDPVATGNRKADEAAKQAAQSTRILTETTKNAGKRTADGSEFEKRTADGSEFESPKKKAKVE

SEQ ID NO: 1789 - protein, 2218 aa, synthetic construct
MPAAKRVKLDGGDKKYSIGLDIGTNSVGWAVITDEYKVPSKKFKVLGNTDRHSIKKNLIGALLFDSGETAEATRLKRTARRRYTRRKNRICYLQEIFSNEMAKVDDSFFHRLEESFLVEEDKKHERHPIFGNIVDEVAYHEKYPTIYHLRKKLVDSTDKADLRLIYLALAHMIKFRGHFLIEGDLNPDNSDVDKLFIQLVQTYNQLFEENPINASGVDAKAILSARLSKSRRLENLIAQLPGEKKNGLFGNLIALSLGLTPNFKSNFDLAEDAKLQLSKDTYDDDLDNLLAQIGDQYADLFLAAKNLSDAILLSDILRVNTEITKAPLSASMIKRYDEHHQDLTLLKALVRQQLPEKYKEIFFDQSKNGYAGYIDGGASQEEFYKFIKPILEKMDGTEELLVKLNREDLLRKQRTFDNGSIPHQIHLGELHAILRRQEDFYPFLKDNREKIEKILTFRIPYYVGPLARGNSRFAWMTRKSEETITPWNFEEVVDKGASAQSFIERMTNFDKNLPNEKVLPKHSLLYEYFTVYNELTKVKYVTEGMRKPAFLSGEQKKAIVDLLFKTNRKVTVKQLKEDYFKKIECFDSVEISGVEDRFNASLGTYHDLLKIIKDKDFLDNEENEDILEDIVLTLTLFEDREMIEERLKTYAHLFDDKVMKQLKRRRYTGWGRLSRKLINGIRDKQSGKTILDFLKSDGFANRNFMQLIHDDSLTFKEDIQKAQVSGQGDSLHEHIANLAGSPAIKKGILQTVKVVDELVKVMGRHKPENIVIEMARENQTTQKGQKNSRERMKRIEEGIKELGSQILKEHPVENTQLQNEKLYLYYLQNGRDMYVDQELDINRLSDYDVDHIVPQSFLKDDSIDNKVLTRSDKARGKSDNVPSEEVVKKMKNYWRQLLNAKLITQRKFDNLTKAERGGLSELDKAGFIKRQLVETRQITKHVAQILDSRMNTKYDENDKLIREVKVITLKSKLVSDFRKDFQFYKVREINNYHHAHDAYLNAVVGTALIKKYPKLESEFVYGDYKVYDVRKMIAKSEQEIGKATAKYFFYSNIMNFFKTEITLANGEIRKRPLIETNGETGEIVWDKGRDFATVRKVLSMPQVNIVKKTEVQTGGFSKESILPKRNSDKLIARKKDWDPKKYGGFDSPTVAYSVLVVAKVEKGKSKKLKSVKELLGITIMERSSFEKNPIDFLEAKGYKEVKKDLIIKLPKYSLFELENGRKRMLASAGELQKGNELALPSKYVNFLYLASHYEKLKGSPEDNEQKQLFVEQHKHYLDEIIEQISEFSKRVILADANLDKVLSAYNKHRDKPIREQAENIIHLFTLTNLGAPAAFKYFDTTIDRKRYTSTKEVLDATLIHQSITGLYETRIDLSQLGGDGGGGGEAAAKPAPGGTLGDQGSRGSDPLPEPRVTLTVEGIPTEFLVNTGAEHSVLTKPMGKMGSKRTVVAGATGSKVYPWTTKRLLKIGQKQVTHSFLVIPECPAPLLGRDLLTKLKAQIQFSTEGPQVTWEDRPAMCLVLNLEEEYRLHEKPVPPSIDPSWLQLFPMVWAEKAGMGLANQVPPVVVELKSDASPVAVRQYPMSKEAREGIRPHIQRFLDLGILVPCQSPWNTPLLPVKKPGTNDYRPVQDLREVNKRVQDIHPTVPNPYNLLSSLPPSHTWYSVLDLKDAFFCLKLHPNSQPLFAFEWRDPEKGNTGQLTWTRLPQGFKNSPTLFNEALHRDLASFRALNPQVVMLQYVDDLLVAAPTYRDCKEGTRRLLQELSKLGYRVSAKKAQLCREEVTYLGYLLKGGKRWLTPARKATVMKIPTPTTPRQVREFLGKAGFCRLFIPGFASLAAPLYPLTRPKVPFTWTEAHQEAFGRIKEALLSAPALALPDLTKPFALYVDEKEGVARGVLTQTLGPWRRPVAYLSKKLDPVASGWPTCLKAIAAVALLLKDADKLTLGQNVLVIAPHNLESIVRQPPDRWMTNARMTHYQSLLLNERVSFAPPAILNPATLLPVESDDTPIHICSEILAEETGTRPDLRDQPLPGVPAWYTDGSSFIMDGRRQAGAAIVDNKRTVWASNLPEGTSAQKAELIALTQALRLAEGKSINIYTDSRYAFATAHVHGAIYKQRGWLTSAGKDIKNKEEILALLEAIHLPKRVAIIHCPGHQRGTDPVATGNRKADEAAKQAAQSTRILTETTKNAGKRTADGSEFEKRTADGSEFESPKKKAKVE

SEQ ID NO: 1790 - protein, 2214 aa, synthetic construct
MPAAKRVKLDGGDKKYSIGLDIGTNSVGWAVITDEYKVPSKKFKVLGNTDRHSIKKNLIGALLFDSGETAEATRLKRTARRRYTRRKNRICYLQEIFSNEMAKVDDSFFHRLEESFLVEEDKKHERHPIFGNIVDEVAYHEKYPTIYHLRKKLVDSTDKADLRLIYLALAHMIKFRGHFLIEGDLNPDNSDVDKLFIQLVQTYNQLFEENPINASGVDAKAILSARLSKSRRLENLIAQLPGEKKNGLFGNLIALSLGLTPNFKSNFDLAEDAKLQLSKDTYDDDLDNLLAQIGDQYADLFLAAKNLSDAILLSDILRVNTEITKAPLSASMIKRYDEHHQDLTLLKALVRQQLPEKYKEIFFDQSKNGYAGYIDGGASQEEFYKFIKPILEKMDGTEELLVKLNREDLLRKQRTFDNGSIPHQIHLGELHAILRRQEDFYPFLKDNREKIEKILTFRIPYYVGPLARGNSRFAWMTRKSEETITPWNFEEVVDKGASAQSFIERMTNFDKNLPNEKVLPKHSLLYEYFTVYNELTKVKYVTEGMRKPAFLSGEQKKAIVDLLFKTNRKVTVKQLKEDYFKKIECFDSVEISGVEDRFNASLGTYHDLLKIIKDKDFLDNEENEDILEDIVLTLTLFEDREMIEERLKTYAHLFDDKVMKQLKRRRYTGWGRLSRKLINGIRDKQSGKTILDFLKSDGFANRNFMQLIHDDSLTFKEDIQKAQVSGQGDSLHEHIANLAGSPAIKKGILQTVKVVDELVKVMGRHKPENIVIEMARENQTTQKGQKNSRERMKRIEEGIKELGSQILKEHPVENTQLQNEKLYLYYLQNGRDMYVDQELDINRLSDYDVDHIVPQSFLKDDSIDNKVLTRSDKARGKSDNVPSEEVVKKMKNYWRQLLNAKLITQRKFDNLTKAERGGLSELDKAGFIKRQLVETRQITKHVAQILDSRMNTKYDENDKLIREVKVITLKSKLVSDFRKDFQFYKVREINNYHHAHDAYLNAVVGTALIKKYPKLESEFVYGDYKVYDVRKMIAKSEQEIGKATAKYFFYSNIMNFFKTEITLANGEIRKRPLIETNGETGEIVWDKGRDFATVRKVLSMPQVNIVKKTEVQTGGFSKESILPKRNSDKLIARKKDWDPKKYGGFDSPTVAYSVLVVAKVEKGKSKKLKSVKELLGITIMERSSFEKNPIDFLEAKGYKEVKKDLIIKLPKYSLFELENGRKRMLASAGELQKGNELALPSKYVNFLYLASHYEKLKGSPEDNEQKQLFVEQHKHYLDEIIEQISEFSKRVILADANLDKVLSAYNKHRDKPIREQAENIIHLFTLTNLGAPAAFKYFDTTIDRKRYTSTKEVLDATLIHQSITGLYETRIDLSQLGGDGGGGGGGGGGGTLGDQGSRGSDPLPEPRVTLTVEGIPTEFLVNTGAEHSVLTKPMGKMGSKRTVVAGATGSKVYPWTTKRLLKIGQKQVTHSFLVIPECPAPLLGRDLLTKLKAQIQFSTEGPQVTWEDRPAMCLVLNLEEEYRLHEKPVPPSIDPSWLQLFPMVWAEKAGMGLANQVPPVVVELKSDASPVAVRQYPMSKEAREGIRPHIQRFLDLGILVPCQSPWNTPLLPVKKPGTNDYRPVQDLREVNKRVQDIHPTVPNPYNLLSSLPPSHTWYSVLDLKDAFFCLKLHPNSQPLFAFEWRDPEKGNTGQLTWTRLPQGFKNSPTLFNEALHRDLASFRALNPQVVMLQYVDDLLVAAPTYRDCKEGTRRLLQELSKLGYRVSAKKAQLCREEVTYLGYLLKGGKRWLTPARKATVMKIPTPTTPRQVREFLGKAGFCRLFIPGFASLAAPLYPLTRPKVPFTWTEAHQEAFGRIKEALLSAPALALPDLTKPFALYVDEKEGVARGVLTQTLGPWRRPVAYLSKKLDPVASGWPTCLKAIAAVALLLKDADKLTLGQNVLVIAPHNLESIVRQPPDRWMTNARMTHYQSLLLNERVSFAPPAILNPATLLPVESDDTPIHICSEILAEETGTRPDLRDQPLPGVPAWYTDGSSFIMDGRRQAGAAIVDNKRTVWASNLPEGTSAQKAELIALTQALRLAEGKSINIYTDSRYAFATAHVHGAIYKQRGWLTSAGKDIKNKEEILALLEAIHLPKRVAIIHCPGHQRGTDPVATGNRKADEAAKQAAQSTRILTETTKNAGKRTADGSEFEKRTADGSEFESPKKKAKVE

SEQ ID NO: 1791 - protein, 2210 aa, synthetic construct
MPAAKRVKLDGGDKKYSIGLDIGTNSVGWAVITDEYKVPSKKFKVLGNTDRHSIKKNLIGALLFDSGETAEATRLKRTARRRYTRRKNRICYLQEIFSNEMAKVDDSFFHRLEESFLVEEDKKHERHPIFGNIVDEVAYHEKYPTIYHLRKKLVDSTDKADLRLIYLALAHMIKFRGHFLIEGDLNPDNSDVDKLFIQLVQTYNQLFEENPINASGVDAKAILSARLSKSRRLENLIAQLPGEKKNGLFGNLIALSLGLTPNFKSNFDLAEDAKLQLSKDTYDDDLDNLLAQIGDQYADLFLAAKNLSDAILLSDILRVNTEITKAPLSASMIKRYDEHHQDLTLLKALVRQQLPEKYKEIFFDQSKNGYAGYIDGGASQEEFYKFIKPILEKMDGTEELLVKLNREDLLRKQRTFDNGSIPHQIHLGELHAILRRQEDFYPFLKDNREKIEKILTFRIPYYVGPLARGNSRFAWMTRKSEETITPWNFEEVVDKGASAQSFIERMTNFDKNLPNEKVLPKHSLLYEYFTVYNELTKVKYVTEGMRKPAFLSGEQKKAIVDLLFKTNRKVTVKQLKEDYFKKIECFDSVEISGVEDRFNASLGTYHDLLKIIKDKDFLDNEENEDILEDIVLTLTLFEDREMIEERLKTYAHLFDDKVMKQLKRRRYTGWGRLSRKLINGIRDKQSGKTILDFLKSDGFANRNFMQLIHDDSLTFKEDIQKAQVSGQGDSLHEHIANLAGSPAIKKGILQTVKVVDELVKVMGRHKPENIVIEMARENQTTQKGQKNSRERMKRIEEGIKELGSQILKEHPVENTQLQNEKLYLYYLQNGRDMYVDQELDINRLSDYDVDHIVPQSFLKDDSIDNKVLTRSDKARGKSDNVPSEEVVKKMKNYWRQLLNAKLITQRKFDNLTKAERGGLSELDKAGFIKRQLVETRQITKHVAQILDSRMNTKYDENDKLIREVKVITLKSKLVSDFRKDFQFYKVREINNYHHAHDAYLNAVVGTALIKKYPKLESEFVYGDYKVYDVRKMIAKSEQEIGKATAKYFFYSNIMNFFKTEITLANGEIRKRPLIETNGETGEIVWDKGRDFATVRKVLSMPQVNIVKKTEVQTGGFSKESILPKRNSDKLIARKKDWDPKKYGGFDSPTVAYSVLVVAKVEKGKSKKLKSVKELLGITIMERSSFEKNPIDFLEAKGYKEVKKDLIIKLPKYSLFELENGRKRMLASAGELQKGNELALPSKYVNFLYLASHYEKLKGSPEDNEQKQLFVEQHKHYLDEIIEQISEFSKRVILADANLDKVLSAYNKHRDKPIREQAENIIHLFTLTNLGAPAAFKYFDTTIDRKRYTSTKEVLDATLIHQSITGLYETRIDLSQLGGDGGGGSGGTLGDQGSRGSDPLPEPRVTLTVEGIPTEFLVNTGAEHSVLTKPMGKMGSKRTVVAGATGSKVYPWTTKRLLKIGQKQVTHSFLVIPECPAPLLGRDLLTKLKAQIQFSTEGPQVTWEDRPAMCLVLNLEEEYRLHEKPVPPSIDPSWLQLFPMVWAEKAGMGLANQVPPVVVELKSDASPVAVRQYPMSKEAREGIRPHIQRFLDLGILVPCQSPWNTPLLPVKKPGTNDYRPVQDLREVNKRVQDIHPTVPNPYNLLSSLPPSHTWYSVLDLKDAFFCLKLHPNSQPLFAFEWRDPEKGNTGQLTWTRLPQGFKNSPTLFNEALHRDLASFRALNPQVVMLQYVDDLLVAAPTYRDCKEGTRRLLQELSKLGYRVSAKKAQLCREEVTYLGYLLKGGKRWLTPARKATVMKIPTPTTPRQVREFLGKAGFCRLFIPGFASLAAPLYPLTRPKVPFTWTEAHQEAFGRIKEALLSAPALALPDLTKPFALYVDEKEGVARGVLTQTLGPWRRPVAYLSKKLDPVASGWPTCLKAIAAVALLLKDADKLTLGQNVLVIAPHNLESIVRQPPDRWMTNARMTHYQSLLLNERVSFAPPAILNPATLLPVESDDTPIHICSEILAEETGTRPDLRDQPLPGVPAWYTDGSSFIMDGRRQAGAAIVDNKRTVWASNLPEGTSAQKAELIALTQALRLAEGKSINIYTDSRYAFATAHVHGAIYKQRGWLTSAGKDIKNKEEILALLEAIHLPKRVAIIHCPGHQRGTDPVATGNRKADEAAKQAAQSTRILTETTKNAGKRTADGSEFEKRTADGSEFESPKKKAKVE

SEQ ID NO: 1792 - protein, 2216 aa, synthetic construct
MPAAKRVKLDGGDKKYSIGLDIGTNSVGWAVITDEYKVPSKKFKVLGNTDRHSIKKNLIGALLFDSGETAEATRLKRTARRRYTRRKNRICYLQEIFSNEMAKVDDSFFHRLEESFLVEEDKKHERHPIFGNIVDEVAYHEKYPTIYHLRKKLVDSTDKADLRLIYLALAHMIKFRGHFLIEGDLNPDNSDVDKLFIQLVQTYNQLFEENPINASGVDAKAILSARLSKSRRLENLIAQLPGEKKNGLFGNLIALSLGLTPNFKSNFDLAEDAKLQLSKDTYDDDLDNLLAQIGDQYADLFLAAKNLSDAILLSDILRVNTEITKAPLSASMIKRYDEHHQDLTLLKALVRQQLPEKYKEIFFDQSKNGYAGYIDGGASQEEFYKFIKPILEKMDGTEELLVKLNREDLLRKQRTFDNGSIPHQIHLGELHAILRRQEDFYPFLKDNREKIEKILTFRIPYYVGPLARGNSRFAWMTRKSEETITPWNFEEVVDKGASAQSFIERMTNFDKNLPNEKVLPKHSLLYEYFTVYNELTKVKYVTEGMRKPAFLSGEQKKAIVDLLFKTNRKVTVKQLKEDYFKKIECFDSVEISGVEDRFNASLGTYHDLLKIIKDKDFLDNEENEDILEDIVLTLTLFEDREMIEERLKTYAHLFDDKVMKQLKRRRYTGWGRLSRKLINGIRDKQSGKTILDFLKSDGFANRNFMQLIHDDSLTFKEDIQKAQVSGQGDSLHEHIANLAGSPAIKKGILQTVKVVDELVKVMGRHKPENIVIEMARENQTTQKGQKNSRERMKRIEEGIKELGSQILKEHPVENTQLQNEKLYLYYLQNGRDMYVDQELDINRLSDYDVDHIVPQSFLKDDSIDNKVLTRSDKARGKSDNVPSEEVVKKMKNYWRQLLNAKLITQRKFDNLTKAERGGLSELDKAGFIKRQLVETRQITKHVAQILDSRMNTKYDENDKLIREVKVITLKSKLVSDFRKDFQFYKVREINNYHHAHDAYLNAVVGTALIKKYPKLESEFVYGDYKVYDVRKMIAKSEQEIGKATAKYFFYSNIMNFFKTEITLANGEIRKRPLIETNGETGEIVWDKGRDFATVRKVLSMPQVNIVKKTEVQTGGFSKESILPKRNSDKLIARKKDWDPKKYGGFDSPTVAYSVLVVAKVEKGKSKKLKSVKELLGITIMERSSFEKNPIDFLEAKGYKEVKKDLIIKLPKYSLFELENGRKRMLASAGELQKGNELALPSKYVNFLYLASHYEKLKGSPEDNEQKQLFVEQHKHYLDEIIEQISEFSKRVILADANLDKVLSAYNKHRDKPIREQAENIIHLFTLTNLGAPAAFKYFDTTIDRKRYTSTKEVLDATLIHQSITGLYETRIDLSQLGGDGGPAPGGSGGGGGTLGDQGSRGSDPLPEPRVTLTVEGIPTEFLVNTGAEHSVLTKPMGKMGSKRTVVAGATGSKVYPWTTKRLLKIGQKQVTHSFLVIPECPAPLLGRDLLTKLKAQIQFSTEGPQVTWEDRPAMCLVLNLEEEYRLHEKPVPPSIDPSWLQLFPMVWAEKAGMGLANQVPPVVVELKSDASPVAVRQYPMSKEAREGIRPHIQRFLDLGILVPCQSPWNTPLLPVKKPGTNDYRPVQDLREVNKRVQDIHPTVPNPYNLLSSLPPSHTWYSVLDLKDAFFCLKLHPNSQPLFAFEWRDPEKGNTGQLTWTRLPQGFKNSPTLFNEALHRDLASFRALNPQVVMLQYVDDLLVAAPTYRDCKEGTRRLLQELSKLGYRVSAKKAQLCREEVTYLGYLLKGGKRWLTPARKATVMKIPTPTTPRQVREFLGKAGFCRLFIPGFASLAAPLYPLTRPKVPFTWTEAHQEAFGRIKEALLSAPALALPDLTKPFALYVDEKEGVARGVLTQTLGPWRRPVAYLSKKLDPVASGWPTCLKAIAAVALLLKDADKLTLGQNVLVIAPHNLESIVRQPPDRWMTNARMTHYQSLLLNERVSFAPPAILNPATLLPVESDDTPIHICSEILAEETGTRPDLRDQPLPGVPAWYTDGSSFIMDGRRQAGAAIVDNKRTVWASNLPEGTSAQKAELIALTQALRLAEGKSINIYTDSRYAFATAHVHGAIYKQRGWLTSAGKDIKNKEEILALLEAIHLPKRVAIIHCPGHQRGTDPVATGNRKADEAAKQAAQSTRILTETTKNAGKRTADGSEFEKRTADGSEFESPKKKAKVE

SEQ ID NO: 1793 - protein, 2220 aa, synthetic construct
MPAAKRVKLDGGDKKYSIGLDIGTNSVGWAVITDEYKVPSKKFKVLGNTDRHSIKKNLIGALLFDSGETAEATRLKRTARRRYTRRKNRICYLQEIFSNEMAKVDDSFFHRLEESFLVEEDKKHERHPIFGNIVDEVAYHEKYPTIYHLRKKLVDSTDKADLRLIYLALAHMIKFRGHFLIEGDLNPDNSDVDKLFIQLVQTYNQLFEENPINASGVDAKAILSARLSKSRRLENLIAQLPGEKKNGLFGNLIALSLGLTPNFKSNFDLAEDAKLQLSKDTYDDDLDNLLAQIGDQYADLFLAAKNLSDAILLSDILRVNTEITKAPLSASMIKRYDEHHQDLTLLKALVRQQLPEKYKEIFFDQSKNGYAGYIDGGASQEEFYKFIKPILEKMDGTEELLVKLNREDLLRKQRTFDNGSIPHQIHLGELHAILRRQEDFYPFLKDNREKIEKILTFRIPYYVGPLARGNSRFAWMTRKSEETITPWNFEEVVDKGASAQSFIERMTNFDKNLPNEKVLPKHSLLYEYFTVYNELTKVKYVTEGMRKPAFLSGEQKKAIVDLLFKTNRKVTVKQLKEDYFKKIECFDSVEISGVEDRFNASLGTYHDLLKIIKDKDFLDNEENEDILEDIVLTLTLFEDREMIEERLKTYAHLFDDKVMKQLKRRRYTGWGRLSRKLINGIRDKQSGKTILDFLKSDGFANRNFMQLIHDDSLTFKEDIQKAQVSGQGDSLHEHIANLAGSPAIKKGILQTVKVVDELVKVMGRHKPENIVIEMARENQTTQKGQKNSRERMKRIEEGIKELGSQILKEHPVENTQLQNEKLYLYYLQNGRDMYVDQELDINRLSDYDVDHIVPQSFLKDDSIDNKVLTRSDKARGKSDNVPSEEVVKKMKNYWRQLLNAKLITQRKFDNLTKAERGGLSELDKAGFIKRQLVETRQITKHVAQILDSRMNTKYDENDKLIREVKVITLKSKLVSDFRKDFQFYKVREINNYHHAHDAYLNAVVGTALIKKYPKLESEFVYGDYKVYDVRKMIAKSEQEIGKATAKYFFYSNIMNFFKTEITLANGEIRKRPLIETNGETGEIVWDKGRDFATVRKVLSMPQVNIVKKTEVQTGGFSKESILPKRNSDKLIARKKDWDPKKYGGFDSPTVAYSVLVVAKVEKGKSKKLKSVKELLGITIMERSSFEKNPIDFLEAKGYKEVKKDLIIKLPKYSLFELENGRKRMLASAGELQKGNELALPSKYVNFLYLASHYEKLKGSPEDNEQKQLFVEQHKHYLDEIIEQISEFSKRVILADANLDKVLSAYNKHRDKPIREQAENIIHLFTLTNLGAPAAFKYFDTTIDRKRYTSTKEVLDATLIHQSITGLYETRIDLSQLGGDGGPAPAPAPAPAPAPGGTLGDQGSRGSDPLPEPRVTLTVEGIPTEFLVNTGAEHSVLTKPMGKMGSKRTVVAGATGSKVYPWTTKRLLKIGQKQVTHSFLVIPECPAPLLGRDLLTKLKAQIQFSTEGPQVTWEDRPAMCLVLNLEEEYRLHEKPVPPSIDPSWLQLFPMVWAEKAGMGLANQVPPVVVELKSDASPVAVRQYPMSKEAREGIRPHIQRFLDLGILVPCQSPWNTPLLPVKKPGTNDYRPVQDLREVNKRVQDIHPTVPNPYNLLSSLPPSHTWYSVLDLKDAFFCLKLHPNSQPLFAFEWRDPEKGNTGQLTWTRLPQGFKNSPTLFNEALHRDLASFRALNPQVVMLQYVDDLLVAAPTYRDCKEGTRRLLQELSKLGYRVSAKKAQLCREEVTYLGYLLKGGKRWLTPARKATVMKIPTPTTPRQVREFLGKAGFCRLFIPGFASLAAPLYPLTRPKVPFTWTEAHQEAFGRIKEALLSAPALALPDLTKPFALYVDEKEGVARGVLTQTLGPWRRPVAYLSKKLDPVASGWPTCLKAIAAVALLLKDADKLTLGQNVLVIAPHNLESIVRQPPDRWMTNARMTHYQSLLLNERVSFAPPAILNPATLLPVESDDTPIHICSEILAEETGTRPDLRDQPLPGVPAWYTDGSSFIMDGRRQAGAAIVDNKRTVWASNLPEGTSAQKAELIALTQALRLAEGKSINIYTDSRYAFATAHVHGAIYKQRGWLTSAGKDIKNKEEILALLEAIHLPKRVAIIHCPGHQRGTDPVATGNRKADEAAKQAAQSTRILTETTKNAGKRTADGSEFEKRTADGSEFESPKKKAKVE

SEQ ID NO: 1794 - protein, 2213 aa, synthetic construct
MPAAKRVKLDGGDKKYSIGLDIGTNSVGWAVITDEYKVPSKKFKVLGNTDRHSIKKNLIGALLFDSGETAEATRLKRTARRRYTRRKNRICYLQEIFSNEMAKVDDSFFHRLEESFLVEEDKKHERHPIFGNIVDEVAYHEKYPTIYHLRKKLVDSTDKADLRLIYLALAHMIKFRGHFLIEGDLNPDNSDVDKLFIQLVQTYNQLFEENPINASGVDAKAILSARLSKSRRLENLIAQLPGEKKNGLFGNLIALSLGLTPNFKSNFDLAEDAKLQLSKDTYDDDLDNLLAQIGDQYADLFLAAKNLSDAILLSDILRVNTEITKAPLSASMIKRYDEHHQDLTLLKALVRQQLPEKYKEIFFDQSKNGYAGYIDGGASQEEFYKFIKPILEKMDGTEELLVKLNREDLLRKQRTFDNGSIPHQIHLGELHAILRRQEDFYPFLKDNREKIEKILTFRIPYYVGPLARGNSRFAWMTRKSEETITPWNFEEVVDKGASAQSFIERMTNFDKNLPNEKVLPKHSLLYEYFTVYNELTKVKYVTEGMRKPAFLSGEQKKAIVDLLFKTNRKVTVKQLKEDYFKKIECFDSVEISGVEDRFNASLGTYHDLLKIIKDKDFLDNEENEDILEDIVLTLTLFEDREMIEERLKTYAHLFDDKVMKQLKRRRYTGWGRLSRKLINGIRDKQSGKTILDFLKSDGFANRNFMQLIHDDSLTFKEDIQKAQVSGQGDSLHEHIANLAGSPAIKKGILQTVKVVDELVKVMGRHKPENIVIEMARENQTTQKGQKNSRERMKRIEEGIKELGSQILKEHPVENTQLQNEKLYLYYLQNGRDMYVDQELDINRLSDYDVDHIVPQSFLKDDSIDNKVLTRSDKARGKSDNVPSEEVVKKMKNYWRQLLNAKLITQRKFDNLTKAERGGLSELDKAGFIKRQLVETRQITKHVAQILDSRMNTKYDENDKLIREVKVITLKSKLVSDFRKDFQFYKVREINNYHHAHDAYLNAVVGTALIKKYPKLESEFVYGDYKVYDVRKMIAKSEQEIGKATAKYFFYSNIMNFFKTEITLANGEIRKRPLIETNGETGEIVWDKGRDFATVRKVLSMPQVNIVKKTEVQTGGFSKESILPKRNSDKLIARKKDWDPKKYGGFDSPTVAYSVLVVAKVEKGKSKKLKSVKELLGITIMERSSFEKNPIDFLEAKGYKEVKKDLIIKLPKYSLFELENGRKRMLASAGELQKGNELALPSKYVNFLYLASHYEKLKGSPEDNEQKQLFVEQHKHYLDEIIEQISEFSKRVILADANLDKVLSAYNKHRDKPIREQAENIIHLFTLTNLGAPAAFKYFDTTIDRKRYTSTKEVLDATLIHQSITGLYETRIDLSQLGGDGGPAPGGGGGTLGDQGSRGSDPLPEPRVTLTVEGIPTEFLVNTGAEHSVLTKPMGKMGSKRTVVAGATGSKVYPWTTKRLLKIGQKQVTHSFLVIPECPAPLLGRDLLTKLKAQIQFSTEGPQVTWEDRPAMCLVLNLEEEYRLHEKPVPPSIDPSWLQLFPMVWAEKAGMGLANQVPPVVVELKSDASPVAVRQYPMSKEAREGIRPHIQRFLDLGILVPCQSPWNTPLLPVKKPGTNDYRPVQDLREVNKRVQDIHPTVPNPYNLLSSLPPSHTWYSVLDLKDAFFCLKLHPNSQPLFAFEWRDPEKGNTGQLTWTRLPQGFKNSPTLFNEALHRDLASFRALNPQVVMLQYVDDLLVAAPTYRDCKEGTRRLLQELSKLGYRVSAKKAQLCREEVTYLGYLLKGGKRWLTPARKATVMKIPTPTTPRQVREFLGKAGFCRLFIPGFASLAAPLYPLTRPKVPFTWTEAHQEAFGRIKEALLSAPALALPDLTKPFALYVDEKEGVARGVLTQTLGPWRRPVAYLSKKLDPVASGWPTCLKAIAAVALLLKDADKLTLGQNVLVIAPHNLESIVRQPPDRWMTNARMTHYQSLLLNERVSFAPPAILNPATLLPVESDDTPIHICSEILAEETGTRPDLRDQPLPGVPAWYTDGSSFIMDGRRQAGAAIVDNKRTVWASNLPEGTSAQKAELIALTQALRLAEGKSINIYTDSRYAFATAHVHGAIYKQRGWLTSAGKDIKNKEEILALLEAIHLPKRVAIIHCPGHQRGTDPVATGNRKADEAAKQAAQSTRILTETTKNAGKRTADGSEFEKRTADGSEFESPKKKAKVE

SEQ ID NO: 1795 - protein, 2218 aa, synthetic construct
MPAAKRVKLDGGDKKYSIGLDIGTNSVGWAVITDEYKVPSKKFKVLGNTDRHSIKKNLIGALLFDSGETAEATRLKRTARRRYTRRKNRICYLQEIFSNEMAKVDDSFFHRLEESFLVEEDKKHERHPIFGNIVDEVAYHEKYPTIYHLRKKLVDSTDKADLRLIYLALAHMIKFRGHFLIEGDLNPDNSDVDKLFIQLVQTYNQLFEENPINASGVDAKAILSARLSKSRRLENLIAQLPGEKKNGLFGNLIALSLGLTPNFKSNFDLAEDAKLQLSKDTYDDDLDNLLAQIGDQYADLFLAAKNLSDAILLSDILRVNTEITKAPLSASMIKRYDEHHQDLTLLKALVRQQLPEKYKEIFFDQSKNGYAGYIDGGASQEEFYKFIKPILEKMDGTEELLVKLNREDLLRKQRTFDNGSIPHQIHLGELHAILRRQEDFYPFLKDNREKIEKILTFRIPYYVGPLARGNSRFAWMTRKSEETITPWNFEEVVDKGASAQSFIERMTNFDKNLPNEKVLPKHSLLYEYFTVYNELTKVKYVTEGMRKPAFLSGEQKKAIVDLLFKTNRKVTVKQLKEDYFKKIECFDSVEISGVEDRFNASLGTYHDLLKIIKDKDFLDNEENEDILEDIVLTLTLFEDREMIEERLKTYAHLFDDKVMKQLKRRRYTGWGRLSRKLINGIRDKQSGKTILDFLKSDGFANRNFMQLIHDDSLTFKEDIQKAQVSGQGDSLHEHIANLAGSPAIKKGILQTVKVVDELVKVMGRHKPENIVIEMARENQTTQKGQKNSRERMKRIEEGIKELGSQILKEHPVENTQLQNEKLYLYYLQNGRDMYVDQELDINRLSDYDVDHIVPQSFLKDDSIDNKVLTRSDKARGKSDNVPSEEVVKKMKNYWRQLLNAKLITQRKFDNLTKAERGGLSELDKAGFIKRQLVETRQITKHVAQILDSRMNTKYDENDKLIREVKVITLKSKLVSDFRKDFQFYKVREINNYHHAHDAYLNAVVGTALIKKYPKLESEFVYGDYKVYDVRKMIAKSEQEIGKATAKYFFYSNIMNFFKTEITLANGEIRKRPLIETNGETGEIVWDKGRDFATVRKVLSMPQVNIVKKTEVQTGGFSKESILPKRNSDKLIARKKDWDPKKYGGFDSPTVAYSVLVVAKVEKGKSKKLKSVKELLGITIMERSSFEKNPIDFLEAKGYKEVKKDLIIKLPKYSLFELENGRKRMLASAGELQKGNELALPSKYVNFLYLASHYEKLKGSPEDNEQKQLFVEQHKHYLDEIIEQISEFSKRVILADANLDKVLSAYNKHRDKPIREQAENIIHLFTLTNLGAPAAFKYFDTTIDRKRYTSTKEVLDATLIHQSITGLYETRIDLSQLGGDGGGSSPAPEAAAKGGTLGDQGSRGSDPLPEPRVTLTVEGIPTEFLVNTGAEHSVLTKPMGKMGSKRTVVAGATGSKVYPWTTKRLLKIGQKQVTHSFLVIPECPAPLLGRDLLTKLKAQIQFSTEGPQVTWEDRPAMCLVLNLEEEYRLHEKPVPPSIDPSWLQLFPMVWAEKAGMGLANQVPPVVVELKSDASPVAVRQYPMSKEAREGIRPHIQRFLDLGILVPCQSPWNTPLLPVKKPGTNDYRPVQDLREVNKRVQDIHPTVPNPYNLLSSLPPSHTWYSVLDLKDAFFCLKLHPNSQPLFAFEWRDPEKGNTGQLTWTRLPQGFKNSPTLFNEALHRDLASFRALNPQVVMLQYVDDLLVAAPTYRDCKEGTRRLLQELSKLGYRVSAKKAQLCREEVTYLGYLLKGGKRWLTPARKATVMKIPTPTTPRQVREFLGKAGFCRLFIPGFASLAAPLYPLTRPKVPFTWTEAHQEAFGRIKEALLSAPALALPDLTKPFALYVDEKEGVARGVLTQTLGPWRRPVAYLSKKLDPVASGWPTCLKAIAAVALLLKDADKLTLGQNVLVIAPHNLESIVRQPPDRWMTNARMTHYQSLLLNERVSFAPPAILNPATLLPVESDDTPIHICSEILAEETGTRPDLRDQPLPGVPAWYTDGSSFIMDGRRQAGAAIVDNKRTVWASNLPEGTSAQKAELIALTQALRLAEGKSINIYTDSRYAFATAHVHGAIYKQRGWLTSAGKDIKNKEEILALLEAIHLPKRVAIIHCPGHQRGTDPVATGNRKADEAAKQAAQSTRILTETTKNAGKRTADGSEFEKRTADGSEFESPKKKAKVE

SEQ ID NO: 1796 - protein, 2218 aa, synthetic construct
MPAAKRVKLDGGDKKYSIGLDIGTNSVGWAVITDEYKVPSKKFKVLGNTDRHSIKKNLIGALLFDSGETAEATRLKRTARRRYTRRKNRICYLQEIFSNEMAKVDDSFFHRLEESFLVEEDKKHERHPIFGNIVDEVAYHEKYPTIYHLRKKLVDSTDKADLRLIYLALAHMIKFRGHFLIEGDLNPDNSDVDKLFIQLVQTYNQLFEENPINASGVDAKAILSARLSKSRRLENLIAQLPGEKKNGLFGNLIALSLGLTPNFKSNFDLAEDAKLQLSKDTYDDDLDNLLAQIGDQYADLFLAAKNLSDAILLSDILRVNTEITKAPLSASMIKRYDEHHQDLTLLKALVRQQLPEKYKEIFFDQSKNGYAGYIDGGASQEEFYKFIKPILEKMDGTEELLVKLNREDLLRKQRTFDNGSIPHQIHLGELHAILRRQEDFYPFLKDNREKIEKILTFRIPYYVGPLARGNSRFAWMTRKSEETITPWNFEEVVDKGASAQSFIERMTNFDKNLPNEKVLPKHSLLYEYFTVYNELTKVKYVTEGMRKPAFLSGEQKKAIVDLLFKTNRKVTVKQLKEDYFKKIECFDSVEISGVEDRFNASLGTYHDLLKIIKDKDFLDNEENEDILEDIVLTLTLFEDREMIEERLKTYAHLFDDKVMKQLKRRRYTGWGRLSRKLINGIRDKQSGKTILDFLKSDGFANRNFMQLIHDDSLTFKEDIQKAQVSGQGDSLHEHIANLAGSPAIKKGILQTVKVVDELVKVMGRHKPENIVIEMARENQTTQKGQKNSRERMKRIEEGIKELGSQILKEHPVENTQLQNEKLYLYYLQNGRDMYVDQELDINRLSDYDVDHIVPQSFLKDDSIDNKVLTRSDKARGKSDNVPSEEVVKKMKNYWRQLLNAKLITQRKFDNLTKAERGGLSELDKAGFIKRQLVETRQITKHVAQILDSRMNTKYDENDKLIREVKVITLKSKLVSDFRKDFQFYKVREINNYHHAHDAYLNAVVGTALIKKYPKLESEFVYGDYKVYDVRKMIAKSEQEIGKATAKYFFYSNIMNFFKTEITLANGEIRKRPLIETNGETGEIVWDKGRDFATVRKVLSMPQVNIVKKTEVQTGGFSKESILPKRNSDKLIARKKDWDPKKYGGFDSPTVAYSVLVVAKVEKGKSKKLKSVKELLGITIMERSSFEKNPIDFLEAKGYKEVKKDLIIKLPKYSLFELENGRKRMLASAGELQKGNELALPSKYVNFLYLASHYEKLKGSPEDNEQKQLFVEQHKHYLDEIIEQISEFSKRVILADANLDKVLSAYNKHRDKPIREQAENIIHLFTLTNLGAPAAFKYFDTTIDRKRYTSTKEVLDATLIHQSITGLYETRIDLSQLGGDGGGGGEAAAKGSSGGTLGDQGSRGSDPLPEPRVTLTVEGIPTEFLVNTGAEHSVLTKPMGKMGSKRTVVAGATGSKVYPWTTKRLLKIGQKQVTHSFLVIPECPAPLLGRDLLTKLKAQIQFSTEGPQVTWEDRPAMCLVLNLEEEYRLHEKPVPPSIDPSWLQLFPMVWAEKAGMGLANQVPPVVVELKSDASPVAVRQYPMSKEAREGIRPHIQRFLDLGILVPCQSPWNTPLLPVKKPGTNDYRPVQDLREVNKRVQDIHPTVPNPYNLLSSLPPSHTWYSVLDLKDAFFCLKLHPNSQPLFAFEWRDPEKGNTGQLTWTRLPQGFKNSPTLFNEALHRDLASFRALNPQVVMLQYVDDLLVAAPTYRDCKEGTRRLLQELSKLGYRVSAKKAQLCREEVTYLGYLLKGGKRWLTPARKATVMKIPTPTTPRQVREFLGKAGFCRLFIPGFASLAAPLYPLTRPKVPFTWTEAHQEAFGRIKEALLSAPALALPDLTKPFALYVDEKEGVARGVLTQTLGPWRRPVAYLSKKLDPVASGWPTCLKAIAAVALLLKDADKLTLGQNVLVIAPHNLESIVRQPPDRWMTNARMTHYQSLLLNERVSFAPPAILNPATLLPVESDDTPIHICSEILAEETGTRPDLRDQPLPGVPAWYTDGSSFIMDGRRQAGAAIVDNKRTVWASNLPEGTSAQKAELIALTQALRLAEGKSINIYTDSRYAFATAHVHGAIYKQRGWLTSAGKDIKNKEEILALLEAIHLPKRVAIIHCPGHQRGTDPVATGNRKADEAAKQAAQSTRILTETTKNAGKRTADGSEFEKRTADGSEFESPKKKAKVE

SEQ ID NO: 1797 - protein, 2215 aa, synthetic construct
MPAAKRVKLDGGDKKYSIGLDIGTNSVGWAVITDEYKVPSKKFKVLGNTDRHSIKKNLIGALLFDSGETAEATRLKRTARRRYTRRKNRICYLQEIFSNEMAKVDDSFFHRLEESFLVEEDKKHERHPIFGNIVDEVAYHEKYPTIYHLRKKLVDSTDKADLRLIYLALAHMIKFRGHFLIEGDLNPDNSDVDKLFIQLVQTYNQLFEENPINASGVDAKAILSARLSKSRRLENLIAQLPGEKKNGLFGNLIALSLGLTPNFKSNFDLAEDAKLQLSKDTYDDDLDNLLAQIGDQYADLFLAAKNLSDAILLSDILRVNTEITKAPLSASMIKRYDEHHQDLTLLKALVRQQLPEKYKEIFFDQSKNGYAGYIDGGASQEEFYKFIKPILEKMDGTEELLVKLNREDLLRKQRTFDNGSIPHQIHLGELHAILRRQEDFYPFLKDNREKIEKILTFRIPYYVGPLARGNSRFAWMTRKSEETITPWNFEEVVDKGASAQSFIERMTNFDKNLPNEKVLPKHSLLYEYFTVYNELTKVKYVTEGMRKPAFLSGEQKKAIVDLLFKTNRKVTVKQLKEDYFKKIECFDSVEISGVEDRFNASLGTYHDLLKIIKDKDFLDNEENEDILEDIVLTLTLFEDREMIEERLKTYAHLFDDKVMKQLKRRRYTGWGRLSRKLINGIRDKQSGKTILDFLKSDGFANRNFMQLIHDDSLTFKEDIQKAQVSGQGDSLHEHIANLAGSPAIKKGILQTVKVVDELVKVMGRHKPENIVIEMARENQTTQKGQKNSRERMKRIEEGIKELGSQILKEHPVENTQLQNEKLYLYYLQNGRDMYVDQELDINRLSDYDVDHIVPQSFLKDDSIDNKVLTRSDKARGKSDNVPSEEVVKKMKNYWRQLLNAKLITQRKFDNLTKAERGGLSELDKAGFIKRQLVETRQITKHVAQILDSRMNTKYDENDKLIREVKVITLKSKLVSDFRKDFQFYKVREINNYHHAHDAYLNAVVGTALIKKYPKLESEFVYGDYKVYDVRKMIAKSEQEIGKATAKYFFYSNIMNFFKTEITLANGEIRKRPLIETNGETGEIVWDKGRDFATVRKVLSMPQVNIVKKTEVQTGGFSKESILPKRNSDKLIARKKDWDPKKYGGFDSPTVAYSVLVVAKVEKGKSKKLKSVKELLGITIMERSSFEKNPIDFLEAKGYKEVKKDLIIKLPKYSLFELENGRKRMLASAGELQKGNELALPSKYVNFLYLASHYEKLKGSPEDNEQKQLFVEQHKHYLDEIIEQISEFSKRVILADANLDKVLSAYNKHRDKPIREQAENIIHLFTLTNLGAPAAFKYFDTTIDRKRYTSTKEVLDATLIHQSITGLYETRIDLSQLGGDGGGSSEAAAKGGTLGDQGSRGSDPLPEPRVTLTVEGIPTEFLVNTGAEHSVLTKPMGKMGSKRTVVAGATGSKVYPWTTKRLLKIGQKQVTHSFLVIPECPAPLLGRDLLTKLKAQIQFSTEGPQVTWEDRPAMCLVLNLEEEYRLHEKPVPPSIDPSWLQLFPMVWAEKAGMGLANQVPPVVVELKSDASPVAVRQYPMSKEAREGIRPHIQRFLDLGILVPCQSPWNTPLLPVKKPGTNDYRPVQDLREVNKRVQDIHPTVPNPYNLLSSLPPSHTWYSVLDLKDAFFCLKLHPNSQPLFAFEWRDPEKGNTGQLTWTRLPQGFKNSPTLFNEALHRDLASFRALNPQVVMLQYVDDLLVAAPTYRDCKEGTRRLLQELSKLGYRVSAKKAQLCREEVTYLGYLLKGGKRWLTPARKATVMKIPTPTTPRQVREFLGKAGFCRLFIPGFASLAAPLYPLTRPKVPFTWTEAHQEAFGRIKEALLSAPALALPDLTKPFALYVDEKEGVARGVLTQTLGPWRRPVAYLSKKLDPVASGWPTCLKAIAAVALLLKDADKLTLGQNVLVIAPHNLESIVRQPPDRWMTNARMTHYQSLLLNERVSFAPPAILNPATLLPVESDDTPIHICSEILAEETGTRPDLRDQPLPGVPAWYTDGSSFIMDGRRQAGAAIVDNKRTVWASNLPEGTSAQKAELIALTQALRLAEGKSINIYTDSRYAFATAHVHGAIYKQRGWLTSAGKDIKNKEEILALLEAIHLPKRVAIIHCPGHQRGTDPVATGNRKADEAAKQAAQSTRILTETTKNAGKRTADGSEFEKRTADGSEFESPKKKAKVE

SEQ ID NO: 1798 - protein, 2211 aa, synthetic construct
MPAAKRVKLDGGDKKYSIGLDIGTNSVGWAVITDEYKVPSKKFKVLGNTDRHSIKKNLIGALLFDSGETAEATRLKRTARRRYTRRKNRICYLQEIFSNEMAKVDDSFFHRLEESFLVEEDKKHERHPIFGNIVDEVAYHEKYPTIYHLRKKLVDSTDKADLRLIYLALAHMIKFRGHFLIEGDLNPDNSDVDKLFIQLVQTYNQLFEENPINASGVDAKAILSARLSKSRRLENLIAQLPGEKKNGLFGNLIALSLGLTPNFKSNFDLAEDAKLQLSKDTYDDDLDNLLAQIGDQYADLFLAAKNLSDAILLSDILRVNTEITKAPLSASMIKRYDEHHQDLTLLKALVRQQLPEKYKEIFFDQSKNGYAGYIDGGASQEEFYKFIKPILEKMDGTEELLVKLNREDLLRKQRTFDNGSIPHQIHLGELHAILRRQEDFYPFLKDNREKIEKILTFRIPYYVGPLARGNSRFAWMTRKSEETITPWNFEEVVDKGASAQSFIERMTNFDKNLPNEKVLPKHSLLYEYFTVYNELTKVKYVTEGMRKPAFLSGEQKKAIVDLLFKTNRKVTVKQLKEDYFKKIECFDSVEISGVEDRFNASLGTYHDLLKIIKDKDFLDNEENEDILEDIVLTLTLFEDREMIEERLKTYAHLFDDKVMKQLKRRRYTGWGRLSRKLINGIRDKQSGKTILDFLKSDGFANRNFMQLIHDDSLTFKEDIQKAQVSGQGDSLHEHIANLAGSPAIKKGILQTVKVVDELVKVMGRHKPENIVIEMARENQTTQKGQKNSRERMKRIEEGIKELGSQILKEHPVENTQLQNEKLYLYYLQNGRDMYVDQELDINRLSDYDVDHIVPQSFLKDDSIDNKVLTRSDKARGKSDNVPSEEVVKKMKNYWRQLLNAKLITQRKFDNLTKAERGGLSELDKAGFIKRQLVETRQITKHVAQILDSRMNTKYDENDKLIREVKVITLKSKLVSDFRKDFQFYKVREINNYHHAHDAYLNAVVGTALIKKYPKLESEFVYGDYKVYDVRKMIAKSEQEIGKATAKYFFYSNIMNFFKTEITLANGEIRKRPLIETNGETGEIVWDKGRDFATVRKVLSMPQVNIVKKTEVQTGGFSKESILPKRNSDKLIARKKDWDPKKYGGFDSPTVAYSVLVVAKVEKGKSKKLKSVKELLGITIMERSSFEKNPIDFLEAKGYKEVKKDLIIKLPKYSLFELENGRKRMLASAGELQKGNELALPSKYVNFLYLASHYEKLKGSPEDNEQKQLFVEQHKHYLDEIIEQISEFSKRVILADANLDKVLSAYNKHRDKPIREQAENIIHLFTLTNLGAPAAFKYFDTTIDRKRYTSTKEVLDATLIHQSITGLYETRIDLSQLGGDGGGGGGGGTLGDQGSRGSDPLPEPRVTLTVEGIPTEFLVNTGAEHSVLTKPMGKMGSKRTVVAGATGSKVYPWTTKRLLKIGQKQVTHSFLVIPECPAPLLGRDLLTKLKAQIQFSTEGPQVTWEDRPAMCLVLNLEEEYRLHEKPVPPSIDPSWLQLFPMVWAEKAGMGLANQVPPVVVELKSDASPVAVRQYPMSKEAREGIRPHIQRFLDLGILVPCQSPWNTPLLPVKKPGTNDYRPVQDLREVNKRVQDIHPTVPNPYNLLSSLPPSHTWYSVLDLKDAFFCLKLHPNSQPLFAFEWRDPEKGNTGQLTWTRLPQGFKNSPTLFNEALHRDLASFRALNPQVVMLQYVDDLLVAAPTYRDCKEGTRRLLQELSKLGYRVSAKKAQLCREEVTYLGYLLKGGKRWLTPARKATVMKIPTPTTPRQVREFLGKAGFCRLFIPGFASLAAPLYPLTRPKVPFTWTEAHQEAFGRIKEALLSAPALALPDLTKPFALYVDEKEGVARGVLTQTLGPWRRPVAYLSKKLDPVASGWPTCLKAIAAVALLLKDADKLTLGQNVLVIAPHNLESIVRQPPDRWMTNARMTHYQSLLLNERVSFAPPAILNPATLLPVESDDTPIHICSEILAEETGTRPDLRDQPLPGVPAWYTDGSSFIMDGRRQAGAAIVDNKRTVWASNLPEGTSAQKAELIALTQALRLAEGKSINIYTDSRYAFATAHVHGAIYKQRGWLTSAGKDIKNKEEILALLEAIHLPKRVAIIHCPGHQRGTDPVATGNRKADEAAKQAAQSTRILTETTKNAGKRTADGSEFEKRTADGSEFESPKKKAKVE

SEQ ID NO: 1799 - protein, 2215 aa, synthetic construct
MPAAKRVKLDGGDKKYSIGLDIGTNSVGWAVITDEYKVPSKKFKVLGNTDRHSIKKNLIGALLFDSGETAEATRLKRTARRRYTRRKNRICYLQEIFSNEMAKVDDSFFHRLEESFLVEEDKKHERHPIFGNIVDEVAYHEKYPTIYHLRKKLVDSTDKADLRLIYLALAHMIKFRGHFLIEGDLNPDNSDVDKLFIQLVQTYNQLFEENPINASGVDAKAILSARLSKSRRLENLIAQLPGEKKNGLFGNLIALSLGLTPNFKSNFDLAEDAKLQLSKDTYDDDLDNLLAQIGDQYADLFLAAKNLSDAILLSDILRVNTEITKAPLSASMIKRYDEHHQDLTLLKALVRQQLPEKYKEIFFDQSKNGYAGYIDGGASQEEFYKFIKPILEKMDGTEELLVKLNREDLLRKQRTFDNGSIPHQIHLGELHAILRRQEDFYPFLKDNREKIEKILTFRIPYYVGPLARGNSRFAWMTRKSEETITPWNFEEVVDKGASAQSFIERMTNFDKNLPNEKVLPKHSLLYEYFTVYNELTKVKYVTEGMRKPAFLSGEQKKAIVDLLFKTNRKVTVKQLKEDYFKKIECFDSVEISGVEDRFNASLGTYHDLLKIIKDKDFLDNEENEDILEDIVLTLTLFEDREMIEERLKTYAHLFDDKVMKQLKRRRYTGWGRLSRKLINGIRDKQSGKTILDFLKSDGFANRNFMQLIHDDSLTFKEDIQKAQVSGQGDSLHEHIANLAGSPAIKKGILQTVKVVDELVKVMGRHKPENIVIEMARENQTTQKGQKNSRERMKRIEEGIKELGSQILKEHPVENTQLQNEKLYLYYLQNGRDMYVDQELDINRLSDYDVDHIVPQSFLKDDSIDNKVLTRSDKARGKSDNVPSEEVVKKMKNYWRQLLNAKLITQRKFDNLTKAERGGLSELDKAGFIKRQLVETRQITKHVAQILDSRMNTKYDENDKLIREVKVITLKSKLVSDFRKDFQFYKVREINNYHHAHDAYLNAVVGTALIKKYPKLESEFVYGDYKVYDVRKMIAKSEQEIGKATAKYFFYSNIMNFFKTEITLANGEIRKRPLIETNGETGEIVWDKGRDFATVRKVLSMPQVNIVKKTEVQTGGFSKESILPKRNSDKLIARKKDWDPKKYGGFDSPTVAYSVLVVAKVEKGKSKKLKSVKELLGITIMERSSFEKNPIDFLEAKGYKEVKKDLIIKLPKYSLFELENGRKRMLASAGELQKGNELALPSKYVNFLYLASHYEKLKGSPEDNEQKQLFVEQHKHYLDEIIEQISEFSKRVILADANLDKVLSAYNKHRDKPIREQAENIIHLFTLTNLGAPAAFKYFDTTIDRKRYTSTKEVLDATLIHQSITGLYETRIDLSQLGGDGGGGGGGGGGGGTLGDQGSRGSDPLPEPRVTLTVEGIPTEFLVNTGAEHSVLTKPMGKMGSKRTVVAGATGSKVYPWTTKRLLKIGQKQVTHSFLVIPECPAPLLGRDLLTKLKAQIQFSTEGPQVTWEDRPAMCLVLNLEEEYRLHEKPVPPSIDPSWLQLFPMVWAEKAGMGLANQVPPVVVELKSDASPVAVRQYPMSKEAREGIRPHIQRFLDLGILVPCQSPWNTPLLPVKKPGTNDYRPVQDLREVNKRVQDIHPTVPNPYNLLSSLPPSHTWYSVLDLKDAFFCLKLHPNSQPLFAFEWRDPEKGNTGQLTWTRLPQGFKNSPTLFNEALHRDLASFRALNPQVVMLQYVDDLLVAAPTYRDCKEGTRRLLQELSKLGYRVSAKKAQLCREEVTYLGYLLKGGKRWLTPARKATVMKIPTPTTPRQVREFLGKAGFCRLFIPGFASLAAPLYPLTRPKVPFTWTEAHQEAFGRIKEALLSAPALALPDLTKPFALYVDEKEGVARGVLTQTLGPWRRPVAYLSKKLDPVASGWPTCLKAIAAVALLLKDADKLTLGQNVLVIAPHNLESIVRQPPDRWMTNARMTHYQSLLLNERVSFAPPAILNPATLLPVESDDTPIHICSEILAEETGTRPDLRDQPLPGVPAWYTDGSSFIMDGRRQAGAAIVDNKRTVWASNLPEGTSAQKAELIALTQALRLAEGKSINIYTDSRYAFATAHVHGAIYKQRGWLTSAGKDIKNKEEILALLEAIHLPKRVAIIHCPGHQRGTDPVATGNRKADEAAKQAAQSTRILTETTKNAGKRTADGSEFEKRTADGSEFESPKKKAKVE

SEQ ID NO: 1800 - protein, 2223 aa, synthetic construct
MPAAKRVKLDGGDKKYSIGLDIGTNSVGWAVITDEYKVPSKKFKVLGNTDRHSIKKNLIGALLFDSGETAEATRLKRTARRRYTRRKNRICYLQEIFSNEMAKVDDSFFHRLEESFLVEEDKKHERHPIFGNIVDEVAYHEKYPTIYHLRKKLVDSTDKADLRLIYLALAHMIKFRGHFLIEGDLNPDNSDVDKLFIQLVQTYNQLFEENPINASGVDAKAILSARLSKSRRLENLIAQLPGEKKNGLFGNLIALSLGLTPNFKSNFDLAEDAKLQLSKDTYDDDLDNLLAQIGDQYADLFLAAKNLSDAILLSDILRVNTEITKAPLSASMIKRYDEHHQDLTLLKALVRQQLPEKYKEIFFDQSKNGYAGYIDGGASQEEFYKFIKPILEKMDGTEELLVKLNREDLLRKQRTFDNGSIPHQIHLGELHAILRRQEDFYPFLKDNREKIEKILTFRIPYYVGPLARGNSRFAWMTRKSEETITPWNFEEVVDKGASAQSFIERMTNFDKNLPNEKVLPKHSLLYEYFTVYNELTKVKYVTEGMRKPAFLSGEQKKAIVDLLFKTNRKVTVKQLKEDYFKKIECFDSVEISGVEDRFNASLGTYHDLLKIIKDKDFLDNEENEDILEDIVLTLTLFEDREMIEERLKTYAHLFDDKVMKQLKRRRYTGWGRLSRKLINGIRDKQSGKTILDFLKSDGFANRNFMQLIHDDSLTFKEDIQKAQVSGQGDSLHEHIANLAGSPAIKKGILQTVKVVDELVKVMGRHKPENIVIEMARENQTTQKGQKNSRERMKRIEEGIKELGSQILKEHPVENTQLQNEKLYLYYLQNGRDMYVDQELDINRLSDYDVDHIVPQSFLKDDSIDNKVLTRSDKARGKSDNVPSEEVVKKMKNYWRQLLNAKLITQRKFDNLTKAERGGLSELDKAGFIKRQLVETRQITKHVAQILDSRMNTKYDENDKLIREVKVITLKSKLVSDFRKDFQFYKVREINNYHHAHDAYLNAVVGTALIKKYPKLESEFVYGDYKVYDVRKMIAKSEQEIGKATAKYFFYSNIMNFFKTEITLANGEIRKRPLIETNGETGEIVWDKGRDFATVRKVLSMPQVNIVKKTEVQTGGFSKESILPKRNSDKLIARKKDWDPKKYGGFDSPTVAYSVLVVAKVEKGKSKKLKSVKELLGITIMERSSFEKNPIDFLEAKGYKEVKKDLIIKLPKYSLFELENGRKRMLASAGELQKGNELALPSKYVNFLYLASHYEKLKGSPEDNEQKQLFVEQHKHYLDEIIEQISEFSKRVILADANLDKVLSAYNKHRDKPIREQAENIIHLFTLTNLGAPAAFKYFDTTIDRKRYTSTKEVLDATLIHQSITGLYETRIDLSQLGGDGGSGSETPGTSESATPESGGTLGDQGSRGSDPLPEPRVTLTVEGIPTEFLVNTGAEHSVLTKPMGKMGSKRTVVAGATGSKVYPWTTKRLLKIGQKQVTHSFLVIPECPAPLLGRDLLTKLKAQIQFSTEGPQVTWEDRPAMCLVLNLEEEYRLHEKPVPPSIDPSWLQLFPMVWAEKAGMGLANQVPPVVVELKSDASPVAVRQYPMSKEAREGIRPHIQRFLDLGILVPCQSPWNTPLLPVKKPGTNDYRPVQDLREVNKRVQDIHPTVPNPYNLLSSLPPSHTWYSVLDLKDAFFCLKLHPNSQPLFAFEWRDPEKGNTGQLTWTRLPQGFKNSPTLFNEALHRDLASFRALNPQVVMLQYVDDLLVAAPTYRDCKEGTRRLLQELSKLGYRVSAKKAQLCREEVTYLGYLLKGGKRWLTPARKATVMKIPTPTTPRQVREFLGKAGFCRLFIPGFASLAAPLYPLTRPKVPFTWTEAHQEAFGRIKEALLSAPALALPDLTKPFALYVDEKEGVARGVLTQTLGPWRRPVAYLSKKLDPVASGWPTCLKAIAAVALLLKDADKLTLGQNVLVIAPHNLESIVRQPPDRWMTNARMTHYQSLLLNERVSFAPPAILNPATLLPVESDDTPIHICSEILAEETGTRPDLRDQPLPGVPAWYTDGSSFIMDGRRQAGAAIVDNKRTVWASNLPEGTSAQKAELIALTQALRLAEGKSINIYTDSRYAFATAHVHGAIYKQRGWLTSAGKDIKNKEEILALLEAIHLPKRVAIIHCPGHQRGTDPVATGNRKADEAAKQAAQSTRILTETTKNAGKRTADGSEFEKRTADGSEFESPKKKAKVE

SEQ ID NO: 1801 - protein, 2218 aa, synthetic construct
MPAAKRVKLDGGDKKYSIGLDIGTNSVGWAVITDEYKVPSKKFKVLGNTDRHSIKKNLIGALLFDSGETAEATRLKRTARRRYTRRKNRICYLQEIFSNEMAKVDDSFFHRLEESFLVEEDKKHERHPIFGNIVDEVAYHEKYPTIYHLRKKLVDSTDKADLRLIYLALAHMIKFRGHFLIEGDLNPDNSDVDKLFIQLVQTYNQLFEENPINASGVDAKAILSARLSKSRRLENLIAQLPGEKKNGLFGNLIALSLGLTPNFKSNFDLAEDAKLQLSKDTYDDDLDNLLAQIGDQYADLFLAAKNLSDAILLSDILRVNTEITKAPLSASMIKRYDEHHQDLTLLKALVRQQLPEKYKEIFFDQSKNGYAGYIDGGASQEEFYKFIKPILEKMDGTEELLVKLNREDLLRKQRTFDNGSIPHQIHLGELHAILRRQEDFYPFLKDNREKIEKILTFRIPYYVGPLARGNSRFAWMTRKSEETITPWNFEEVVDKGASAQSFIERMTNFDKNLPNEKVLPKHSLLYEYFTVYNELTKVKYVTEGMRKPAFLSGEQKKAIVDLLFKTNRKVTVKQLKEDYFKKIECFDSVEISGVEDRFNASLGTYHDLLKIIKDKDFLDNEENEDILEDIVLTLTLFEDREMIEERLKTYAHLFDDKVMKQLKRRRYTGWGRLSRKLINGIRDKQSGKTILDFLKSDGFANRNFMQLIHDDSLTFKEDIQKAQVSGQGDSLHEHIANLAGSPAIKKGILQTVKVVDELVKVMGRHKPENIVIEMARENQTTQKGQKNSRERMKRIEEGIKELGSQILKEHPVENTQLQNEKLYLYYLQNGRDMYVDQELDINRLSDYDVDHIVPQSFLKDDSIDNKVLTRSDKARGKSDNVPSEEVVKKMKNYWRQLLNAKLITQRKFDNLTKAERGGLSELDKAGFIKRQLVETRQITKHVAQILDSRMNTKYDENDKLIREVKVITLKSKLVSDFRKDFQFYKVREINNYHHAHDAYLNAVVGTALIKKYPKLESEFVYGDYKVYDVRKMIAKSEQEIGKATAKYFFYSNIMNFFKTEITLANGEIRKRPLIETNGETGEIVWDKGRDFATVRKVLSMPQVNIVKKTEVQTGGFSKESILPKRNSDKLIARKKDWDPKKYGGFDSPTVAYSVLVVAKVEKGKSKKLKSVKELLGITIMERSSFEKNPIDFLEAKGYKEVKKDLIIKLPKYSLFELENGRKRMLASAGELQKGNELALPSKYVNFLYLASHYEKLKGSPEDNEQKQLFVEQHKHYLDEIIEQISEFSKRVILADANLDKVLSAYNKHRDKPIREQAENIIHLFTLTNLGAPAAFKYFDTTIDRKRYTSTKEVLDATLIHQSITGLYETRIDLSQLGGDGGGSSGGSEAAAKGGTLGDQGSRGSDPLPEPRVTLTVEGIPTEFLVNTGAEHSVLTKPMGKMGSKRTVVAGATGSKVYPWTTKRLLKIGQKQVTHSFLVIPECPAPLLGRDLLTKLKAQIQFSTEGPQVTWEDRPAMCLVLNLEEEYRLHEKPVPPSIDPSWLQLFPMVWAEKAGMGLANQVPPVVVELKSDASPVAVRQYPMSKEAREGIRPHIQRFLDLGILVPCQSPWNTPLLPVKKPGTNDYRPVQDLREVNKRVQDIHPTVPNPYNLLSSLPPSHTWYSVLDLKDAFFCLKLHPNSQPLFAFEWRDPEKGNTGQLTWTRLPQGFKNSPTLFNEALHRDLASFRALNPQVVMLQYVDDLLVAAPTYRDCKEGTRRLLQELSKLGYRVSAKKAQLCREEVTYLGYLLKGGKRWLTPARKATVMKIPTPTTPRQVREFLGKAGFCRLFIPGFASLAAPLYPLTRPKVPFTWTEAHQEAFGRIKEALLSAPALALPDLTKPFALYVDEKEGVARGVLTQTLGPWRRPVAYLSKKLDPVASGWPTCLKAIAAVALLLKDADKLTLGQNVLVIAPHNLESIVRQPPDRWMTNARMTHYQSLLLNERVSFAPPAILNPATLLPVESDDTPIHICSEILAEETGTRPDLRDQPLPGVPAWYTDGSSFIMDGRRQAGAAIVDNKRTVWASNLPEGTSAQKAELIALTQALRLAEGKSINIYTDSRYAFATAHVHGAIYKQRGWLTSAGKDIKNKEEILALLEAIHLPKRVAIIHCPGHQRGTDPVATGNRKADEAAKQAAQSTRILTETTKNAGKRTADGSEFEKRTADGSEFESPKKKAKVE

SEQ ID NO: 1802 - protein, 2216 aa, synthetic construct
MPAAKRVKLDGGDKKYSIGLDIGTNSVGWAVITDEYKVPSKKFKVLGNTDRHSIKKNLIGALLFDSGETAEATRLKRTARRRYTRRKNRICYLQEIFSNEMAKVDDSFFHRLEESFLVEEDKKHERHPIFGNIVDEVAYHEKYPTIYHLRKKLVDSTDKADLRLIYLALAHMIKFRGHFLIEGDLNPDNSDVDKLFIQLVQTYNQLFEENPINASGVDAKAILSARLSKSRRLENLIAQLPGEKKNGLFGNLIALSLGLTPNFKSNFDLAEDAKLQLSKDTYDDDLDNLLAQIGDQYADLFLAAKNLSDAILLSDILRVNTEITKAPLSASMIKRYDEHHQDLTLLKALVRQQLPEKYKEIFFDQSKNGYAGYIDGGASQEEFYKFIKPILEKMDGTEELLVKLNREDLLRKQRTFDNGSIPHQIHLGELHAILRRQEDFYPFLKDNREKIEKILTFRIPYYVGPLARGNSRFAWMTRKSEETITPWNFEEVVDKGASAQSFIERMTNFDKNLPNEKVLPKHSLLYEYFTVYNELTKVKYVTEGMRKPAFLSGEQKKAIVDLLFKTNRKVTVKQLKEDYFKKIECFDSVEISGVEDRFNASLGTYHDLLKIIKDKDFLDNEENEDILEDIVLTLTLFEDREMIEERLKTYAHLFDDKVMKQLKRRRYTGWGRLSRKLINGIRDKQSGKTILDFLKSDGFANRNFMQLIHDDSLTFKEDIQKAQVSGQGDSLHEHIANLAGSPAIKKGILQTVKVVDELVKVMGRHKPENIVIEMARENQTTQKGQKNSRERMKRIEEGIKELGSQILKEHPVENTQLQNEKLYLYYLQNGRDMYVDQELDINRLSDYDVDHIVPQSFLKDDSIDNKVLTRSDKARGKSDNVPSEEVVKKMKNYWRQLLNAKLITQRKFDNLTKAERGGLSELDKAGFIKRQLVETRQITKHVAQILDSRMNTKYDENDKLIREVKVITLKSKLVSDFRKDFQFYKVREINNYHHAHDAYLNAVVGTALIKKYPKLESEFVYGDYKVYDVRKMIAKSEQEIGKATAKYFFYSNIMNFFKTEITLANGEIRKRPLIETNGETGEIVWDKGRDFATVRKVLSMPQVNIVKKTEVQTGGFSKESILPKRNSDKLIARKKDWDPKKYGGFDSPTVAYSVLVVAKVEKGKSKKLKSVKELLGITIMERSSFEKNPIDFLEAKGYKEVKKDLIIKLPKYSLFELENGRKRMLASAGELQKGNELALPSKYVNFLYLASHYEKLKGSPEDNEQKQLFVEQHKHYLDEIIEQISEFSKRVILADANLDKVLSAYNKHRDKPIREQAENIIHLFTLTNLGAPAAFKYFDTTIDRKRYTSTKEVLDATLIHQSITGLYETRIDLSQLGGDGGGGSPAPGSSGGTLGDQGSRGSDPLPEPRVTLTVEGIPTEFLVNTGAEHSVLTKPMGKMGSKRTVVAGATGSKVYPWTTKRLLKIGQKQVTHSFLVIPECPAPLLGRDLLTKLKAQIQFSTEGPQVTWEDRPAMCLVLNLEEEYRLHEKPVPPSIDPSWLQLFPMVWAEKAGMGLANQVPPVVVELKSDASPVAVRQYPMSKEAREGIRPHIQRFLDLGILVPCQSPWNTPLLPVKKPGTNDYRPVQDLREVNKRVQDIHPTVPNPYNLLSSLPPSHTWYSVLDLKDAFFCLKLHPNSQPLFAFEWRDPEKGNTGQLTWTRLPQGFKNSPTLFNEALHRDLASFRALNPQVVMLQYVDDLLVAAPTYRDCKEGTRRLLQELSKLGYRVSAKKAQLCREEVTYLGYLLKGGKRWLTPARKATVMKIPTPTTPRQVREFLGKAGFCRLFIPGFASLAAPLYPLTRPKVPFTWTEAHQEAFGRIKEALLSAPALALPDLTKPFALYVDEKEGVARGVLTQTLGPWRRPVAYLSKKLDPVASGWPTCLKAIAAVALLLKDADKLTLGQNVLVIAPHNLESIVRQPPDRWMTNARMTHYQSLLLNERVSFAPPAILNPATLLPVESDDTPIHICSEILAEETGTRPDLRDQPLPGVPAWYTDGSSFIMDGRRQAGAAIVDNKRTVWASNLPEGTSAQKAELIALTQALRLAEGKSINIYTDSRYAFATAHVHGAIYKQRGWLTSAGKDIKNKEEILALLEAIHLPKRVAIIHCPGHQRGTDPVATGNRKADEAAKQAAQSTRILTETTKNAGKRTADGSEFEKRTADGSEFESPKKKAKVE

SEQ ID NO: 1803 - protein, 2237 aa, synthetic construct
MPAAKRVKLDGGDKKYSIGLDIGTNSVGWAVITDEYKVPSKKFKVLGNTDRHSIKKNLIGALLFDSGETAEATRLKRTARRRYTRRKNRICYLQEIFSNEMAKVDDSFFHRLEESFLVEEDKKHERHPIFGNIVDEVAYHEKYPTIYHLRKKLVDSTDKADLRLIYLALAHMIKFRGHFLIEGDLNPDNSDVDKLFIQLVQTYNQLFEENPINASGVDAKAILSARLSKSRRLENLIAQLPGEKKNGLFGNLIALSLGLTPNFKSNFDLAEDAKLQLSKDTYDDDLDNLLAQIGDQYADLFLAAKNLSDAILLSDILRVNTEITKAPLSASMIKRYDEHHQDLTLLKALVRQQLPEKYKEIFFDQSKNGYAGYIDGGASQEEFYKFIKPILEKMDGTEELLVKLNREDLLRKQRTFDNGSIPHQIHLGELHAILRRQEDFYPFLKDNREKIEKILTFRIPYYVGPLARGNSRFAWMTRKSEETITPWNFEEVVDKGASAQSFIERMTNFDKNLPNEKVLPKHSLLYEYFTVYNELTKVKYVTEGMRKPAFLSGEQKKAIVDLLFKTNRKVTVKQLKEDYFKKIECFDSVEISGVEDRFNASLGTYHDLLKIIKDKDFLDNEENEDILEDIVLTLTLFEDREMIEERLKTYAHLFDDKVMKQLKRRRYTGWGRLSRKLINGIRDKQSGKTILDFLKSDGFANRNFMQLIHDDSLTFKEDIQKAQVSGQGDSLHEHIANLAGSPAIKKGILQTVKVVDELVKVMGRHKPENIVIEMARENQTTQKGQKNSRERMKRIEEGIKELGSQILKEHPVENTQLQNEKLYLYYLQNGRDMYVDQELDINRLSDYDVDHIVPQSFLKDDSIDNKVLTRSDKARGKSDNVPSEEVVKKMKNYWRQLLNAKLITQRKFDNLTKAERGGLSELDKAGFIKRQLVETRQITKHVAQILDSRMNTKYDENDKLIREVKVITLKSKLVSDFRKDFQFYKVREINNYHHAHDAYLNAVVGTALIKKYPKLESEFVYGDYKVYDVRKMIAKSEQEIGKATAKYFFYSNIMNFFKTEITLANGEIRKRPLIETNGETGEIVWDKGRDFATVRKVLSMPQVNIVKKTEVQTGGFSKESILPKRNSDKLIARKKDWDPKKYGGFDSPTVAYSVLVVAKVEKGKSKKLKSVKELLGITIMERSSFEKNPIDFLEAKGYKEVKKDLIIKLPKYSLFELENGRKRMLASAGELQKGNELALPSKYVNFLYLASHYEKLKGSPEDNEQKQLFVEQHKHYLDEIIEQISEFSKRVILADANLDKVLSAYNKHRDKPIREQAENIIHLFTLTNLGAPAAFKYFDTTIDRKRYTSTKEVLDATLIHQSITGLYETRIDLSQLGGDGGGGGGSGGGGSGGGGSGGGGSGGGGSGGGGSGGTLGDQGSRGSDPLPEPRVTLTVEGIPTEFLVNTGAEHSVLTKPMGKMGSKRTVVAGATGSKVYPWTTKRLLKIGQKQVTHSFLVIPECPAPLLGRDLLTKLKAQIQFSTEGPQVTWEDRPAMCLVLNLEEEYRLHEKPVPPSIDPSWLQLFPMVWAEKAGMGLANQVPPVVVELKSDASPVAVRQYPMSKEAREGIRPHIQRFLDLGILVPCQSPWNTPLLPVKKPGTNDYRPVQDLREVNKRVQDIHPTVPNPYNLLSSLPPSHTWYSVLDLKDAFFCLKLHPNSQPLFAFEWRDPEKGNTGQLTWTRLPQGFKNSPTLFNEALHRDLASFRALNPQVVMLQYVDDLLVAAPTYRDCKEGTRRLLQELSKLGYRVSAKKAQLCREEVTYLGYLLKGGKRWLTPARKATVMKIPTPTTPRQVREFLGKAGFCRLFIPGFASLAAPLYPLTRPKVPFTWTEAHQEAFGRIKEALLSAPALALPDLTKPFALYVDEKEGVARGVLTQTLGPWRRPVAYLSKKLDPVASGWPTCLKAIAAVALLLKDADKLTLGQNVLVIAPHNLESIVRQPPDRWMTNARMTHYQSLLLNERVSFAPPAILNPATLLPVESDDTPIHICSEILAEETGTRPDLRDQPLPGVPAWYTDGSSFIMDGRRQAGAAIVDNKRTVWASNLPEGTSAQKAELIALTQALRLAEGKSINIYTDSRYAFATAHVHGAIYKQRGWLTSAGKDIKNKEEILALLEAIHLPKRVAIIHCPGHQRGTDPVATGNRKADEAAKQAAQSTRILTETTKNAGKRTADGSEFEKRTADGSEFESPKKKAKVE

SEQ ID NO: 1804 - protein, 2218 aa, synthetic construct
MPAAKRVKLDGGDKKYSIGLDIGTNSVGWAVITDEYKVPSKKFKVLGNTDRHSIKKNLIGALLFDSGETAEATRLKRTARRRYTRRKNRICYLQEIFSNEMAKVDDSFFHRLEESFLVEEDKKHERHPIFGNIVDEVAYHEKYPTIYHLRKKLVDSTDKADLRLIYLALAHMIKFRGHFLIEGDLNPDNSDVDKLFIQLVQTYNQLFEENPINASGVDAKAILSARLSKSRRLENLIAQLPGEKKNGLFGNLIALSLGLTPNFKSNFDLAEDAKLQLSKDTYDDDLDNLLAQIGDQYADLFLAAKNLSDAILLSDILRVNTEITKAPLSASMIKRYDEHHQDLTLLKALVRQQLPEKYKEIFFDQSKNGYAGYIDGGASQEEFYKFIKPILEKMDGTEELLVKLNREDLLRKQRTFDNGSIPHQIHLGELHAILRRQEDFYPFLKDNREKIEKILTFRIPYYVGPLARGNSRFAWMTRKSEETITPWNFEEVVDKGASAQSFIERMTNFDKNLPNEKVLPKHSLLYEYFTVYNELTKVKYVTEGMRKPAFLSGEQKKAIVDLLFKTNRKVTVKQLKEDYFKKIECFDSVEISGVEDRFNASLGTYHDLLKIIKDKDFLDNEENEDILEDIVLTLTLFEDREMIEERLKTYAHLFDDKVMKQLKRRRYTGWGRLSRKLINGIRDKQSGKTILDFLKSDGFANRNFMQLIHDDSLTFKEDIQKAQVSGQGDSLHEHIANLAGSPAIKKGILQTVKVVDELVKVMGRHKPENIVIEMARENQTTQKGQKNSRERMKRIEEGIKELGSQILKEHPVENTQLQNEKLYLYYLQNGRDMYVDQELDINRLSDYDVDHIVPQSFLKDDSIDNKVLTRSDKARGKSDNVPSEEVVKKMKNYWRQLLNAKLITQRKFDNLTKAERGGLSELDKAGFIKRQLVETRQITKHVAQILDSRMNTKYDENDKLIREVKVITLKSKLVSDFRKDFQFYKVREINNYHHAHDAYLNAVVGTALIKKYPKLESEFVYGDYKVYDVRKMIAKSEQEIGKATAKYFFYSNIMNFFKTEITLANGEIRKRPLIETNGETGEIVWDKGRDFATVRKVLSMPQVNIVKKTEVQTGGFSKESILPKRNSDKLIARKKDWDPKKYGGFDSPTVAYSVLVVAKVEKGKSKKLKSVKELLGITIMERSSFEKNPIDFLEAKGYKEVKKDLIIKLPKYSLFELENGRKRMLASAGELQKGNELALPSKYVNFLYLASHYEKLKGSPEDNEQKQLFVEQHKHYLDEIIEQISEFSKRVILADANLDKVLSAYNKHRDKPIREQAENIIHLFTLTNLGAPAAFKYFDTTIDRKRYTSTKEVLDATLIHQSITGLYETRIDLSQLGGDGGEAAAKGSSPAPGGTLGDQGSRGSDPLPEPRVTLTVEGIPTEFLVNTGAEHSVLTKPMGKMGSKRTVVAGATGSKVYPWTTKRLLKIGQKQVTHSFLVIPECPAPLLGRDLLTKLKAQIQFSTEGPQVTWEDRPAMCLVLNLEEEYRLHEKPVPPSIDPSWLQLFPMVWAEKAGMGLANQVPPVVVELKSDASPVAVRQYPMSKEAREGIRPHIQRFLDLGILVPCQSPWNTPLLPVKKPGTNDYRPVQDLREVNKRVQDIHPTVPNPYNLLSSLPPSHTWYSVLDLKDAFFCLKLHPNSQPLFAFEWRDPEKGNTGQLTWTRLPQGFKNSPTLFNEALHRDLASFRALNPQVVMLQYVDDLLVAAPTYRDCKEGTRRLLQELSKLGYRVSAKKAQLCREEVTYLGYLLKGGKRWLTPARKATVMKIPTPTTPRQVREFLGKAGFCRLFIPGFASLAAPLYPLTRPKVPFTWTEAHQEAFGRIKEALLSAPALALPDLTKPFALYVDEKEGVARGVLTQTLGPWRRPVAYLSKKLDPVASGWPTCLKAIAAVALLLKDADKLTLGQNVLVIAPHNLESIVRQPPDRWMTNARMTHYQSLLLNERVSFAPPAILNPATLLPVESDDTPIHICSEILAEETGTRPDLRDQPLPGVPAWYTDGSSFIMDGRRQAGAAIVDNKRTVWASNLPEGTSAQKAELIALTQALRLAEGKSINIYTDSRYAFATAHVHGAIYKQRGWLTSAGKDIKNKEEILALLEAIHLPKRVAIIHCPGHQRGTDPVATGNRKADEAAKQAAQSTRILTETTKNAGKRTADGSEFEKRTADGSEFESPKKKAKVE

SEQ ID NO: 1805 - protein, 2218 aa, synthetic construct
MPAAKRVKLDGGDKKYSIGLDIGTNSVGWAVITDEYKVPSKKFKVLGNTDRHSIKKNLIGALLFDSGETAEATRLKRTARRRYTRRKNRICYLQEIFSNEMAKVDDSFFHRLEESFLVEEDKKHERHPIFGNIVDEVAYHEKYPTIYHLRKKLVDSTDKADLRLIYLALAHMIKFRGHFLIEGDLNPDNSDVDKLFIQLVQTYNQLFEENPINASGVDAKAILSARLSKSRRLENLIAQLPGEKKNGLFGNLIALSLGLTPNFKSNFDLAEDAKLQLSKDTYDDDLDNLLAQIGDQYADLFLAAKNLSDAILLSDILRVNTEITKAPLSASMIKRYDEHHQDLTLLKALVRQQLPEKYKEIFFDQSKNGYAGYIDGGASQEEFYKFIKPILEKMDGTEELLVKLNREDLLRKQRTFDNGSIPHQIHLGELHAILRRQEDFYPFLKDNREKIEKILTFRIPYYVGPLARGNSRFAWMTRKSEETITPWNFEEVVDKGASAQSFIERMTNFDKNLPNEKVLPKHSLLYEYFTVYNELTKVKYVTEGMRKPAFLSGEQKKAIVDLLFKTNRKVTVKQLKEDYFKKIECFDSVEISGVEDRFNASLGTYHDLLKIIKDKDFLDNEENEDILEDIVLTLTLFEDREMIEERLKTYAHLFDDKVMKQLKRRRYTGWGRLSRKLINGIRDKQSGKTILDFLKSDGFANRNFMQLIHDDSLTFKEDIQKAQVSGQGDSLHEHIANLAGSPAIKKGILQTVKVVDELVKVMGRHKPENIVIEMARENQTTQKGQKNSRERMKRIEEGIKELGSQILKEHPVENTQLQNEKLYLYYLQNGRDMYVDQELDINRLSDYDVDHIVPQSFLKDDSIDNKVLTRSDKARGKSDNVPSEEVVKKMKNYWRQLLNAKLITQRKFDNLTKAERGGLSELDKAGFIKRQLVETRQITKHVAQILDSRMNTKYDENDKLIREVKVITLKSKLVSDFRKDFQFYKVREINNYHHAHDAYLNAVVGTALIKKYPKLESEFVYGDYKVYDVRKMIAKSEQEIGKATAKYFFYSNIMNFFKTEITLANGEIRKRPLIETNGETGEIVWDKGRDFATVRKVLSMPQVNIVKKTEVQTGGFSKESILPKRNSDKLIARKKDWDPKKYGGFDSPTVAYSVLVVAKVEKGKSKKLKSVKELLGITIMERSSFEKNPIDFLEAKGYKEVKKDLIIKLPKYSLFELENGRKRMLASAGELQKGNELALPSKYVNFLYLASHYEKLKGSPEDNEQKQLFVEQHKHYLDEIIEQISEFSKRVILADANLDKVLSAYNKHRDKPIREQAENIIHLFTLTNLGAPAAFKYFDTTIDRKRYTSTKEVLDATLIHQSITGLYETRIDLSQLGGDGGGGSGSSEAAAKGGTLGDQGSRGSDPLPEPRVTLTVEGIPTEFLVNTGAEHSVLTKPMGKMGSKRTVVAGATGSKVYPWTTKRLLKIGQKQVTHSFLVIPECPAPLLGRDLLTKLKAQIQFSTEGPQVTWEDRPAMCLVLNLEEEYRLHEKPVPPSIDPSWLQLFPMVWAEKAGMGLANQVPPVVVELKSDASPVAVRQYPMSKEAREGIRPHIQRFLDLGILVPCQSPWNTPLLPVKKPGTNDYRPVQDLREVNKRVQDIHPTVPNPYNLLSSLPPSHTWYSVLDLKDAFFCLKLHPNSQPLFAFEWRDPEKGNTGQLTWTRLPQGFKNSPTLFNEALHRDLASFRALNPQVVMLQYVDDLLVAAPTYRDCKEGTRRLLQELSKLGYRVSAKKAQLCREEVTYLGYLLKGGKRWLTPARKATVMKIPTPTTPRQVREFLGKAGFCRLFIPGFASLAAPLYPLTRPKVPFTWTEAHQEAFGRIKEALLSAPALALPDLTKPFALYVDEKEGVARGVLTQTLGPWRRPVAYLSKKLDPVASGWPTCLKAIAAVALLLKDADKLTLGQNVLVIAPHNLESIVRQPPDRWMTNARMTHYQSLLLNERVSFAPPAILNPATLLPVESDDTPIHICSEILAEETGTRPDLRDQPLPGVPAWYTDGSSFIMDGRRQAGAAIVDNKRTVWASNLPEGTSAQKAELIALTQALRLAEGKSINIYTDSRYAFATAHVHGAIYKQRGWLTSAGKDIKNKEEILALLEAIHLPKRVAIIHCPGHQRGTDPVATGNRKADEAAKQAAQSTRILTETTKNAGKRTADGSEFEKRTADGSEFESPKKKAKVE

SEQ ID NO: 1806 - protein, 2216 aa, synthetic construct
MPAAKRVKLDGGDKKYSIGLDIGTNSVGWAVITDEYKVPSKKFKVLGNTDRHSIKKNLIGALLFDSGETAEATRLKRTARRRYTRRKNRICYLQEIFSNEMAKVDDSFFHRLEESFLVEEDKKHERHPIFGNIVDEVAYHEKYPTIYHLRKKLVDSTDKADLRLIYLALAHMIKFRGHFLIEGDLNPDNSDVDKLFIQLVQTYNQLFEENPINASGVDAKAILSARLSKSRRLENLIAQLPGEKKNGLFGNLIALSLGLTPNFKSNFDLAEDAKLQLSKDTYDDDLDNLLAQIGDQYADLFLAAKNLSDAILLSDILRVNTEITKAPLSASMIKRYDEHHQDLTLLKALVRQQLPEKYKEIFFDQSKNGYAGYIDGGASQEEFYKFIKPILEKMDGTEELLVKLNREDLLRKQRTFDNGSIPHQIHLGELHAILRRQEDFYPFLKDNREKIEKILTFRIPYYVGPLARGNSRFAWMTRKSEETITPWNFEEVVDKGASAQSFIERMTNFDKNLPNEKVLPKHSLLYEYFTVYNELTKVKYVTEGMRKPAFLSGEQKKAIVDLLFKTNRKVTVKQLKEDYFKKIECFDSVEISGVEDRFNASLGTYHDLLKIIKDKDFLDNEENEDILEDIVLTLTLFEDREMIEERLKTYAHLFDDKVMKQLKRRRYTGWGRLSRKLINGIRDKQSGKTILDFLKSDGFANRNFMQLIHDDSLTFKEDIQKAQVSGQGDSLHEHIANLAGSPAIKKGILQTVKVVDELVKVMGRHKPENIVIEMARENQTTQKGQKNSRERMKRIEEGIKELGSQILKEHPVENTQLQNEKLYLYYLQNGRDMYVDQELDINRLSDYDVDHIVPQSFLKDDSIDNKVLTRSDKARGKSDNVPSEEVVKKMKNYWRQLLNAKLITQRKFDNLTKAERGGLSELDKAGFIKRQLVETRQITKHVAQILDSRMNTKYDENDKLIREVKVITLKSKLVSDFRKDFQFYKVREINNYHHAHDAYLNAVVGTALIKKYPKLESEFVYGDYKVYDVRKMIAKSEQEIGKATAKYFFYSNIMNFFKTEITLANGEIRKRPLIETNGETGEIVWDKGRDFATVRKVLSMPQVNIVKKTEVQTGGFSKESILPKRNSDKLIARKKDWDPKKYGGFDSPTVAYSVLVVAKVEKGKSKKLKSVKELLGITIMERSSFEKNPIDFLEAKGYKEVKKDLIIKLPKYSLFELENGRKRMLASAGELQKGNELALPSKYVNFLYLASHYEKLKGSPEDNEQKQLFVEQHKHYLDEIIEQISEFSKRVILADANLDKVLSAYNKHRDKPIREQAENIIHLFTLTNLGAPAAFKYFDTTIDRKRYTSTKEVLDATLIHQSITGLYETRIDLSQLGGDGGPAPGSSGGGGGTLGDQGSRGSDPLPEPRVTLTVEGIPTEFLVNTGAEHSVLTKPMGKMGSKRTVVAGATGSKVYPWTTKRLLKIGQKQVTHSFLVIPECPAPLLGRDLLTKLKAQIQFSTEGPQVTWEDRPAMCLVLNLEEEYRLHEKPVPPSIDPSWLQLFPMVWAEKAGMGLANQVPPVVVELKSDASPVAVRQYPMSKEAREGIRPHIQRFLDLGILVPCQSPWNTPLLPVKKPGTNDYRPVQDLREVNKRVQDIHPTVPNPYNLLSSLPPSHTWYSVLDLKDAFFCLKLHPNSQPLFAFEWRDPEKGNTGQLTWTRLPQGFKNSPTLFNEALHRDLASFRALNPQVVMLQYVDDLLVAAPTYRDCKEGTRRLLQELSKLGYRVSAKKAQLCREEVTYLGYLLKGGKRWLTPARKATVMKIPTPTTPRQVREFLGKAGFCRLFIPGFASLAAPLYPLTRPKVPFTWTEAHQEAFGRIKEALLSAPALALPDLTKPFALYVDEKEGVARGVLTQTLGPWRRPVAYLSKKLDPVASGWPTCLKAIAAVALLLKDADKLTLGQNVLVIAPHNLESIVRQPPDRWMTNARMTHYQSLLLNERVSFAPPAILNPATLLPVESDDTPIHICSEILAEETGTRPDLRDQPLPGVPAWYTDGSSFIMDGRRQAGAAIVDNKRTVWASNLPEGTSAQKAELIALTQALRLAEGKSINIYTDSRYAFATAHVHGAIYKQRGWLTSAGKDIKNKEEILALLEAIHLPKRVAIIHCPGHQRGTDPVATGNRKADEAAKQAAQSTRILTETTKNAGKRTADGSEFEKRTADGSEFESPKKKAKVE

SEQ ID NO: 1807 - protein, 2213 aa, synthetic construct
MPAAKRVKLDGGDKKYSIGLDIGTNSVGWAVITDEYKVPSKKFKVLGNTDRHSIKKNLIGALLFDSGETAEATRLKRTARRRYTRRKNRICYLQEIFSNEMAKVDDSFFHRLEESFLVEEDKKHERHPIFGNIVDEVAYHEKYPTIYHLRKKLVDSTDKADLRLIYLALAHMIKFRGHFLIEGDLNPDNSDVDKLFIQLVQTYNQLFEENPINASGVDAKAILSARLSKSRRLENLIAQLPGEKKNGLFGNLIALSLGLTPNFKSNFDLAEDAKLQLSKDTYDDDLDNLLAQIGDQYADLFLAAKNLSDAILLSDILRVNTEITKAPLSASMIKRYDEHHQDLTLLKALVRQQLPEKYKEIFFDQSKNGYAGYIDGGASQEEFYKFIKPILEKMDGTEELLVKLNREDLLRKQRTFDNGSIPHQIHLGELHAILRRQEDFYPFLKDNREKIEKILTFRIPYYVGPLARGNSRFAWMTRKSEETITPWNFEEVVDKGASAQSFIERMTNFDKNLPNEKVLPKHSLLYEYFTVYNELTKVKYVTEGMRKPAFLSGEQKKAIVDLLFKTNRKVTVKQLKEDYFKKIECFDSVEISGVEDRFNASLGTYHDLLKIIKDKDFLDNEENEDILEDIVLTLTLFEDREMIEERLKTYAHLFDDKVMKQLKRRRYTGWGRLSRKLINGIRDKQSGKTILDFLKSDGFANRNFMQLIHDDSLTFKEDIQKAQVSGQGDSLHEHIANLAGSPAIKKGILQTVKVVDELVKVMGRHKPENIVIEMARENQTTQKGQKNSRERMKRIEEGIKELGSQILKEHPVENTQLQNEKLYLYYLQNGRDMYVDQELDINRLSDYDVDHIVPQSFLKDDSIDNKVLTRSDKARGKSDNVPSEEVVKKMKNYWRQLLNAKLITQRKFDNLTKAERGGLSELDKAGFIKRQLVETRQITKHVAQILDSRMNTKYDENDKLIREVKVITLKSKLVSDFRKDFQFYKVREINNYHHAHDAYLNAVVGTALIKKYPKLESEFVYGDYKVYDVRKMIAKSEQEIGKATAKYFFYSNIMNFFKTEITLANGEIRKRPLIETNGETGEIVWDKGRDFATVRKVLSMPQVNIVKKTEVQTGGFSKESILPKRNSDKLIARKKDWDPKKYGGFDSPTVAYSVLVVAKVEKGKSKKLKSVKELLGITIMERSSFEKNPIDFLEAKGYKEVKKDLIIKLPKYSLFELENGRKRMLASAGELQKGNELALPSKYVNFLYLASHYEKLKGSPEDNEQKQLFVEQHKHYLDEIIEQISEFSKRVILADANLDKVLSAYNKHRDKPIREQAENIIHLFTLTNLGAPAAFKYFDTTIDRKRYTSTKEVLDATLIHQSITGLYETRIDLSQLGGDGGGGGPAPGGTLGDQGSRGSDPLPEPRVTLTVEGIPTEFLVNTGAEHSVLTKPMGKMGSKRTVVAGATGSKVYPWTTKRLLKIGQKQVTHSFLVIPECPAPLLGRDLLTKLKAQIQFSTEGPQVTWEDRPAMCLVLNLEEEYRLHEKPVPPSIDPSWLQLFPMVWAEKAGMGLANQVPPVVVELKSDASPVAVRQYPMSKEAREGIRPHIQRFLDLGILVPCQSPWNTPLLPVKKPGTNDYRPVQDLREVNKRVQDIHPTVPNPYNLLSSLPPSHTWYSVLDLKDAFFCLKLHPNSQPLFAFEWRDPEKGNTGQLTWTRLPQGFKNSPTLFNEALHRDLASFRALNPQVVMLQYVDDLLVAAPTYRDCKEGTRRLLQELSKLGYRVSAKKAQLCREEVTYLGYLLKGGKRWLTPARKATVMKIPTPTTPRQVREFLGKAGFCRLFIPGFASLAAPLYPLTRPKVPFTWTEAHQEAFGRIKEALLSAPALALPDLTKPFALYVDEKEGVARGVLTQTLGPWRRPVAYLSKKLDPVASGWPTCLKAIAAVALLLKDADKLTLGQNVLVIAPHNLESIVRQPPDRWMTNARMTHYQSLLLNERVSFAPPAILNPATLLPVESDDTPIHICSEILAEETGTRPDLRDQPLPGVPAWYTDGSSFIMDGRRQAGAAIVDNKRTVWASNLPEGTSAQKAELIALTQALRLAEGKSINIYTDSRYAFATAHVHGAIYKQRGWLTSAGKDIKNKEEILALLEAIHLPKRVAIIHCPGHQRGTDPVATGNRKADEAAKQAAQSTRILTETTKNAGKRTADGSEFEKRTADGSEFESPKKKAKVE

SEQ ID NO: 1808 - protein, 2213 aa, synthetic construct
MPAAKRVKLDGGDKKYSIGLDIGTNSVGWAVITDEYKVPSKKFKVLGNTDRHSIKKNLIGALLFDSGETAEATRLKRTARRRYTRRKNRICYLQEIFSNEMAKVDDSFFHRLEESFLVEEDKKHERHPIFGNIVDEVAYHEKYPTIYHLRKKLVDSTDKADLRLIYLALAHMIKFRGHFLIEGDLNPDNSDVDKLFIQLVQTYNQLFEENPINASGVDAKAILSARLSKSRRLENLIAQLPGEKKNGLFGNLIALSLGLTPNFKSNFDLAEDAKLQLSKDTYDDDLDNLLAQIGDQYADLFLAAKNLSDAILLSDILRVNTEITKAPLSASMIKRYDEHHQDLTLLKALVRQQLPEKYKEIFFDQSKNGYAGYIDGGASQEEFYKFIKPILEKMDGTEELLVKLNREDLLRKQRTFDNGSIPHQIHLGELHAILRRQEDFYPFLKDNREKIEKILTFRIPYYVGPLARGNSRFAWMTRKSEETITPWNFEEVVDKGASAQSFIERMTNFDKNLPNEKVLPKHSLLYEYFTVYNELTKVKYVTEGMRKPAFLSGEQKKAIVDLLFKTNRKVTVKQLKEDYFKKIECFDSVEISGVEDRFNASLGTYHDLLKIIKDKDFLDNEENEDILEDIVLTLTLFEDREMIEERLKTYAHLFDDKVMKQLKRRRYTGWGRLSRKLINGIRDKQSGKTILDFLKSDGFANRNFMQLIHDDSLTFKEDIQKAQVSGQGDSLHEHIANLAGSPAIKKGILQTVKVVDELVKVMGRHKPENIVIEMARENQTTQKGQKNSRERMKRIEEGIKELGSQILKEHPVENTQLQNEKLYLYYLQNGRDMYVDQELDINRLSDYDVDHIVPQSFLKDDSIDNKVLTRSDKARGKSDNVPSEEVVKKMKNYWRQLLNAKLITQRKFDNLTKAERGGLSELDKAGFIKRQLVETRQITKHVAQILDSRMNTKYDENDKLIREVKVITLKSKLVSDFRKDFQFYKVREINNYHHAHDAYLNAVVGTALIKKYPKLESEFVYGDYKVYDVRKMIAKSEQEIGKATAKYFFYSNIMNFFKTEITLANGEIRKRPLIETNGETGEIVWDKGRDFATVRKVLSMPQVNIVKKTEVQTGGFSKESILPKRNSDKLIARKKDWDPKKYGGFDSPTVAYSVLVVAKVEKGKSKKLKSVKELLGITIMERSSFEKNPIDFLEAKGYKEVKKDLIIKLPKYSLFELENGRKRMLASAGELQKGNELALPSKYVNFLYLASHYEKLKGSPEDNEQKQLFVEQHKHYLDEIIEQISEFSKRVILADANLDKVLSAYNKHRDKPIREQAENIIHLFTLTNLGAPAAFKYFDTTIDRKRYTSTKEVLDATLIHQSITGLYETRIDLSQLGGDGGGGSGSSGGTLGDQGSRGSDPLPEPRVTLTVEGIPTEFLVNTGAEHSVLTKPMGKMGSKRTVVAGATGSKVYPWTTKRLLKIGQKQVTHSFLVIPECPAPLLGRDLLTKLKAQIQFSTEGPQVTWEDRPAMCLVLNLEEEYRLHEKPVPPSIDPSWLQLFPMVWAEKAGMGLANQVPPVVVELKSDASPVAVRQYPMSKEAREGIRPHIQRFLDLGILVPCQSPWNTPLLPVKKPGTNDYRPVQDLREVNKRVQDIHPTVPNPYNLLSSLPPSHTWYSVLDLKDAFFCLKLHPNSQPLFAFEWRDPEKGNTGQLTWTRLPQGFKNSPTLFNEALHRDLASFRALNPQVVMLQYVDDLLVAAPTYRDCKEGTRRLLQELSKLGYRVSAKKAQLCREEVTYLGYLLKGGKRWLTPARKATVMKIPTPTTPRQVREFLGKAGFCRLFIPGFASLAAPLYPLTRPKVPFTWTEAHQEAFGRIKEALLSAPALALPDLTKPFALYVDEKEGVARGVLTQTLGPWRRPVAYLSKKLDPVASGWPTCLKAIAAVALLLKDADKLTLGQNVLVIAPHNLESIVRQPPDRWMTNARMTHYQSLLLNERVSFAPPAILNPATLLPVESDDTPIHICSEILAEETGTRPDLRDQPLPGVPAWYTDGSSFIMDGRRQAGAAIVDNKRTVWASNLPEGTSAQKAELIALTQALRLAEGKSINIYTDSRYAFATAHVHGAIYKQRGWLTSAGKDIKNKEEILALLEAIHLPKRVAIIHCPGHQRGTDPVATGNRKADEAAKQAAQSTRILTETTKNAGKRTADGSEFEKRTADGSEFESPKKKAKVE

SEQ ID NO: 1809 - protein, 2227 aa, synthetic construct
MPAAKRVKLDGGDKKYSIGLDIGTNSVGWAVITDEYKVPSKKFKVLGNTDRHSIKKNLIGALLFDSGETAEATRLKRTARRRYTRRKNRICYLQEIFSNEMAKVDDSFFHRLEESFLVEEDKKHERHPIFGNIVDEVAYHEKYPTIYHLRKKLVDSTDKADLRLIYLALAHMIKFRGHFLIEGDLNPDNSDVDKLFIQLVQTYNQLFEENPINASGVDAKAILSARLSKSRRLENLIAQLPGEKKNGLFGNLIALSLGLTPNFKSNFDLAEDAKLQLSKDTYDDDLDNLLAQIGDQYADLFLAAKNLSDAILLSDILRVNTEITKAPLSASMIKRYDEHHQDLTLLKALVRQQLPEKYKEIFFDQSKNGYAGYIDGGASQEEFYKFIKPILEKMDGTEELLVKLNREDLLRKQRTFDNGSIPHQIHLGELHAILRRQEDFYPFLKDNREKIEKILTFRIPYYVGPLARGNSRFAWMTRKSEETITPWNFEEVVDKGASAQSFIERMTNFDKNLPNEKVLPKHSLLYEYFTVYNELTKVKYVTEGMRKPAFLSGEQKKAIVDLLFKTNRKVTVKQLKEDYFKKIECFDSVEISGVEDRFNASLGTYHDLLKIIKDKDFLDNEENEDILEDIVLTLTLFEDREMIEERLKTYAHLFDDKVMKQLKRRRYTGWGRLSRKLINGIRDKQSGKTILDFLKSDGFANRNFMQLIHDDSLTFKEDIQKAQVSGQGDSLHEHIANLAGSPAIKKGILQTVKVVDELVKVMGRHKPENIVIEMARENQTTQKGQKNSRERMKRIEEGIKELGSQILKEHPVENTQLQNEKLYLYYLQNGRDMYVDQELDINRLSDYDVDHIVPQSFLKDDSIDNKVLTRSDKARGKSDNVPSEEVVKKMKNYWRQLLNAKLITQRKFDNLTKAERGGLSELDKAGFIKRQLVETRQITKHVAQILDSRMNTKYDENDKLIREVKVITLKSKLVSDFRKDFQFYKVREINNYHHAHDAYLNAVVGTALIKKYPKLESEFVYGDYKVYDVRKMIAKSEQEIGKATAKYFFYSNIMNFFKTEITLANGEIRKRPLIETNGETGEIVWDKGRDFATVRKVLSMPQVNIVKKTEVQTGGFSKESILPKRNSDKLIARKKDWDPKKYGGFDSPTVAYSVLVVAKVEKGKSKKLKSVKELLGITIMERSSFEKNPIDFLEAKGYKEVKKDLIIKLPKYSLFELENGRKRMLASAGELQKGNELALPSKYVNFLYLASHYEKLKGSPEDNEQKQLFVEQHKHYLDEIIEQISEFSKRVILADANLDKVLSAYNKHRDKPIREQAENIIHLFTLTNLGAPAAFKYFDTTIDRKRYTSTKEVLDATLIHQSITGLYETRIDLSQLGGDGGEAAAKEAAAKEAAAKEAAAKGGTLGDQGSRGSDPLPEPRVTLTVEGIPTEFLVNTGAEHSVLTKPMGKMGSKRTVVAGATGSKVYPWTTKRLLKIGQKQVTHSFLVIPECPAPLLGRDLLTKLKAQIQFSTEGPQVTWEDRPAMCLVLNLEEEYRLHEKPVPPSIDPSWLQLFPMVWAEKAGMGLANQVPPVVVELKSDASPVAVRQYPMSKEAREGIRPHIQRFLDLGILVPCQSPWNTPLLPVKKPGTNDYRPVQDLREVNKRVQDIHPTVPNPYNLLSSLPPSHTWYSVLDLKDAFFCLKLHPNSQPLFAFEWRDPEKGNTGQLTWTRLPQGFKNSPTLFNEALHRDLASFRALNPQVVMLQYVDDLLVAAPTYRDCKEGTRRLLQELSKLGYRVSAKKAQLCREEVTYLGYLLKGGKRWLTPARKATVMKIPTPTTPRQVREFLGKAGFCRLFIPGFASLAAPLYPLTRPKVPFTWTEAHQEAFGRIKEALLSAPALALPDLTKPFALYVDEKEGVARGVLTQTLGPWRRPVAYLSKKLDPVASGWPTCLKAIAAVALLLKDADKLTLGQNVLVIAPHNLESIVRQPPDRWMTNARMTHYQSLLLNERVSFAPPAILNPATLLPVESDDTPIHICSEILAEETGTRPDLRDQPLPGVPAWYTDGSSFIMDGRRQAGAAIVDNKRTVWASNLPEGTSAQKAELIALTQALRLAEGKSINIYTDSRYAFATAHVHGAIYKQRGWLTSAGKDIKNKEEILALLEAIHLPKRVAIIHCPGHQRGTDPVATGNRKADEAAKQAAQSTRILTETTKNAGKRTADGSEFEKRTADGSEFESPKKKAKVE

SEQ ID NO: 1810 - protein, 2218 aa, synthetic construct
MPAAKRVKLDGGDKKYSIGLDIGTNSVGWAVITDEYKVPSKKFKVLGNTDRHSIKKNLIGALLFDSGETAEATRLKRTARRRYTRRKNRICYLQEIFSNEMAKVDDSFFHRLEESFLVEEDKKHERHPIFGNIVDEVAYHEKYPTIYHLRKKLVDSTDKADLRLIYLALAHMIKFRGHFLIEGDLNPDNSDVDKLFIQLVQTYNQLFEENPINASGVDAKAILSARLSKSRRLENLIAQLPGEKKNGLFGNLIALSLGLTPNFKSNFDLAEDAKLQLSKDTYDDDLDNLLAQIGDQYADLFLAAKNLSDAILLSDILRVNTEITKAPLSASMIKRYDEHHQDLTLLKALVRQQLPEKYKEIFFDQSKNGYAGYIDGGASQEEFYKFIKPILEKMDGTEELLVKLNREDLLRKQRTFDNGSIPHQIHLGELHAILRRQEDFYPFLKDNREKIEKILTFRIPYYVGPLARGNSRFAWMTRKSEETITPWNFEEVVDKGASAQSFIERMTNFDKNLPNEKVLPKHSLLYEYFTVYNELTKVKYVTEGMRKPAFLSGEQKKAIVDLLFKTNRKVTVKQLKEDYFKKIECFDSVEISGVEDRFNASLGTYHDLLKIIKDKDFLDNEENEDILEDIVLTLTLFEDREMIEERLKTYAHLFDDKVMKQLKRRRYTGWGRLSRKLINGIRDKQSGKTILDFLKSDGFANRNFMQLIHDDSLTFKEDIQKAQVSGQGDSLHEHIANLAGSPAIKKGILQTVKVVDELVKVMGRHKPENIVIEMARENQTTQKGQKNSRERMKRIEEGIKELGSQILKEHPVENTQLQNEKLYLYYLQNGRDMYVDQELDINRLSDYDVDHIVPQSFLKDDSIDNKVLTRSDKARGKSDNVPSEEVVKKMKNYWRQLLNAKLITQRKFDNLTKAERGGLSELDKAGFIKRQLVETRQITKHVAQILDSRMNTKYDENDKLIREVKVITLKSKLVSDFRKDFQFYKVREINNYHHAHDAYLNAVVGTALIKKYPKLESEFVYGDYKVYDVRKMIAKSEQEIGKATAKYFFYSNIMNFFKTEITLANGEIRKRPLIETNGETGEIVWDKGRDFATVRKVLSMPQVNIVKKTEVQTGGFSKESILPKRNSDKLIARKKDWDPKKYGGFDSPTVAYSVLVVAKVEKGKSKKLKSVKELLGITIMERSSFEKNPIDFLEAKGYKEVKKDLIIKLPKYSLFELENGRKRMLASAGELQKGNELALPSKYVNFLYLASHYEKLKGSPEDNEQKQLFVEQHKHYLDEIIEQISEFSKRVILADANLDKVLSAYNKHRDKPIREQAENIIHLFTLTNLGAPAAFKYFDTTIDRKRYTSTKEVLDATLIHQSITGLYETRIDLSQLGGDGGPAPGGSEAAAKGGTLGDQGSRGSDPLPEPRVTLTVEGIPTEFLVNTGAEHSVLTKPMGKMGSKRTVVAGATGSKVYPWTTKRLLKIGQKQVTHSFLVIPECPAPLLGRDLLTKLKAQIQFSTEGPQVTWEDRPAMCLVLNLEEEYRLHEKPVPPSIDPSWLQLFPMVWAEKAGMGLANQVPPVVVELKSDASPVAVRQYPMSKEAREGIRPHIQRFLDLGILVPCQSPWNTPLLPVKKPGTNDYRPVQDLREVNKRVQDIHPTVPNPYNLLSSLPPSHTWYSVLDLKDAFFCLKLHPNSQPLFAFEWRDPEKGNTGQLTWTRLPQGFKNSPTLFNEALHRDLASFRALNPQVVMLQYVDDLLVAAPTYRDCKEGTRRLLQELSKLGYRVSAKKAQLCREEVTYLGYLLKGGKRWLTPARKATVMKIPTPTTPRQVREFLGKAGFCRLFIPGFASLAAPLYPLTRPKVPFTWTEAHQEAFGRIKEALLSAPALALPDLTKPFALYVDEKEGVARGVLTQTLGPWRRPVAYLSKKLDPVASGWPTCLKAIAAVALLLKDADKLTLGQNVLVIAPHNLESIVRQPPDRWMTNARMTHYQSLLLNERVSFAPPAILNPATLLPVESDDTPIHICSEILAEETGTRPDLRDQPLPGVPAWYTDGSSFIMDGRRQAGAAIVDNKRTVWASNLPEGTSAQKAELIALTQALRLAEGKSINIYTDSRYAFATAHVHGAIYKQRGWLTSAGKDIKNKEEILALLEAIHLPKRVAIIHCPGHQRGTDPVATGNRKADEAAKQAAQSTRILTETTKNAGKRTADGSEFEKRTADGSEFESPKKKAKVE

SEQ ID NO: 1811 - protein, 2213 aa, synthetic construct
MPAAKRVKLDGGDKKYSIGLDIGTNSVGWAVITDEYKVPSKKFKVLGNTDRHSIKKNLIGALLFDSGETAEATRLKRTARRRYTRRKNRICYLQEIFSNEMAKVDDSFFHRLEESFLVEEDKKHERHPIFGNIVDEVAYHEKYPTIYHLRKKLVDSTDKADLRLIYLALAHMIKFRGHFLIEGDLNPDNSDVDKLFIQLVQTYNQLFEENPINASGVDAKAILSARLSKSRRLENLIAQLPGEKKNGLFGNLIALSLGLTPNFKSNFDLAEDAKLQLSKDTYDDDLDNLLAQIGDQYADLFLAAKNLSDAILLSDILRVNTEITKAPLSASMIKRYDEHHQDLTLLKALVRQQLPEKYKEIFFDQSKNGYAGYIDGGASQEEFYKFIKPILEKMDGTEELLVKLNREDLLRKQRTFDNGSIPHQIHLGELHAILRRQEDFYPFLKDNREKIEKILTFRIPYYVGPLARGNSRFAWMTRKSEETITPWNFEEVVDKGASAQSFIERMTNFDKNLPNEKVLPKHSLLYEYFTVYNELTKVKYVTEGMRKPAFLSGEQKKAIVDLLFKTNRKVTVKQLKEDYFKKIECFDSVEISGVEDRFNASLGTYHDLLKIIKDKDFLDNEENEDILEDIVLTLTLFEDREMIEERLKTYAHLFDDKVMKQLKRRRYTGWGRLSRKLINGIRDKQSGKTILDFLKSDGFANRNFMQLIHDDSLTFKEDIQKAQVSGQGDSLHEHIANLAGSPAIKKGILQTVKVVDELVKVMGRHKPENIVIEMARENQTTQKGQKNSRERMKRIEEGIKELGSQILKEHPVENTQLQNEKLYLYYLQNGRDMYVDQELDINRLSDYDVDHIVPQSFLKDDSIDNKVLTRSDKARGKSDNVPSEEVVKKMKNYWRQLLNAKLITQRKFDNLTKAERGGLSELDKAGFIKRQLVETRQITKHVAQILDSRMNTKYDENDKLIREVKVITLKSKLVSDFRKDFQFYKVREINNYHHAHDAYLNAVVGTALIKKYPKLESEFVYGDYKVYDVRKMIAKSEQEIGKATAKYFFYSNIMNFFKTEITLANGEIRKRPLIETNGETGEIVWDKGRDFATVRKVLSMPQVNIVKKTEVQTGGFSKESILPKRNSDKLIARKKDWDPKKYGGFDSPTVAYSVLVVAKVEKGKSKKLKSVKELLGITIMERSSFEKNPIDFLEAKGYKEVKKDLIIKLPKYSLFELENGRKRMLASAGELQKGNELALPSKYVNFLYLASHYEKLKGSPEDNEQKQLFVEQHKHYLDEIIEQISEFSKRVILADANLDKVLSAYNKHRDKPIREQAENIIHLFTLTNLGAPAAFKYFDTTIDRKRYTSTKEVLDATLIHQSITGLYETRIDLSQLGGDGGPAPGGSGGTLGDQGSRGSDPLPEPRVTLTVEGIPTEFLVNTGAEHSVLTKPMGKMGSKRTVVAGATGSKVYPWTTKRLLKIGQKQVTHSFLVIPECPAPLLGRDLLTKLKAQIQFSTEGPQVTWEDRPAMCLVLNLEEEYRLHEKPVPPSIDPSWLQLFPMVWAEKAGMGLANQVPPVVVELKSDASPVAVRQYPMSKEAREGIRPHIQRFLDLGILVPCQSPWNTPLLPVKKPGTNDYRPVQDLREVNKRVQDIHPTVPNPYNLLSSLPPSHTWYSVLDLKDAFFCLKLHPNSQPLFAFEWRDPEKGNTGQLTWTRLPQGFKNSPTLFNEALHRDLASFRALNPQVVMLQYVDDLLVAAPTYRDCKEGTRRLLQELSKLGYRVSAKKAQLCREEVTYLGYLLKGGKRWLTPARKATVMKIPTPTTPRQVREFLGKAGFCRLFIPGFASLAAPLYPLTRPKVPFTWTEAHQEAFGRIKEALLSAPALALPDLTKPFALYVDEKEGVARGVLTQTLGPWRRPVAYLSKKLDPVASGWPTCLKAIAAVALLLKDADKLTLGQNVLVIAPHNLESIVRQPPDRWMTNARMTHYQSLLLNERVSFAPPAILNPATLLPVESDDTPIHICSEILAEETGTRPDLRDQPLPGVPAWYTDGSSFIMDGRRQAGAAIVDNKRTVWASNLPEGTSAQKAELIALTQALRLAEGKSINIYTDSRYAFATAHVHGAIYKQRGWLTSAGKDIKNKEEILALLEAIHLPKRVAIIHCPGHQRGTDPVATGNRKADEAAKQAAQSTRILTETTKNAGKRTADGSEFEKRTADGSEFESPKKKAKVE

SEQ ID NO: 1812 - protein, 2218 aa, synthetic construct
MPAAKRVKLDGGDKKYSIGLDIGTNSVGWAVITDEYKVPSKKFKVLGNTDRHSIKKNLIGALLFDSGETAEATRLKRTARRRYTRRKNRICYLQEIFSNEMAKVDDSFFHRLEESFLVEEDKKHERHPIFGNIVDEVAYHEKYPTIYHLRKKLVDSTDKADLRLIYLALAHMIKFRGHFLIEGDLNPDNSDVDKLFIQLVQTYNQLFEENPINASGVDAKAILSARLSKSRRLENLIAQLPGEKKNGLFGNLIALSLGLTPNFKSNFDLAEDAKLQLSKDTYDDDLDNLLAQIGDQYADLFLAAKNLSDAILLSDILRVNTEITKAPLSASMIKRYDEHHQDLTLLKALVRQQLPEKYKEIFFDQSKNGYAGYIDGGASQEEFYKFIKPILEKMDGTEELLVKLNREDLLRKQRTFDNGSIPHQIHLGELHAILRRQEDFYPFLKDNREKIEKILTFRIPYYVGPLARGNSRFAWMTRKSEETITPWNFEEVVDKGASAQSFIERMTNFDKNLPNEKVLPKHSLLYEYFTVYNELTKVKYVTEGMRKPAFLSGEQKKAIVDLLFKTNRKVTVKQLKEDYFKKIECFDSVEISGVEDRFNASLGTYHDLLKIIKDKDFLDNEENEDILEDIVLTLTLFEDREMIEERLKTYAHLFDDKVMKQLKRRRYTGWGRLSRKLINGIRDKQSGKTILDFLKSDGFANRNFMQLIHDDSLTFKEDIQKAQVSGQGDSLHEHIANLAGSPAIKKGILQTVKVVDELVKVMGRHKPENIVIEMARENQTTQKGQKNSRERMKRIEEGIKELGSQILKEHPVENTQLQNEKLYLYYLQNGRDMYVDQELDINRLSDYDVDHIVPQSFLKDDSIDNKVLTRSDKARGKSDNVPSEEVVKKMKNYWRQLLNAKLITQRKFDNLTKAERGGLSELDKAGFIKRQLVETRQITKHVAQILDSRMNTKYDENDKLIREVKVITLKSKLVSDFRKDFQFYKVREINNYHHAHDAYLNAVVGTALIKKYPKLESEFVYGDYKVYDVRKMIAKSEQEIGKATAKYFFYSNIMNFFKTEITLANGEIRKRPLIETNGETGEIVWDKGRDFATVRKVLSMPQVNIVKKTEVQTGGFSKESILPKRNSDKLIARKKDWDPKKYGGFDSPTVAYSVLVVAKVEKGKSKKLKSVKELLGITIMERSSFEKNPIDFLEAKGYKEVKKDLIIKLPKYSLFELENGRKRMLASAGELQKGNELALPSKYVNFLYLASHYEKLKGSPEDNEQKQLFVEQHKHYLDEIIEQISEFSKRVILADANLDKVLSAYNKHRDKPIREQAENIIHLFTLTNLGAPAAFKYFDTTIDRKRYTSTKEVLDATLIHQSITGLYETRIDLSQLGGDGGGGGPAPEAAAKGGTLGDQGSRGSDPLPEPRVTLTVEGIPTEFLVNTGAEHSVLTKPMGKMGSKRTVVAGATGSKVYPWTTKRLLKIGQKQVTHSFLVIPECPAPLLGRDLLTKLKAQIQFSTEGPQVTWEDRPAMCLVLNLEEEYRLHEKPVPPSIDPSWLQLFPMVWAEKAGMGLANQVPPVVVELKSDASPVAVRQYPMSKEAREGIRPHIQRFLDLGILVPCQSPWNTPLLPVKKPGTNDYRPVQDLREVNKRVQDIHPTVPNPYNLLSSLPPSHTWYSVLDLKDAFFCLKLHPNSQPLFAFEWRDPEKGNTGQLTWTRLPQGFKNSPTLFNEALHRDLASFRALNPQVVMLQYVDDLLVAAPTYRDCKEGTRRLLQELSKLGYRVSAKKAQLCREEVTYLGYLLKGGKRWLTPARKATVMKIPTPTTPRQVREFLGKAGFCRLFIPGFASLAAPLYPLTRPKVPFTWTEAHQEAFGRIKEALLSAPALALPDLTKPFALYVDEKEGVARGVLTQTLGPWRRPVAYLSKKLDPVASGWPTCLKAIAAVALLLKDADKLTLGQNVLVIAPHNLESIVRQPPDRWMTNARMTHYQSLLLNERVSFAPPAILNPATLLPVESDDTPIHICSEILAEETGTRPDLRDQPLPGVPAWYTDGSSFIMDGRRQAGAAIVDNKRTVWASNLPEGTSAQKAELIALTQALRLAEGKSINIYTDSRYAFATAHVHGAIYKQRGWLTSAGKDIKNKEEILALLEAIHLPKRVAIIHCPGHQRGTDPVATGNRKADEAAKQAAQSTRILTETTKNAGKRTADGSEFEKRTADGSEFESPKKKAKVE

SEQ ID NO: 1813 - protein, 2222 aa, synthetic construct
MPAAKRVKLDGGDKKYSIGLDIGTNSVGWAVITDEYKVPSKKFKVLGNTDRHSIKKNLIGALLFDSGETAEATRLKRTARRRYTRRKNRICYLQEIFSNEMAKVDDSFFHRLEESFLVEEDKKHERHPIFGNIVDEVAYHEKYPTIYHLRKKLVDSTDKADLRLIYLALAHMIKFRGHFLIEGDLNPDNSDVDKLFIQLVQTYNQLFEENPINASGVDAKAILSARLSKSRRLENLIAQLPGEKKNGLFGNLIALSLGLTPNFKSNFDLAEDAKLQLSKDTYDDDLDNLLAQIGDQYADLFLAAKNLSDAILLSDILRVNTEITKAPLSASMIKRYDEHHQDLTLLKALVRQQLPEKYKEIFFDQSKNGYAGYIDGGASQEEFYKFIKPILEKMDGTEELLVKLNREDLLRKQRTFDNGSIPHQIHLGELHAILRRQEDFYPFLKDNREKIEKILTFRIPYYVGPLARGNSRFAWMTRKSEETITPWNFEEVVDKGASAQSFIERMTNFDKNLPNEKVLPKHSLLYEYFTVYNELTKVKYVTEGMRKPAFLSGEQKKAIVDLLFKTNRKVTVKQLKEDYFKKIECFDSVEISGVEDRFNASLGTYHDLLKIIKDKDFLDNEENEDILEDIVLTLTLFEDREMIEERLKTYAHLFDDKVMKQLKRRRYTGWGRLSRKLINGIRDKQSGKTILDFLKSDGFANRNFMQLIHDDSLTFKEDIQKAQVSGQGDSLHEHIANLAGSPAIKKGILQTVKVVDELVKVMGRHKPENIVIEMARENQTTQKGQKNSRERMKRIEEGIKELGSQILKEHPVENTQLQNEKLYLYYLQNGRDMYVDQELDINRLSDYDVDHIVPQSFLKDDSIDNKVLTRSDKARGKSDNVPSEEVVKKMKNYWRQLLNAKLITQRKFDNLTKAERGGLSELDKAGFIKRQLVETRQITKHVAQILDSRMNTKYDENDKLIREVKVITLKSKLVSDFRKDFQFYKVREINNYHHAHDAYLNAVVGTALIKKYPKLESEFVYGDYKVYDVRKMIAKSEQEIGKATAKYFFYSNIMNFFKTEITLANGEIRKRPLIETNGETGEIVWDKGRDFATVRKVLSMPQVNIVKKTEVQTGGFSKESILPKRNSDKLIARKKDWDPKKYGGFDSPTVAYSVLVVAKVEKGKSKKLKSVKELLGITIMERSSFEKNPIDFLEAKGYKEVKKDLIIKLPKYSLFELENGRKRMLASAGELQKGNELALPSKYVNFLYLASHYEKLKGSPEDNEQKQLFVEQHKHYLDEIIEQISEFSKRVILADANLDKVLSAYNKHRDKPIREQAENIIHLFTLTNLGAPAAFKYFDTTIDRKRYTSTKEVLDATLIHQSITGLYETRIDLSQLGGDGGGSSGSSGSSGSSGSSGGTLGDQGSRGSDPLPEPRVTLTVEGIPTEFLVNTGAEHSVLTKPMGKMGSKRTVVAGATGSKVYPWTTKRLLKIGQKQVTHSFLVIPECPAPLLGRDLLTKLKAQIQFSTEGPQVTWEDRPAMCLVLNLEEEYRLHEKPVPPSIDPSWLQLFPMVWAEKAGMGLANQVPPVVVELKSDASPVAVRQYPMSKEAREGIRPHIQRFLDLGILVPCQSPWNTPLLPVKKPGTNDYRPVQDLREVNKRVQDIHPTVPNPYNLLSSLPPSHTWYSVLDLKDAFFCLKLHPNSQPLFAFEWRDPEKGNTGQLTWTRLPQGFKNSPTLFNEALHRDLASFRALNPQVVMLQYVDDLLVAAPTYRDCKEGTRRLLQELSKLGYRVSAKKAQLCREEVTYLGYLLKGGKRWLTPARKATVMKIPTPTTPRQVREFLGKAGFCRLFIPGFASLAAPLYPLTRPKVPFTWTEAHQEAFGRIKEALLSAPALALPDLTKPFALYVDEKEGVARGVLTQTLGPWRRPVAYLSKKLDPVASGWPTCLKAIAAVALLLKDADKLTLGQNVLVIAPHNLESIVRQPPDRWMTNARMTHYQSLLLNERVSFAPPAILNPATLLPVESDDTPIHICSEILAEETGTRPDLRDQPLPGVPAWYTDGSSFIMDGRRQAGAAIVDNKRTVWASNLPEGTSAQKAELIALTQALRLAEGKSINIYTDSRYAFATAHVHGAIYKQRGWLTSAGKDIKNKEEILALLEAIHLPKRVAIIHCPGHQRGTDPVATGNRKADEAAKQAAQSTRILTETTKNAGKRTADGSEFEKRTADGSEFESPKKKAKVE

SEQ ID NO: 1814 - protein, 2216 aa, synthetic construct
MPAAKRVKLDGGDKKYSIGLDIGTNSVGWAVITDEYKVPSKKFKVLGNTDRHSIKKNLIGALLFDSGETAEATRLKRTARRRYTRRKNRICYLQEIFSNEMAKVDDSFFHRLEESFLVEEDKKHERHPIFGNIVDEVAYHEKYPTIYHLRKKLVDSTDKADLRLIYLALAHMIKFRGHFLIEGDLNPDNSDVDKLFIQLVQTYNQLFEENPINASGVDAKAILSARLSKSRRLENLIAQLPGEKKNGLFGNLIALSLGLTPNFKSNFDLAEDAKLQLSKDTYDDDLDNLLAQIGDQYADLFLAAKNLSDAILLSDILRVNTEITKAPLSASMIKRYDEHHQDLTLLKALVRQQLPEKYKEIFFDQSKNGYAGYIDGGASQEEFYKFIKPILEKMDGTEELLVKLNREDLLRKQRTFDNGSIPHQIHLGELHAILRRQEDFYPFLKDNREKIEKILTFRIPYYVGPLARGNSRFAWMTRKSEETITPWNFEEVVDKGASAQSFIERMTNFDKNLPNEKVLPKHSLLYEYFTVYNELTKVKYVTEGMRKPAFLSGEQKKAIVDLLFKTNRKVTVKQLKEDYFKKIECFDSVEISGVEDRFNASLGTYHDLLKIIKDKDFLDNEENEDILEDIVLTLTLFEDREMIEERLKTYAHLFDDKVMKQLKRRRYTGWGRLSRKLINGIRDKQSGKTILDFLKSDGFANRNFMQLIHDDSLTFKEDIQKAQVSGQGDSLHEHIANLAGSPAIKKGILQTVKVVDELVKVMGRHKPENIVIEMARENQTTQKGQKNSRERMKRIEEGIKELGSQILKEHPVENTQLQNEKLYLYYLQNGRDMYVDQELDINRLSDYDVDHIVPQSFLKDDSIDNKVLTRSDKARGKSDNVPSEEVVKKMKNYWRQLLNAKLITQRKFDNLTKAERGGLSELDKAGFIKRQLVETRQITKHVAQILDSRMNTKYDENDKLIREVKVITLKSKLVSDFRKDFQFYKVREINNYHHAHDAYLNAVVGTALIKKYPKLESEFVYGDYKVYDVRKMIAKSEQEIGKATAKYFFYSNIMNFFKTEITLANGEIRKRPLIETNGETGEIVWDKGRDFATVRKVLSMPQVNIVKKTEVQTGGFSKESILPKRNSDKLIARKKDWDPKKYGGFDSPTVAYSVLVVAKVEKGKSKKLKSVKELLGITIMERSSFEKNPIDFLEAKGYKEVKKDLIIKLPKYSLFELENGRKRMLASAGELQKGNELALPSKYVNFLYLASHYEKLKGSPEDNEQKQLFVEQHKHYLDEIIEQISEFSKRVILADANLDKVLSAYNKHRDKPIREQAENIIHLFTLTNLGAPAAFKYFDTTIDRKRYTSTKEVLDATLIHQSITGLYETRIDLSQLGGDGGGSSGSSGSSGGTLGDQGSRGSDPLPEPRVTLTVEGIPTEFLVNTGAEHSVLTKPMGKMGSKRTVVAGATGSKVYPWTTKRLLKIGQKQVTHSFLVIPECPAPLLGRDLLTKLKAQIQFSTEGPQVTWEDRPAMCLVLNLEEEYRLHEKPVPPSIDPSWLQLFPMVWAEKAGMGLANQVPPVVVELKSDASPVAVRQYPMSKEAREGIRPHIQRFLDLGILVPCQSPWNTPLLPVKKPGTNDYRPVQDLREVNKRVQDIHPTVPNPYNLLSSLPPSHTWYSVLDLKDAFFCLKLHPNSQPLFAFEWRDPEKGNTGQLTWTRLPQGFKNSPTLFNEALHRDLASFRALNPQVVMLQYVDDLLVAAPTYRDCKEGTRRLLQELSKLGYRVSAKKAQLCREEVTYLGYLLKGGKRWLTPARKATVMKIPTPTTPRQVREFLGKAGFCRLFIPGFASLAAPLYPLTRPKVPFTWTEAHQEAFGRIKEALLSAPALALPDLTKPFALYVDEKEGVARGVLTQTLGPWRRPVAYLSKKLDPVASGWPTCLKAIAAVALLLKDADKLTLGQNVLVIAPHNLESIVRQPPDRWMTNARMTHYQSLLLNERVSFAPPAILNPATLLPVESDDTPIHICSEILAEETGTRPDLRDQPLPGVPAWYTDGSSFIMDGRRQAGAAIVDNKRTVWASNLPEGTSAQKAELIALTQALRLAEGKSINIYTDSRYAFATAHVHGAIYKQRGWLTSAGKDIKNKEEILALLEAIHLPKRVAIIHCPGHQRGTDPVATGNRKADEAAKQAAQSTRILTETTKNAGKRTADGSEFEKRTADGSEFESPKKKAKVE

SEQ ID NO: 1815 - protein, 2213 aa, synthetic construct
MPAAKRVKLDGGDKKYSIGLDIGTNSVGWAVITDEYKVPSKKFKVLGNTDRHSIKKNLIGALLFDSGETAEATRLKRTARRRYTRRKNRICYLQEIFSNEMAKVDDSFFHRLEESFLVEEDKKHERHPIFGNIVDEVAYHEKYPTIYHLRKKLVDSTDKADLRLIYLALAHMIKFRGHFLIEGDLNPDNSDVDKLFIQLVQTYNQLFEENPINASGVDAKAILSARLSKSRRLENLIAQLPGEKKNGLFGNLIALSLGLTPNFKSNFDLAEDAKLQLSKDTYDDDLDNLLAQIGDQYADLFLAAKNLSDAILLSDILRVNTEITKAPLSASMIKRYDEHHQDLTLLKALVRQQLPEKYKEIFFDQSKNGYAGYIDGGASQEEFYKFIKPILEKMDGTEELLVKLNREDLLRKQRTFDNGSIPHQIHLGELHAILRRQEDFYPFLKDNREKIEKILTFRIPYYVGPLARGNSRFAWMTRKSEETITPWNFEEVVDKGASAQSFIERMTNFDKNLPNEKVLPKHSLLYEYFTVYNELTKVKYVTEGMRKPAFLSGEQKKAIVDLLFKTNRKVTVKQLKEDYFKKIECFDSVEISGVEDRFNASLGTYHDLLKIIKDKDFLDNEENEDILEDIVLTLTLFEDREMIEERLKTYAHLFDDKVMKQLKRRRYTGWGRLSRKLINGIRDKQSGKTILDFLKSDGFANRNFMQLIHDDSLTFKEDIQKAQVSGQGDSLHEHIANLAGSPAIKKGILQTVKVVDELVKVMGRHKPENIVIEMARENQTTQKGQKNSRERMKRIEEGIKELGSQILKEHPVENTQLQNEKLYLYYLQNGRDMYVDQELDINRLSDYDVDHIVPQSFLKDDSIDNKVLTRSDKARGKSDNVPSEEVVKKMKNYWRQLLNAKLITQRKFDNLTKAERGGLSELDKAGFIKRQLVETRQITKHVAQILDSRMNTKYDENDKLIREVKVITLKSKLVSDFRKDFQFYKVREINNYHHAHDAYLNAVVGTALIKKYPKLESEFVYGDYKVYDVRKMIAKSEQEIGKATAKYFFYSNIMNFFKTEITLANGEIRKRPLIETNGETGEIVWDKGRDFATVRKVLSMPQVNIVKKTEVQTGGFSKESILPKRNSDKLIARKKDWDPKKYGGFDSPTVAYSVLVVAKVEKGKSKKLKSVKELLGITIMERSSFEKNPIDFLEAKGYKEVKKDLIIKLPKYSLFELENGRKRMLASAGELQKGNELALPSKYVNFLYLASHYEKLKGSPEDNEQKQLFVEQHKHYLDEIIEQISEFSKRVILADANLDKVLSAYNKHRDKPIREQAENIIHLFTLTNLGAPAAFKYFDTTIDRKRYTSTKEVLDATLIHQSITGLYETRIDLSQLGGDGGGSSPAPGGTLGDQGSRGSDPLPEPRVTLTVEGIPTEFLVNTGAEHSVLTKPMGKMGSKRTVVAGATGSKVYPWTTKRLLKIGQKQVTHSFLVIPECPAPLLGRDLLTKLKAQIQFSTEGPQVTWEDRPAMCLVLNLEEEYRLHEKPVPPSIDPSWLQLFPMVWAEKAGMGLANQVPPVVVELKSDASPVAVRQYPMSKEAREGIRPHIQRFLDLGILVPCQSPWNTPLLPVKKPGTNDYRPVQDLREVNKRVQDIHPTVPNPYNLLSSLPPSHTWYSVLDLKDAFFCLKLHPNSQPLFAFEWRDPEKGNTGQLTWTRLPQGFKNSPTLFNEALHRDLASFRALNPQVVMLQYVDDLLVAAPTYRDCKEGTRRLLQELSKLGYRVSAKKAQLCREEVTYLGYLLKGGKRWLTPARKATVMKIPTPTTPRQVREFLGKAGFCRLFIPGFASLAAPLYPLTRPKVPFTWTEAHQEAFGRIKEALLSAPALALPDLTKPFALYVDEKEGVARGVLTQTLGPWRRPVAYLSKKLDPVASGWPTCLKAIAAVALLLKDADKLTLGQNVLVIAPHNLESIVRQPPDRWMTNARMTHYQSLLLNERVSFAPPAILNPATLLPVESDDTPIHICSEILAEETGTRPDLRDQPLPGVPAWYTDGSSFIMDGRRQAGAAIVDNKRTVWASNLPEGTSAQKAELIALTQALRLAEGKSINIYTDSRYAFATAHVHGAIYKQRGWLTSAGKDIKNKEEILALLEAIHLPKRVAIIHCPGHQRGTDPVATGNRKADEAAKQAAQSTRILTETTKNAGKRTADGSEFEKRTADGSEFESPKKKAKVE

SEQ ID NO: 1816 - protein, 2218 aa, synthetic construct
MPAAKRVKLDGGDKKYSIGLDIGTNSVGWAVITDEYKVPSKKFKVLGNTDRHSIKKNLIGALLFDSGETAEATRLKRTARRRYTRRKNRICYLQEIFSNEMAKVDDSFFHRLEESFLVEEDKKHERHPIFGNIVDEVAYHEKYPTIYHLRKKLVDSTDKADLRLIYLALAHMIKFRGHFLIEGDLNPDNSDVDKLFIQLVQTYNQLFEENPINASGVDAKAILSARLSKSRRLENLIAQLPGEKKNGLFGNLIALSLGLTPNFKSNFDLAEDAKLQLSKDTYDDDLDNLLAQIGDQYADLFLAAKNLSDAILLSDILRVNTEITKAPLSASMIKRYDEHHQDLTLLKALVRQQLPEKYKEIFFDQSKNGYAGYIDGGASQEEFYKFIKPILEKMDGTEELLVKLNREDLLRKQRTFDNGSIPHQIHLGELHAILRRQEDFYPFLKDNREKIEKILTFRIPYYVGPLARGNSRFAWMTRKSEETITPWNFEEVVDKGASAQSFIERMTNFDKNLPNEKVLPKHSLLYEYFTVYNELTKVKYVTEGMRKPAFLSGEQKKAIVDLLFKTNRKVTVKQLKEDYFKKIECFDSVEISGVEDRFNASLGTYHDLLKIIKDKDFLDNEENEDILEDIVLTLTLFEDREMIEERLKTYAHLFDDKVMKQLKRRRYTGWGRLSRKLINGIRDKQSGKTILDFLKSDGFANRNFMQLIHDDSLTFKEDIQKAQVSGQGDSLHEHIANLAGSPAIKKGILQTVKVVDELVKVMGRHKPENIVIEMARENQTTQKGQKNSRERMKRIEEGIKELGSQILKEHPVENTQLQNEKLYLYYLQNGRDMYVDQELDINRLSDYDVDHIVPQSFLKDDSIDNKVLTRSDKARGKSDNVPSEEVVKKMKNYWRQLLNAKLITQRKFDNLTKAERGGLSELDKAGFIKRQLVETRQITKHVAQILDSRMNTKYDENDKLIREVKVITLKSKLVSDFRKDFQFYKVREINNYHHAHDAYLNAVVGTALIKKYPKLESEFVYGDYKVYDVRKMIAKSEQEIGKATAKYFFYSNIMNFFKTEITLANGEIRKRPLIETNGETGEIVWDKGRDFATVRKVLSMPQVNIVKKTEVQTGGFSKESILPKRNSDKLIARKKDWDPKKYGGFDSPTVAYSVLVVAKVEKGKSKKLKSVKELLGITIMERSSFEKNPIDFLEAKGYKEVKKDLIIKLPKYSLFELENGRKRMLASAGELQKGNELALPSKYVNFLYLASHYEKLKGSPEDNEQKQLFVEQHKHYLDEIIEQISEFSKRVILADANLDKVLSAYNKHRDKPIREQAENIIHLFTLTNLGAPAAFKYFDTTIDRKRYTSTKEVLDATLIHQSITGLYETRIDLSQLGGDGGPAPEAAAKGSSGGTLGDQGSRGSDPLPEPRVTLTVEGIPTEFLVNTGAEHSVLTKPMGKMGSKRTVVAGATGSKVYPWTTKRLLKIGQKQVTHSFLVIPECPAPLLGRDLLTKLKAQIQFSTEGPQVTWEDRPAMCLVLNLEEEYRLHEKPVPPSIDPSWLQLFPMVWAEKAGMGLANQVPPVVVELKSDASPVAVRQYPMSKEAREGIRPHIQRFLDLGILVPCQSPWNTPLLPVKKPGTNDYRPVQDLREVNKRVQDIHPTVPNPYNLLSSLPPSHTWYSVLDLKDAFFCLKLHPNSQPLFAFEWRDPEKGNTGQLTWTRLPQGFKNSPTLFNEALHRDLASFRALNPQVVMLQYVDDLLVAAPTYRDCKEGTRRLLQELSKLGYRVSAKKAQLCREEVTYLGYLLKGGKRWLTPARKATVMKIPTPTTPRQVREFLGKAGFCRLFIPGFASLAAPLYPLTRPKVPFTWTEAHQEAFGRIKEALLSAPALALPDLTKPFALYVDEKEGVARGVLTQTLGPWRRPVAYLSKKLDPVASGWPTCLKAIAAVALLLKDADKLTLGQNVLVIAPHNLESIVRQPPDRWMTNARMTHYQSLLLNERVSFAPPAILNPATLLPVESDDTPIHICSEILAEETGTRPDLRDQPLPGVPAWYTDGSSFIMDGRRQAGAAIVDNKRTVWASNLPEGTSAQKAELIALTQALRLAEGKSINIYTDSRYAFATAHVHGAIYKQRGWLTSAGKDIKNKEEILALLEAIHLPKRVAIIHCPGHQRGTDPVATGNRKADEAAKQAAQSTRILTETTKNAGKRTADGSEFEKRTADGSEFESPKKKAKVE

SEQ ID NO: 1817 - protein, 2218 aa, synthetic construct
MPAAKRVKLDGGDKKYSIGLDIGTNSVGWAVITDEYKVPSKKFKVLGNTDRHSIKKNLIGALLFDSGETAEATRLKRTARRRYTRRKNRICYLQEIFSNEMAKVDDSFFHRLEESFLVEEDKKHERHPIFGNIVDEVAYHEKYPTIYHLRKKLVDSTDKADLRLIYLALAHMIKFRGHFLIEGDLNPDNSDVDKLFIQLVQTYNQLFEENPINASGVDAKAILSARLSKSRRLENLIAQLPGEKKNGLFGNLIALSLGLTPNFKSNFDLAEDAKLQLSKDTYDDDLDNLLAQIGDQYADLFLAAKNLSDAILLSDILRVNTEITKAPLSASMIKRYDEHHQDLTLLKALVRQQLPEKYKEIFFDQSKNGYAGYIDGGASQEEFYKFIKPILEKMDGTEELLVKLNREDLLRKQRTFDNGSIPHQIHLGELHAILRRQEDFYPFLKDNREKIEKILTFRIPYYVGPLARGNSRFAWMTRKSEETITPWNFEEVVDKGASAQSFIERMTNFDKNLPNEKVLPKHSLLYEYFTVYNELTKVKYVTEGMRKPAFLSGEQKKAIVDLLFKTNRKVTVKQLKEDYFKKIECFDSVEISGVEDRFNASLGTYHDLLKIIKDKDFLDNEENEDILEDIVLTLTLFEDREMIEERLKTYAHLFDDKVMKQLKRRRYTGWGRLSRKLINGIRDKQSGKTILDFLKSDGFANRNFMQLIHDDSLTFKEDIQKAQVSGQGDSLHEHIANLAGSPAIKKGILQTVKVVDELVKVMGRHKPENIVIEMARENQTTQKGQKNSRERMKRIEEGIKELGSQILKEHPVENTQLQNEKLYLYYLQNGRDMYVDQELDINRLSDYDVDHIVPQSFLKDDSIDNKVLTRSDKARGKSDNVPSEEVVKKMKNYWRQLLNAKLITQRKFDNLTKAERGGLSELDKAGFIKRQLVETRQITKHVAQILDSRMNTKYDENDKLIREVKVITLKSKLVSDFRKDFQFYKVREINNYHHAHDAYLNAVVGTALIKKYPKLESEFVYGDYKVYDVRKMIAKSEQEIGKATAKYFFYSNIMNFFKTEITLANGEIRKRPLIETNGETGEIVWDKGRDFATVRKVLSMPQVNIVKKTEVQTGGFSKESILPKRNSDKLIARKKDWDPKKYGGFDSPTVAYSVLVVAKVEKGKSKKLKSVKELLGITIMERSSFEKNPIDFLEAKGYKEVKKDLIIKLPKYSLFELENGRKRMLASAGELQKGNELALPSKYVNFLYLASHYEKLKGSPEDNEQKQLFVEQHKHYLDEIIEQISEFSKRVILADANLDKVLSAYNKHRDKPIREQAENIIHLFTLTNLGAPAAFKYFDTTIDRKRYTSTKEVLDATLIHQSITGLYETRIDLSQLGGDGGGSSGGGEAAAKGGTLGDQGSRGSDPLPEPRVTLTVEGIPTEFLVNTGAEHSVLTKPMGKMGSKRTVVAGATGSKVYPWTTKRLLKIGQKQVTHSFLVIPECPAPLLGRDLLTKLKAQIQFSTEGPQVTWEDRPAMCLVLNLEEEYRLHEKPVPPSIDPSWLQLFPMVWAEKAGMGLANQVPPVVVELKSDASPVAVRQYPMSKEAREGIRPHIQRFLDLGILVPCQSPWNTPLLPVKKPGTNDYRPVQDLREVNKRVQDIHPTVPNPYNLLSSLPPSHTWYSVLDLKDAFFCLKLHPNSQPLFAFEWRDPEKGNTGQLTWTRLPQGFKNSPTLFNEALHRDLASFRALNPQVVMLQYVDDLLVAAPTYRDCKEGTRRLLQELSKLGYRVSAKKAQLCREEVTYLGYLLKGGKRWLTPARKATVMKIPTPTTPRQVREFLGKAGFCRLFIPGFASLAAPLYPLTRPKVPFTWTEAHQEAFGRIKEALLSAPALALPDLTKPFALYVDEKEGVARGVLTQTLGPWRRPVAYLSKKLDPVASGWPTCLKAIAAVALLLKDADKLTLGQNVLVIAPHNLESIVRQPPDRWMTNARMTHYQSLLLNERVSFAPPAILNPATLLPVESDDTPIHICSEILAEETGTRPDLRDQPLPGVPAWYTDGSSFIMDGRRQAGAAIVDNKRTVWASNLPEGTSAQKAELIALTQALRLAEGKSINIYTDSRYAFATAHVHGAIYKQRGWLTSAGKDIKNKEEILALLEAIHLPKRVAIIHCPGHQRGTDPVATGNRKADEAAKQAAQSTRILTETTKNAGKRTADGSEFEKRTADGSEFESPKKKAKVE

SEQ ID NO: 1818 - protein, 2216 aa, synthetic construct
MPAAKRVKLDGGDKKYSIGLDIGTNSVGWAVITDEYKVPSKKFKVLGNTDRHSIKKNLIGALLFDSGETAEATRLKRTARRRYTRRKNRICYLQEIFSNEMAKVDDSFFHRLEESFLVEEDKKHERHPIFGNIVDEVAYHEKYPTIYHLRKKLVDSTDKADLRLIYLALAHMIKFRGHFLIEGDLNPDNSDVDKLFIQLVQTYNQLFEENPINASGVDAKAILSARLSKSRRLENLIAQLPGEKKNGLFGNLIALSLGLTPNFKSNFDLAEDAKLQLSKDTYDDDLDNLLAQIGDQYADLFLAAKNLSDAILLSDILRVNTEITKAPLSASMIKRYDEHHQDLTLLKALVRQQLPEKYKEIFFDQSKNGYAGYIDGGASQEEFYKFIKPILEKMDGTEELLVKLNREDLLRKQRTFDNGSIPHQIHLGELHAILRRQEDFYPFLKDNREKIEKILTFRIPYYVGPLARGNSRFAWMTRKSEETITPWNFEEVVDKGASAQSFIERMTNFDKNLPNEKVLPKHSLLYEYFTVYNELTKVKYVTEGMRKPAFLSGEQKKAIVDLLFKTNRKVTVKQLKEDYFKKIECFDSVEISGVEDRFNASLGTYHDLLKIIKDKDFLDNEENEDILEDIVLTLTLFEDREMIEERLKTYAHLFDDKVMKQLKRRRYTGWGRLSRKLINGIRDKQSGKTILDFLKSDGFANRNFMQLIHDDSLTFKEDIQKAQVSGQGDSLHEHIANLAGSPAIKKGILQTVKVVDELVKVMGRHKPENIVIEMARENQTTQKGQKNSRERMKRIEEGIKELGSQILKEHPVENTQLQNEKLYLYYLQNGRDMYVDQELDINRLSDYDVDHIVPQSFLKDDSIDNKVLTRSDKARGKSDNVPSEEVVKKMKNYWRQLLNAKLITQRKFDNLTKAERGGLSELDKAGFIKRQLVETRQITKHVAQILDSRMNTKYDENDKLIREVKVITLKSKLVSDFRKDFQFYKVREINNYHHAHDAYLNAVVGTALIKKYPKLESEFVYGDYKVYDVRKMIAKSEQEIGKATAKYFFYSNIMNFFKTEITLANGEIRKRPLIETNGETGEIVWDKGRDFATVRKVLSMPQVNIVKKTEVQTGGFSKESILPKRNSDKLIARKKDWDPKKYGGFDSPTVAYSVLVVAKVEKGKSKKLKSVKELLGITIMERSSFEKNPIDFLEAKGYKEVKKDLIIKLPKYSLFELENGRKRMLASAGELQKGNELALPSKYVNFLYLASHYEKLKGSPEDNEQKQLFVEQHKHYLDEIIEQISEFSKRVILADANLDKVLSAYNKHRDKPIREQAENIIHLFTLTNLGAPAAFKYFDTTIDRKRYTSTKEVLDATLIHQSITGLYETRIDLSQLGGDGGGGGGSSPAPGGTLGDQGSRGSDPLPEPRVTLTVEGIPTEFLVNTGAEHSVLTKPMGKMGSKRTVVAGATGSKVYPWTTKRLLKIGQKQVTHSFLVIPECPAPLLGRDLLTKLKAQIQFSTEGPQVTWEDRPAMCLVLNLEEEYRLHEKPVPPSIDPSWLQLFPMVWAEKAGMGLANQVPPVVVELKSDASPVAVRQYPMSKEAREGIRPHIQRFLDLGILVPCQSPWNTPLLPVKKPGTNDYRPVQDLREVNKRVQDIHPTVPNPYNLLSSLPPSHTWYSVLDLKDAFFCLKLHPNSQPLFAFEWRDPEKGNTGQLTWTRLPQGFKNSPTLFNEALHRDLASFRALNPQVVMLQYVDDLLVAAPTYRDCKEGTRRLLQELSKLGYRVSAKKAQLCREEVTYLGYLLKGGKRWLTPARKATVMKIPTPTTPRQVREFLGKAGFCRLFIPGFASLAAPLYPLTRPKVPFTWTEAHQEAFGRIKEALLSAPALALPDLTKPFALYVDEKEGVARGVLTQTLGPWRRPVAYLSKKLDPVASGWPTCLKAIAAVALLLKDADKLTLGQNVLVIAPHNLESIVRQPPDRWMTNARMTHYQSLLLNERVSFAPPAILNPATLLPVESDDTPIHICSEILAEETGTRPDLRDQPLPGVPAWYTDGSSFIMDGRRQAGAAIVDNKRTVWASNLPEGTSAQKAELIALTQALRLAEGKSINIYTDSRYAFATAHVHGAIYKQRGWLTSAGKDIKNKEEILALLEAIHLPKRVAIIHCPGHQRGTDPVATGNRKADEAAKQAAQSTRILTETTKNAGKRTADGSEFEKRTADGSEFESPKKKAKVE

SEQ ID NO: 1819 - protein, 2216 aa, synthetic construct
MPAAKRVKLDGGDKKYSIGLDIGTNSVGWAVITDEYKVPSKKFKVLGNTDRHSIKKNLIGALLFDSGETAEATRLKRTARRRYTRRKNRICYLQEIFSNEMAKVDDSFFHRLEESFLVEEDKKHERHPIFGNIVDEVAYHEKYPTIYHLRKKLVDSTDKADLRLIYLALAHMIKFRGHFLIEGDLNPDNSDVDKLFIQLVQTYNQLFEENPINASGVDAKAILSARLSKSRRLENLIAQLPGEKKNGLFGNLIALSLGLTPNFKSNFDLAEDAKLQLSKDTYDDDLDNLLAQIGDQYADLFLAAKNLSDAILLSDILRVNTEITKAPLSASMIKRYDEHHQDLTLLKALVRQQLPEKYKEIFFDQSKNGYAGYIDGGASQEEFYKFIKPILEKMDGTEELLVKLNREDLLRKQRTFDNGSIPHQIHLGELHAILRRQEDFYPFLKDNREKIEKILTFRIPYYVGPLARGNSRFAWMTRKSEETITPWNFEEVVDKGASAQSFIERMTNFDKNLPNEKVLPKHSLLYEYFTVYNELTKVKYVTEGMRKPAFLSGEQKKAIVDLLFKTNRKVTVKQLKEDYFKKIECFDSVEISGVEDRFNASLGTYHDLLKIIKDKDFLDNEENEDILEDIVLTLTLFEDREMIEERLKTYAHLFDDKVMKQLKRRRYTGWGRLSRKLINGIRDKQSGKTILDFLKSDGFANRNFMQLIHDDSLTFKEDIQKAQVSGQGDSLHEHIANLAGSPAIKKGILQTVKVVDELVKVMGRHKPENIVIEMARENQTTQKGQKNSRERMKRIEEGIKELGSQILKEHPVENTQLQNEKLYLYYLQNGRDMYVDQELDINRLSDYDVDHIVPQSFLKDDSIDNKVLTRSDKARGKSDNVPSEEVVKKMKNYWRQLLNAKLITQRKFDNLTKAERGGLSELDKAGFIKRQLVETRQITKHVAQILDSRMNTKYDENDKLIREVKVITLKSKLVSDFRKDFQFYKVREINNYHHAHDAYLNAVVGTALIKKYPKLESEFVYGDYKVYDVRKMIAKSEQEIGKATAKYFFYSNIMNFFKTEITLANGEIRKRPLIETNGETGEIVWDKGRDFATVRKVLSMPQVNIVKKTEVQTGGFSKESILPKRNSDKLIARKKDWDPKKYGGFDSPTVAYSVLVVAKVEKGKSKKLKSVKELLGITIMERSSFEKNPIDFLEAKGYKEVKKDLIIKLPKYSLFELENGRKRMLASAGELQKGNELALPSKYVNFLYLASHYEKLKGSPEDNEQKQLFVEQHKHYLDEIIEQISEFSKRVILADANLDKVLSAYNKHRDKPIREQAENIIHLFTLTNLGAPAAFKYFDTTIDRKRYTSTKEVLDATLIHQSITGLYETRIDLSQLGGDGGGGSGGGGSSGGTLGDQGSRGSDPLPEPRVTLTVEGIPTEFLVNTGAEHSVLTKPMGKMGSKRTVVAGATGSKVYPWTTKRLLKIGQKQVTHSFLVIPECPAPLLGRDLLTKLKAQIQFSTEGPQVTWEDRPAMCLVLNLEEEYRLHEKPVPPSIDPSWLQLFPMVWAEKAGMGLANQVPPVVVELKSDASPVAVRQYPMSKEAREGIRPHIQRFLDLGILVPCQSPWNTPLLPVKKPGTNDYRPVQDLREVNKRVQDIHPTVPNPYNLLSSLPPSHTWYSVLDLKDAFFCLKLHPNSQPLFAFEWRDPEKGNTGQLTWTRLPQGFKNSPTLFNEALHRDLASFRALNPQVVMLQYVDDLLVAAPTYRDCKEGTRRLLQELSKLGYRVSAKKAQLCREEVTYLGYLLKGGKRWLTPARKATVMKIPTPTTPRQVREFLGKAGFCRLFIPGFASLAAPLYPLTRPKVPFTWTEAHQEAFGRIKEALLSAPALALPDLTKPFALYVDEKEGVARGVLTQTLGPWRRPVAYLSKKLDPVASGWPTCLKAIAAVALLLKDADKLTLGQNVLVIAPHNLESIVRQPPDRWMTNARMTHYQSLLLNERVSFAPPAILNPATLLPVESDDTPIHICSEILAEETGTRPDLRDQPLPGVPAWYTDGSSFIMDGRRQAGAAIVDNKRTVWASNLPEGTSAQKAELIALTQALRLAEGKSINIYTDSRYAFATAHVHGAIYKQRGWLTSAGKDIKNKEEILALLEAIHLPKRVAIIHCPGHQRGTDPVATGNRKADEAAKQAAQSTRILTETTKNAGKRTADGSEFEKRTADGSEFESPKKKAKVE

SEQ ID NO: 1820 - protein, 2215 aa, synthetic construct
MPAAKRVKLDGGDKKYSIGLDIGTNSVGWAVITDEYKVPSKKFKVLGNTDRHSIKKNLIGALLFDSGETAEATRLKRTARRRYTRRKNRICYLQEIFSNEMAKVDDSFFHRLEESFLVEEDKKHERHPIFGNIVDEVAYHEKYPTIYHLRKKLVDSTDKADLRLIYLALAHMIKFRGHFLIEGDLNPDNSDVDKLFIQLVQTYNQLFEENPINASGVDAKAILSARLSKSRRLENLIAQLPGEKKNGLFGNLIALSLGLTPNFKSNFDLAEDAKLQLSKDTYDDDLDNLLAQIGDQYADLFLAAKNLSDAILLSDILRVNTEITKAPLSASMIKRYDEHHQDLTLLKALVRQQLPEKYKEIFFDQSKNGYAGYIDGGASQEEFYKFIKPILEKMDGTEELLVKLNREDLLRKQRTFDNGSIPHQIHLGELHAILRRQEDFYPFLKDNREKIEKILTFRIPYYVGPLARGNSRFAWMTRKSEETITPWNFEEVVDKGASAQSFIERMTNFDKNLPNEKVLPKHSLLYEYFTVYNELTKVKYVTEGMRKPAFLSGEQKKAIVDLLFKTNRKVTVKQLKEDYFKKIECFDSVEISGVEDRFNASLGTYHDLLKIIKDKDFLDNEENEDILEDIVLTLTLFEDREMIEERLKTYAHLFDDKVMKQLKRRRYTGWGRLSRKLINGIRDKQSGKTILDFLKSDGFANRNFMQLIHDDSLTFKEDIQKAQVSGQGDSLHEHIANLAGSPAIKKGILQTVKVVDELVKVMGRHKPENIVIEMARENQTTQKGQKNSRERMKRIEEGIKELGSQILKEHPVENTQLQNEKLYLYYLQNGRDMYVDQELDINRLSDYDVDHIVPQSFLKDDSIDNKVLTRSDKARGKSDNVPSEEVVKKMKNYWRQLLNAKLITQRKFDNLTKAERGGLSELDKAGFIKRQLVETRQITKHVAQILDSRMNTKYDENDKLIREVKVITLKSKLVSDFRKDFQFYKVREINNYHHAHDAYLNAVVGTALIKKYPKLESEFVYGDYKVYDVRKMIAKSEQEIGKATAKYFFYSNIMNFFKTEITLANGEIRKRPLIETNGETGEIVWDKGRDFATVRKVLSMPQVNIVKKTEVQTGGFSKESILPKRNSDKLIARKKDWDPKKYGGFDSPTVAYSVLVVAKVEKGKSKKLKSVKELLGITIMERSSFEKNPIDFLEAKGYKEVKKDLIIKLPKYSLFELENGRKRMLASAGELQKGNELALPSKYVNFLYLASHYEKLKGSPEDNEQKQLFVEQHKHYLDEIIEQISEFSKRVILADANLDKVLSAYNKHRDKPIREQAENIIHLFTLTNLGAPAAFKYFDTTIDRKRYTSTKEVLDATLIHQSITGLYETRIDLSQLGGDGGEAAAKGGGGGTLGDQGSRGSDPLPEPRVTLTVEGIPTEFLVNTGAEHSVLTKPMGKMGSKRTVVAGATGSKVYPWTTKRLLKIGQKQVTHSFLVIPECPAPLLGRDLLTKLKAQIQFSTEGPQVTWEDRPAMCLVLNLEEEYRLHEKPVPPSIDPSWLQLFPMVWAEKAGMGLANQVPPVVVELKSDASPVAVRQYPMSKEAREGIRPHIQRFLDLGILVPCQSPWNTPLLPVKKPGTNDYRPVQDLREVNKRVQDIHPTVPNPYNLLSSLPPSHTWYSVLDLKDAFFCLKLHPNSQPLFAFEWRDPEKGNTGQLTWTRLPQGFKNSPTLFNEALHRDLASFRALNPQVVMLQYVDDLLVAAPTYRDCKEGTRRLLQELSKLGYRVSAKKAQLCREEVTYLGYLLKGGKRWLTPARKATVMKIPTPTTPRQVREFLGKAGFCRLFIPGFASLAAPLYPLTRPKVPFTWTEAHQEAFGRIKEALLSAPALALPDLTKPFALYVDEKEGVARGVLTQTLGPWRRPVAYLSKKLDPVASGWPTCLKAIAAVALLLKDADKLTLGQNVLVIAPHNLESIVRQPPDRWMTNARMTHYQSLLLNERVSFAPPAILNPATLLPVESDDTPIHICSEILAEETGTRPDLRDQPLPGVPAWYTDGSSFIMDGRRQAGAAIVDNKRTVWASNLPEGTSAQKAELIALTQALRLAEGKSINIYTDSRYAFATAHVHGAIYKQRGWLTSAGKDIKNKEEILALLEAIHLPKRVAIIHCPGHQRGTDPVATGNRKADEAAKQAAQSTRILTETTKNAGKRTADGSEFEKRTADGSEFESPKKKAKVE

SEQ ID NO: 1821 - protein, 2215 aa, synthetic construct
MPAAKRVKLDGGDKKYSIGLDIGTNSVGWAVITDEYKVPSKKFKVLGNTDRHSIKKNLIGALLFDSGETAEATRLKRTARRRYTRRKNRICYLQEIFSNEMAKVDDSFFHRLEESFLVEEDKKHERHPIFGNIVDEVAYHEKYPTIYHLRKKLVDSTDKADLRLIYLALAHMIKFRGHFLIEGDLNPDNSDVDKLFIQLVQTYNQLFEENPINASGVDAKAILSARLSKSRRLENLIAQLPGEKKNGLFGNLIALSLGLTPNFKSNFDLAEDAKLQLSKDTYDDDLDNLLAQIGDQYADLFLAAKNLSDAILLSDILRVNTEITKAPLSASMIKRYDEHHQDLTLLKALVRQQLPEKYKEIFFDQSKNGYAGYIDGGASQEEFYKFIKPILEKMDGTEELLVKLNREDLLRKQRTFDNGSIPHQIHLGELHAILRRQEDFYPFLKDNREKIEKILTFRIPYYVGPLARGNSRFAWMTRKSEETITPWNFEEVVDKGASAQSFIERMTNFDKNLPNEKVLPKHSLLYEYFTVYNELTKVKYVTEGMRKPAFLSGEQKKAIVDLLFKTNRKVTVKQLKEDYFKKIECFDSVEISGVEDRFNASLGTYHDLLKIIKDKDFLDNEENEDILEDIVLTLTLFEDREMIEERLKTYAHLFDDKVMKQLKRRRYTGWGRLSRKLINGIRDKQSGKTILDFLKSDGFANRNFMQLIHDDSLTFKEDIQKAQVSGQGDSLHEHIANLAGSPAIKKGILQTVKVVDELVKVMGRHKPENIVIEMARENQTTQKGQKNSRERMKRIEEGIKELGSQILKEHPVENTQLQNEKLYLYYLQNGRDMYVDQELDINRLSDYDVDHIVPQSFLKDDSIDNKVLTRSDKARGKSDNVPSEEVVKKMKNYWRQLLNAKLITQRKFDNLTKAERGGLSELDKAGFIKRQLVETRQITKHVAQILDSRMNTKYDENDKLIREVKVITLKSKLVSDFRKDFQFYKVREINNYHHAHDAYLNAVVGTALIKKYPKLESEFVYGDYKVYDVRKMIAKSEQEIGKATAKYFFYSNIMNFFKTEITLANGEIRKRPLIETNGETGEIVWDKGRDFATVRKVLSMPQVNIVKKTEVQTGGFSKESILPKRNSDKLIARKKDWDPKKYGGFDSPTVAYSVLVVAKVEKGKSKKLKSVKELLGITIMERSSFEKNPIDFLEAKGYKEVKKDLIIKLPKYSLFELENGRKRMLASAGELQKGNELALPSKYVNFLYLASHYEKLKGSPEDNEQKQLFVEQHKHYLDEIIEQISEFSKRVILADANLDKVLSAYNKHRDKPIREQAENIIHLFTLTNLGAPAAFKYFDTTIDRKRYTSTKEVLDATLIHQSITGLYETRIDLSQLGGDGGEAAAKGGSGGTLGDQGSRGSDPLPEPRVTLTVEGIPTEFLVNTGAEHSVLTKPMGKMGSKRTVVAGATGSKVYPWTTKRLLKIGQKQVTHSFLVIPECPAPLLGRDLLTKLKAQIQFSTEGPQVTWEDRPAMCLVLNLEEEYRLHEKPVPPSIDPSWLQLFPMVWAEKAGMGLANQVPPVVVELKSDASPVAVRQYPMSKEAREGIRPHIQRFLDLGILVPCQSPWNTPLLPVKKPGTNDYRPVQDLREVNKRVQDIHPTVPNPYNLLSSLPPSHTWYSVLDLKDAFFCLKLHPNSQPLFAFEWRDPEKGNTGQLTWTRLPQGFKNSPTLFNEALHRDLASFRALNPQVVMLQYVDDLLVAAPTYRDCKEGTRRLLQELSKLGYRVSAKKAQLCREEVTYLGYLLKGGKRWLTPARKATVMKIPTPTTPRQVREFLGKAGFCRLFIPGFASLAAPLYPLTRPKVPFTWTEAHQEAFGRIKEALLSAPALALPDLTKPFALYVDEKEGVARGVLTQTLGPWRRPVAYLSKKLDPVASGWPTCLKAIAAVALLLKDADKLTLGQNVLVIAPHNLESIVRQPPDRWMTNARMTHYQSLLLNERVSFAPPAILNPATLLPVESDDTPIHICSEILAEETGTRPDLRDQPLPGVPAWYTDGSSFIMDGRRQAGAAIVDNKRTVWASNLPEGTSAQKAELIALTQALRLAEGKSINIYTDSRYAFATAHVHGAIYKQRGWLTSAGKDIKNKEEILALLEAIHLPKRVAIIHCPGHQRGTDPVATGNRKADEAAKQAAQSTRILTETTKNAGKRTADGSEFEKRTADGSEFESPKKKAKVE

SEQ ID NO: 1822 - protein, 2218 aa, synthetic construct
MPAAKRVKLDGGDKKYSIGLDIGTNSVGWAVITDEYKVPSKKFKVLGNTDRHSIKKNLIGALLFDSGETAEATRLKRTARRRYTRRKNRICYLQEIFSNEMAKVDDSFFHRLEESFLVEEDKKHERHPIFGNIVDEVAYHEKYPTIYHLRKKLVDSTDKADLRLIYLALAHMIKFRGHFLIEGDLNPDNSDVDKLFIQLVQTYNQLFEENPINASGVDAKAILSARLSKSRRLENLIAQLPGEKKNGLFGNLIALSLGLTPNFKSNFDLAEDAKLQLSKDTYDDDLDNLLAQIGDQYADLFLAAKNLSDAILLSDILRVNTEITKAPLSASMIKRYDEHHQDLTLLKALVRQQLPEKYKEIFFDQSKNGYAGYIDGGASQEEFYKFIKPILEKMDGTEELLVKLNREDLLRKQRTFDNGSIPHQIHLGELHAILRRQEDFYPFLKDNREKIEKILTFRIPYYVGPLARGNSRFAWMTRKSEETITPWNFEEVVDKGASAQSFIERMTNFDKNLPNEKVLPKHSLLYEYFTVYNELTKVKYVTEGMRKPAFLSGEQKKAIVDLLFKTNRKVTVKQLKEDYFKKIECFDSVEISGVEDRFNASLGTYHDLLKIIKDKDFLDNEENEDILEDIVLTLTLFEDREMIEERLKTYAHLFDDKVMKQLKRRRYTGWGRLSRKLINGIRDKQSGKTILDFLKSDGFANRNFMQLIHDDSLTFKEDIQKAQVSGQGDSLHEHIANLAGSPAIKKGILQTVKVVDELVKVMGRHKPENIVIEMARENQTTQKGQKNSRERMKRIEEGIKELGSQILKEHPVENTQLQNEKLYLYYLQNGRDMYVDQELDINRLSDYDVDHIVPQSFLKDDSIDNKVLTRSDKARGKSDNVPSEEVVKKMKNYWRQLLNAKLITQRKFDNLTKAERGGLSELDKAGFIKRQLVETRQITKHVAQILDSRMNTKYDENDKLIREVKVITLKSKLVSDFRKDFQFYKVREINNYHHAHDAYLNAVVGTALIKKYPKLESEFVYGDYKVYDVRKMIAKSEQEIGKATAKYFFYSNIMNFFKTEITLANGEIRKRPLIETNGETGEIVWDKGRDFATVRKVLSMPQVNIVKKTEVQTGGFSKESILPKRNSDKLIARKKDWDPKKYGGFDSPTVAYSVLVVAKVEKGKSKKLKSVKELLGITIMERSSFEKNPIDFLEAKGYKEVKKDLIIKLPKYSLFELENGRKRMLASAGELQKGNELALPSKYVNFLYLASHYEKLKGSPEDNEQKQLFVEQHKHYLDEIIEQISEFSKRVILADANLDKVLSAYNKHRDKPIREQAENIIHLFTLTNLGAPAAFKYFDTTIDRKRYTSTKEVLDATLIHQSITGLYETRIDLSQLGGDGGEAAAKPAPGSSGGTLGDQGSRGSDPLPEPRVTLTVEGIPTEFLVNTGAEHSVLTKPMGKMGSKRTVVAGATGSKVYPWTTKRLLKIGQKQVTHSFLVIPECPAPLLGRDLLTKLKAQIQFSTEGPQVTWEDRPAMCLVLNLEEEYRLHEKPVPPSIDPSWLQLFPMVWAEKAGMGLANQVPPVVVELKSDASPVAVRQYPMSKEAREGIRPHIQRFLDLGILVPCQSPWNTPLLPVKKPGTNDYRPVQDLREVNKRVQDIHPTVPNPYNLLSSLPPSHTWYSVLDLKDAFFCLKLHPNSQPLFAFEWRDPEKGNTGQLTWTRLPQGFKNSPTLFNEALHRDLASFRALNPQVVMLQYVDDLLVAAPTYRDCKEGTRRLLQELSKLGYRVSAKKAQLCREEVTYLGYLLKGGKRWLTPARKATVMKIPTPTTPRQVREFLGKAGFCRLFIPGFASLAAPLYPLTRPKVPFTWTEAHQEAFGRIKEALLSAPALALPDLTKPFALYVDEKEGVARGVLTQTLGPWRRPVAYLSKKLDPVASGWPTCLKAIAAVALLLKDADKLTLGQNVLVIAPHNLESIVRQPPDRWMTNARMTHYQSLLLNERVSFAPPAILNPATLLPVESDDTPIHICSEILAEETGTRPDLRDQPLPGVPAWYTDGSSFIMDGRRQAGAAIVDNKRTVWASNLPEGTSAQKAELIALTQALRLAEGKSINIYTDSRYAFATAHVHGAIYKQRGWLTSAGKDIKNKEEILALLEAIHLPKRVAIIHCPGHQRGTDPVATGNRKADEAAKQAAQSTRILTETTKNAGKRTADGSEFEKRTADGSEFESPKKKAKVE

SEQ ID NO: 1823 - protein, 2218 aa, synthetic construct
MPAAKRVKLDGGDKKYSIGLDIGTNSVGWAVITDEYKVPSKKFKVLGNTDRHSIKKNLIGALLFDSGETAEATRLKRTARRRYTRRKNRICYLQEIFSNEMAKVDDSFFHRLEESFLVEEDKKHERHPIFGNIVDEVAYHEKYPTIYHLRKKLVDSTDKADLRLIYLALAHMIKFRGHFLIEGDLNPDNSDVDKLFIQLVQTYNQLFEENPINASGVDAKAILSARLSKSRRLENLIAQLPGEKKNGLFGNLIALSLGLTPNFKSNFDLAEDAKLQLSKDTYDDDLDNLLAQIGDQYADLFLAAKNLSDAILLSDILRVNTEITKAPLSASMIKRYDEHHQDLTLLKALVRQQLPEKYKEIFFDQSKNGYAGYIDGGASQEEFYKFIKPILEKMDGTEELLVKLNREDLLRKQRTFDNGSIPHQIHLGELHAILRRQEDFYPFLKDNREKIEKILTFRIPYYVGPLARGNSRFAWMTRKSEETITPWNFEEVVDKGASAQSFIERMTNFDKNLPNEKVLPKHSLLYEYFTVYNELTKVKYVTEGMRKPAFLSGEQKKAIVDLLFKTNRKVTVKQLKEDYFKKIECFDSVEISGVEDRFNASLGTYHDLLKIIKDKDFLDNEENEDILEDIVLTLTLFEDREMIEERLKTYAHLFDDKVMKQLKRRRYTGWGRLSRKLINGIRDKQSGKTILDFLKSDGFANRNFMQLIHDDSLTFKEDIQKAQVSGQGDSLHEHIANLAGSPAIKKGILQTVKVVDELVKVMGRHKPENIVIEMARENQTTQKGQKNSRERMKRIEEGIKELGSQILKEHPVENTQLQNEKLYLYYLQNGRDMYVDQELDINRLSDYDVDHIVPQSFLKDDSIDNKVLTRSDKARGKSDNVPSEEVVKKMKNYWRQLLNAKLITQRKFDNLTKAERGGLSELDKAGFIKRQLVETRQITKHVAQILDSRMNTKYDENDKLIREVKVITLKSKLVSDFRKDFQFYKVREINNYHHAHDAYLNAVVGTALIKKYPKLESEFVYGDYKVYDVRKMIAKSEQEIGKATAKYFFYSNIMNFFKTEITLANGEIRKRPLIETNGETGEIVWDKGRDFATVRKVLSMPQVNIVKKTEVQTGGFSKESILPKRNSDKLIARKKDWDPKKYGGFDSPTVAYSVLVVAKVEKGKSKKLKSVKELLGITIMERSSFEKNPIDFLEAKGYKEVKKDLIIKLPKYSLFELENGRKRMLASAGELQKGNELALPSKYVNFLYLASHYEKLKGSPEDNEQKQLFVEQHKHYLDEIIEQISEFSKRVILADANLDKVLSAYNKHRDKPIREQAENIIHLFTLTNLGAPAAFKYFDTTIDRKRYTSTKEVLDATLIHQSITGLYETRIDLSQLGGDGGGGGGSSEAAAKGGTLGDQGSRGSDPLPEPRVTLTVEGIPTEFLVNTGAEHSVLTKPMGKMGSKRTVVAGATGSKVYPWTTKRLLKIGQKQVTHSFLVIPECPAPLLGRDLLTKLKAQIQFSTEGPQVTWEDRPAMCLVLNLEEEYRLHEKPVPPSIDPSWLQLFPMVWAEKAGMGLANQVPPVVVELKSDASPVAVRQYPMSKEAREGIRPHIQRFLDLGILVPCQSPWNTPLLPVKKPGTNDYRPVQDLREVNKRVQDIHPTVPNPYNLLSSLPPSHTWYSVLDLKDAFFCLKLHPNSQPLFAFEWRDPEKGNTGQLTWTRLPQGFKNSPTLFNEALHRDLASFRALNPQVVMLQYVDDLLVAAPTYRDCKEGTRRLLQELSKLGYRVSAKKAQLCREEVTYLGYLLKGGKRWLTPARKATVMKIPTPTTPRQVREFLGKAGFCRLFIPGFASLAAPLYPLTRPKVPFTWTEAHQEAFGRIKEALLSAPALALPDLTKPFALYVDEKEGVARGVLTQTLGPWRRPVAYLSKKLDPVASGWPTCLKAIAAVALLLKDADKLTLGQNVLVIAPHNLESIVRQPPDRWMTNARMTHYQSLLLNERVSFAPPAILNPATLLPVESDDTPIHICSEILAEETGTRPDLRDQPLPGVPAWYTDGSSFIMDGRRQAGAAIVDNKRTVWASNLPEGTSAQKAELIALTQALRLAEGKSINIYTDSRYAFATAHVHGAIYKQRGWLTSAGKDIKNKEEILALLEAIHLPKRVAIIHCPGHQRGTDPVATGNRKADEAAKQAAQSTRILTETTKNAGKRTADGSEFEKRTADGSEFESPKKKAKVE

SEQ ID NO: 1824 - protein, 2216 aa, synthetic construct
MPAAKRVKLDGGDKKYSIGLDIGTNSVGWAVITDEYKVPSKKFKVLGNTDRHSIKKNLIGALLFDSGETAEATRLKRTARRRYTRRKNRICYLQEIFSNEMAKVDDSFFHRLEESFLVEEDKKHERHPIFGNIVDEVAYHEKYPTIYHLRKKLVDSTDKADLRLIYLALAHMIKFRGHFLIEGDLNPDNSDVDKLFIQLVQTYNQLFEENPINASGVDAKAILSARLSKSRRLENLIAQLPGEKKNGLFGNLIALSLGLTPNFKSNFDLAEDAKLQLSKDTYDDDLDNLLAQIGDQYADLFLAAKNLSDAILLSDILRVNTEITKAPLSASMIKRYDEHHQDLTLLKALVRQQLPEKYKEIFFDQSKNGYAGYIDGGASQEEFYKFIKPILEKMDGTEELLVKLNREDLLRKQRTFDNGSIPHQIHLGELHAILRRQEDFYPFLKDNREKIEKILTFRIPYYVGPLARGNSRFAWMTRKSEETITPWNFEEVVDKGASAQSFIERMTNFDKNLPNEKVLPKHSLLYEYFTVYNELTKVKYVTEGMRKPAFLSGEQKKAIVDLLFKTNRKVTVKQLKEDYFKKIECFDSVEISGVEDRFNASLGTYHDLLKIIKDKDFLDNEENEDILEDIVLTLTLFEDREMIEERLKTYAHLFDDKVMKQLKRRRYTGWGRLSRKLINGIRDKQSGKTILDFLKSDGFANRNFMQLIHDDSLTFKEDIQKAQVSGQGDSLHEHIANLAGSPAIKKGILQTVKVVDELVKVMGRHKPENIVIEMARENQTTQKGQKNSRERMKRIEEGIKELGSQILKEHPVENTQLQNEKLYLYYLQNGRDMYVDQELDINRLSDYDVDHIVPQSFLKDDSIDNKVLTRSDKARGKSDNVPSEEVVKKMKNYWRQLLNAKLITQRKFDNLTKAERGGLSELDKAGFIKRQLVETRQITKHVAQILDSRMNTKYDENDKLIREVKVITLKSKLVSDFRKDFQFYKVREINNYHHAHDAYLNAVVGTALIKKYPKLESEFVYGDYKVYDVRKMIAKSEQEIGKATAKYFFYSNIMNFFKTEITLANGEIRKRPLIETNGETGEIVWDKGRDFATVRKVLSMPQVNIVKKTEVQTGGFSKESILPKRNSDKLIARKKDWDPKKYGGFDSPTVAYSVLVVAKVEKGKSKKLKSVKELLGITIMERSSFEKNPIDFLEAKGYKEVKKDLIIKLPKYSLFELENGRKRMLASAGELQKGNELALPSKYVNFLYLASHYEKLKGSPEDNEQKQLFVEQHKHYLDEIIEQISEFSKRVILADANLDKVLSAYNKHRDKPIREQAENIIHLFTLTNLGAPAAFKYFDTTIDRKRYTSTKEVLDATLIHQSITGLYETRIDLSQLGGDGGPAPAPAPAPGGTLGDQGSRGSDPLPEPRVTLTVEGIPTEFLVNTGAEHSVLTKPMGKMGSKRTVVAGATGSKVYPWTTKRLLKIGQKQVTHSFLVIPECPAPLLGRDLLTKLKAQIQFSTEGPQVTWEDRPAMCLVLNLEEEYRLHEKPVPPSIDPSWLQLFPMVWAEKAGMGLANQVPPVVVELKSDASPVAVRQYPMSKEAREGIRPHIQRFLDLGILVPCQSPWNTPLLPVKKPGTNDYRPVQDLREVNKRVQDIHPTVPNPYNLLSSLPPSHTWYSVLDLKDAFFCLKLHPNSQPLFAFEWRDPEKGNTGQLTWTRLPQGFKNSPTLFNEALHRDLASFRALNPQVVMLQYVDDLLVAAPTYRDCKEGTRRLLQELSKLGYRVSAKKAQLCREEVTYLGYLLKGGKRWLTPARKATVMKIPTPTTPRQVREFLGKAGFCRLFIPGFASLAAPLYPLTRPKVPFTWTEAHQEAFGRIKEALLSAPALALPDLTKPFALYVDEKEGVARGVLTQTLGPWRRPVAYLSKKLDPVASGWPTCLKAIAAVALLLKDADKLTLGQNVLVIAPHNLESIVRQPPDRWMTNARMTHYQSLLLNERVSFAPPAILNPATLLPVESDDTPIHICSEILAEETGTRPDLRDQPLPGVPAWYTDGSSFIMDGRRQAGAAIVDNKRTVWASNLPEGTSAQKAELIALTQALRLAEGKSINIYTDSRYAFATAHVHGAIYKQRGWLTSAGKDIKNKEEILALLEAIHLPKRVAIIHCPGHQRGTDPVATGNRKADEAAKQAAQSTRILTETTKNAGKRTADGSEFEKRTADGSEFESPKKKAKVE

SEQ ID NO: 1825 - protein, 2215 aa, synthetic construct
MPAAKRVKLDGGDKKYSIGLDIGTNSVGWAVITDEYKVPSKKFKVLGNTDRHSIKKNLIGALLFDSGETAEATRLKRTARRRYTRRKNRICYLQEIFSNEMAKVDDSFFHRLEESFLVEEDKKHERHPIFGNIVDEVAYHEKYPTIYHLRKKLVDSTDKADLRLIYLALAHMIKFRGHFLIEGDLNPDNSDVDKLFIQLVQTYNQLFEENPINASGVDAKAILSARLSKSRRLENLIAQLPGEKKNGLFGNLIALSLGLTPNFKSNFDLAEDAKLQLSKDTYDDDLDNLLAQIGDQYADLFLAAKNLSDAILLSDILRVNTEITKAPLSASMIKRYDEHHQDLTLLKALVRQQLPEKYKEIFFDQSKNGYAGYIDGGASQEEFYKFIKPILEKMDGTEELLVKLNREDLLRKQRTFDNGSIPHQIHLGELHAILRRQEDFYPFLKDNREKIEKILTFRIPYYVGPLARGNSRFAWMTRKSEETITPWNFEEVVDKGASAQSFIERMTNFDKNLPNEKVLPKHSLLYEYFTVYNELTKVKYVTEGMRKPAFLSGEQKKAIVDLLFKTNRKVTVKQLKEDYFKKIECFDSVEISGVEDRFNASLGTYHDLLKIIKDKDFLDNEENEDILEDIVLTLTLFEDREMIEERLKTYAHLFDDKVMKQLKRRRYTGWGRLSRKLINGIRDKQSGKTILDFLKSDGFANRNFMQLIHDDSLTFKEDIQKAQVSGQGDSLHEHIANLAGSPAIKKGILQTVKVVDELVKVMGRHKPENIVIEMARENQTTQKGQKNSRERMKRIEEGIKELGSQILKEHPVENTQLQNEKLYLYYLQNGRDMYVDQELDINRLSDYDVDHIVPQSFLKDDSIDNKVLTRSDKARGKSDNVPSEEVVKKMKNYWRQLLNAKLITQRKFDNLTKAERGGLSELDKAGFIKRQLVETRQITKHVAQILDSRMNTKYDENDKLIREVKVITLKSKLVSDFRKDFQFYKVREINNYHHAHDAYLNAVVGTALIKKYPKLESEFVYGDYKVYDVRKMIAKSEQEIGKATAKYFFYSNIMNFFKTEITLANGEIRKRPLIETNGETGEIVWDKGRDFATVRKVLSMPQVNIVKKTEVQTGGFSKESILPKRNSDKLIARKKDWDPKKYGGFDSPTVAYSVLVVAKVEKGKSKKLKSVKELLGITIMERSSFEKNPIDFLEAKGYKEVKKDLIIKLPKYSLFELENGRKRMLASAGELQKGNELALPSKYVNFLYLASHYEKLKGSPEDNEQKQLFVEQHKHYLDEIIEQISEFSKRVILADANLDKVLSAYNKHRDKPIREQAENIIHLFTLTNLGAPAAFKYFDTTIDRKRYTSTKEVLDATLIHQSITGLYETRIDLSQLGGDGGGGSEAAAKGGTLGDQGSRGSDPLPEPRVTLTVEGIPTEFLVNTGAEHSVLTKPMGKMGSKRTVVAGATGSKVYPWTTKRLLKIGQKQVTHSFLVIPECPAPLLGRDLLTKLKAQIQFSTEGPQVTWEDRPAMCLVLNLEEEYRLHEKPVPPSIDPSWLQLFPMVWAEKAGMGLANQVPPVVVELKSDASPVAVRQYPMSKEAREGIRPHIQRFLDLGILVPCQSPWNTPLLPVKKPGTNDYRPVQDLREVNKRVQDIHPTVPNPYNLLSSLPPSHTWYSVLDLKDAFFCLKLHPNSQPLFAFEWRDPEKGNTGQLTWTRLPQGFKNSPTLFNEALHRDLASFRALNPQVVMLQYVDDLLVAAPTYRDCKEGTRRLLQELSKLGYRVSAKKAQLCREEVTYLGYLLKGGKRWLTPARKATVMKIPTPTTPRQVREFLGKAGFCRLFIPGFASLAAPLYPLTRPKVPFTWTEAHQEAFGRIKEALLSAPALALPDLTKPFALYVDEKEGVARGVLTQTLGPWRRPVAYLSKKLDPVASGWPTCLKAIAAVALLLKDADKLTLGQNVLVIAPHNLESIVRQPPDRWMTNARMTHYQSLLLNERVSFAPPAILNPATLLPVESDDTPIHICSEILAEETGTRPDLRDQPLPGVPAWYTDGSSFIMDGRRQAGAAIVDNKRTVWASNLPEGTSAQKAELIALTQALRLAEGKSINIYTDSRYAFATAHVHGAIYKQRGWLTSAGKDIKNKEEILALLEAIHLPKRVAIIHCPGHQRGTDPVATGNRKADEAAKQAAQSTRILTETTKNAGKRTADGSEFEKRTADGSEFESPKKKAKVE

SEQ ID NO: 1826 - protein, 2216 aa, synthetic construct
MPAAKRVKLDGGDKKYSIGLDIGTNSVGWAVITDEYKVPSKKFKVLGNTDRHSIKKNLIGALLFDSGETAEATRLKRTARRRYTRRKNRICYLQEIFSNEMAKVDDSFFHRLEESFLVEEDKKHERHPIFGNIVDEVAYHEKYPTIYHLRKKLVDSTDKADLRLIYLALAHMIKFRGHFLIEGDLNPDNSDVDKLFIQLVQTYNQLFEENPINASGVDAKAILSARLSKSRRLENLIAQLPGEKKNGLFGNLIALSLGLTPNFKSNFDLAEDAKLQLSKDTYDDDLDNLLAQIGDQYADLFLAAKNLSDAILLSDILRVNTEITKAPLSASMIKRYDEHHQDLTLLKALVRQQLPEKYKEIFFDQSKNGYAGYIDGGASQEEFYKFIKPILEKMDGTEELLVKLNREDLLRKQRTFDNGSIPHQIHLGELHAILRRQEDFYPFLKDNREKIEKILTFRIPYYVGPLARGNSRFAWMTRKSEETITPWNFEEVVDKGASAQSFIERMTNFDKNLPNEKVLPKHSLLYEYFTVYNELTKVKYVTEGMRKPAFLSGEQKKAIVDLLFKTNRKVTVKQLKEDYFKKIECFDSVEISGVEDRFNASLGTYHDLLKIIKDKDFLDNEENEDILEDIVLTLTLFEDREMIEERLKTYAHLFDDKVMKQLKRRRYTGWGRLSRKLINGIRDKQSGKTILDFLKSDGFANRNFMQLIHDDSLTFKEDIQKAQVSGQGDSLHEHIANLAGSPAIKKGILQTVKVVDELVKVMGRHKPENIVIEMARENQTTQKGQKNSRERMKRIEEGIKELGSQILKEHPVENTQLQNEKLYLYYLQNGRDMYVDQELDINRLSDYDVDHIVPQSFLKDDSIDNKVLTRSDKARGKSDNVPSEEVVKKMKNYWRQLLNAKLITQRKFDNLTKAERGGLSELDKAGFIKRQLVETRQITKHVAQILDSRMNTKYDENDKLIREVKVITLKSKLVSDFRKDFQFYKVREINNYHHAHDAYLNAVVGTALIKKYPKLESEFVYGDYKVYDVRKMIAKSEQEIGKATAKYFFYSNIMNFFKTEITLANGEIRKRPLIETNGETGEIVWDKGRDFATVRKVLSMPQVNIVKKTEVQTGGFSKESILPKRNSDKLIARKKDWDPKKYGGFDSPTVAYSVLVVAKVEKGKSKKLKSVKELLGITIMERSSFEKNPIDFLEAKGYKEVKKDLIIKLPKYSLFELENGRKRMLASAGELQKGNELALPSKYVNFLYLASHYEKLKGSPEDNEQKQLFVEQHKHYLDEIIEQISEFSKRVILADANLDKVLSAYNKHRDKPIREQAENIIHLFTLTNLGAPAAFKYFDTTIDRKRYTSTKEVLDATLIHQSITGLYETRIDLSQLGGDGGGGGPAPGGSGGTLGDQGSRGSDPLPEPRVTLTVEGIPTEFLVNTGAEHSVLTKPMGKMGSKRTVVAGATGSKVYPWTTKRLLKIGQKQVTHSFLVIPECPAPLLGRDLLTKLKAQIQFSTEGPQVTWEDRPAMCLVLNLEEEYRLHEKPVPPSIDPSWLQLFPMVWAEKAGMGLANQVPPVVVELKSDASPVAVRQYPMSKEAREGIRPHIQRFLDLGILVPCQSPWNTPLLPVKKPGTNDYRPVQDLREVNKRVQDIHPTVPNPYNLLSSLPPSHTWYSVLDLKDAFFCLKLHPNSQPLFAFEWRDPEKGNTGQLTWTRLPQGFKNSPTLFNEALHRDLASFRALNPQVVMLQYVDDLLVAAPTYRDCKEGTRRLLQELSKLGYRVSAKKAQLCREEVTYLGYLLKGGKRWLTPARKATVMKIPTPTTPRQVREFLGKAGFCRLFIPGFASLAAPLYPLTRPKVPFTWTEAHQEAFGRIKEALLSAPALALPDLTKPFALYVDEKEGVARGVLTQTLGPWRRPVAYLSKKLDPVASGWPTCLKAIAAVALLLKDADKLTLGQNVLVIAPHNLESIVRQPPDRWMTNARMTHYQSLLLNERVSFAPPAILNPATLLPVESDDTPIHICSEILAEETGTRPDLRDQPLPGVPAWYTDGSSFIMDGRRQAGAAIVDNKRTVWASNLPEGTSAQKAELIALTQALRLAEGKSINIYTDSRYAFATAHVHGAIYKQRGWLTSAGKDIKNKEEILALLEAIHLPKRVAIIHCPGHQRGTDPVATGNRKADEAAKQAAQSTRILTETTKNAGKRTADGSEFEKRTADGSEFESPKKKAKVE

SEQ ID NO: 1827 - protein, 2216 aa, synthetic construct
MPAAKRVKLDGGDKKYSIGLDIGTNSVGWAVITDEYKVPSKKFKVLGNTDRHSIKKNLIGALLFDSGETAEATRLKRTARRRYTRRKNRICYLQEIFSNEMAKVDDSFFHRLEESFLVEEDKKHERHPIFGNIVDEVAYHEKYPTIYHLRKKLVDSTDKADLRLIYLALAHMIKFRGHFLIEGDLNPDNSDVDKLFIQLVQTYNQLFEENPINASGVDAKAILSARLSKSRRLENLIAQLPGEKKNGLFGNLIALSLGLTPNFKSNFDLAEDAKLQLSKDTYDDDLDNLLAQIGDQYADLFLAAKNLSDAILLSDILRVNTEITKAPLSASMIKRYDEHHQDLTLLKALVRQQLPEKYKEIFFDQSKNGYAGYIDGGASQEEFYKFIKPILEKMDGTEELLVKLNREDLLRKQRTFDNGSIPHQIHLGELHAILRRQEDFYPFLKDNREKIEKILTFRIPYYVGPLARGNSRFAWMTRKSEETITPWNFEEVVDKGASAQSFIERMTNFDKNLPNEKVLPKHSLLYEYFTVYNELTKVKYVTEGMRKPAFLSGEQKKAIVDLLFKTNRKVTVKQLKEDYFKKIECFDSVEISGVEDRFNASLGTYHDLLKIIKDKDFLDNEENEDILEDIVLTLTLFEDREMIEERLKTYAHLFDDKVMKQLKRRRYTGWGRLSRKLINGIRDKQSGKTILDFLKSDGFANRNFMQLIHDDSLTFKEDIQKAQVSGQGDSLHEHIANLAGSPAIKKGILQTVKVVDELVKVMGRHKPENIVIEMARENQTTQKGQKNSRERMKRIEEGIKELGSQILKEHPVENTQLQNEKLYLYYLQNGRDMYVDQELDINRLSDYDVDHIVPQSFLKDDSIDNKVLTRSDKARGKSDNVPSEEVVKKMKNYWRQLLNAKLITQRKFDNLTKAERGGLSELDKAGFIKRQLVETRQITKHVAQILDSRMNTKYDENDKLIREVKVITLKSKLVSDFRKDFQFYKVREINNYHHAHDAYLNAVVGTALIKKYPKLESEFVYGDYKVYDVRKMIAKSEQEIGKATAKYFFYSNIMNFFKTEITLANGEIRKRPLIETNGETGEIVWDKGRDFATVRKVLSMPQVNIVKKTEVQTGGFSKESILPKRNSDKLIARKKDWDPKKYGGFDSPTVAYSVLVVAKVEKGKSKKLKSVKELLGITIMERSSFEKNPIDFLEAKGYKEVKKDLIIKLPKYSLFELENGRKRMLASAGELQKGNELALPSKYVNFLYLASHYEKLKGSPEDNEQKQLFVEQHKHYLDEIIEQISEFSKRVILADANLDKVLSAYNKHRDKPIREQAENIIHLFTLTNLGAPAAFKYFDTTIDRKRYTSTKEVLDATLIHQSITGLYETRIDLSQLGGDGGPAPGGSGSSGGTLGDQGSRGSDPLPEPRVTLTVEGIPTEFLVNTGAEHSVLTKPMGKMGSKRTVVAGATGSKVYPWTTKRLLKIGQKQVTHSFLVIPECPAPLLGRDLLTKLKAQIQFSTEGPQVTWEDRPAMCLVLNLEEEYRLHEKPVPPSIDPSWLQLFPMVWAEKAGMGLANQVPPVVVELKSDASPVAVRQYPMSKEAREGIRPHIQRFLDLGILVPCQSPWNTPLLPVKKPGTNDYRPVQDLREVNKRVQDIHPTVPNPYNLLSSLPPSHTWYSVLDLKDAFFCLKLHPNSQPLFAFEWRDPEKGNTGQLTWTRLPQGFKNSPTLFNEALHRDLASFRALNPQVVMLQYVDDLLVAAPTYRDCKEGTRRLLQELSKLGYRVSAKKAQLCREEVTYLGYLLKGGKRWLTPARKATVMKIPTPTTPRQVREFLGKAGFCRLFIPGFASLAAPLYPLTRPKVPFTWTEAHQEAFGRIKEALLSAPALALPDLTKPFALYVDEKEGVARGVLTQTLGPWRRPVAYLSKKLDPVASGWPTCLKAIAAVALLLKDADKLTLGQNVLVIAPHNLESIVRQPPDRWMTNARMTHYQSLLLNERVSFAPPAILNPATLLPVESDDTPIHICSEILAEETGTRPDLRDQPLPGVPAWYTDGSSFIMDGRRQAGAAIVDNKRTVWASNLPEGTSAQKAELIALTQALRLAEGKSINIYTDSRYAFATAHVHGAIYKQRGWLTSAGKDIKNKEEILALLEAIHLPKRVAIIHCPGHQRGTDPVATGNRKADEAAKQAAQSTRILTETTKNAGKRTADGSEFEKRTADGSEFESPKKKAKVE

SEQ ID NO: 1828 - protein, 2212 aa, synthetic construct
MPAAKRVKLDGGDKKYSIGLDIGTNSVGWAVITDEYKVPSKKFKVLGNTDRHSIKKNLIGALLFDSGETAEATRLKRTARRRYTRRKNRICYLQEIFSNEMAKVDDSFFHRLEESFLVEEDKKHERHPIFGNIVDEVAYHEKYPTIYHLRKKLVDSTDKADLRLIYLALAHMIKFRGHFLIEGDLNPDNSDVDKLFIQLVQTYNQLFEENPINASGVDAKAILSARLSKSRRLENLIAQLPGEKKNGLFGNLIALSLGLTPNFKSNFDLAEDAKLQLSKDTYDDDLDNLLAQIGDQYADLFLAAKNLSDAILLSDILRVNTEITKAPLSASMIKRYDEHHQDLTLLKALVRQQLPEKYKEIFFDQSKNGYAGYIDGGASQEEFYKFIKPILEKMDGTEELLVKLNREDLLRKQRTFDNGSIPHQIHLGELHAILRRQEDFYPFLKDNREKIEKILTFRIPYYVGPLARGNSRFAWMTRKSEETITPWNFEEVVDKGASAQSFIERMTNFDKNLPNEKVLPKHSLLYEYFTVYNELTKVKYVTEGMRKPAFLSGEQKKAIVDLLFKTNRKVTVKQLKEDYFKKIECFDSVEISGVEDRFNASLGTYHDLLKIIKDKDFLDNEENEDILEDIVLTLTLFEDREMIEERLKTYAHLFDDKVMKQLKRRRYTGWGRLSRKLINGIRDKQSGKTILDFLKSDGFANRNFMQLIHDDSLTFKEDIQKAQVSGQGDSLHEHIANLAGSPAIKKGILQTVKVVDELVKVMGRHKPENIVIEMARENQTTQKGQKNSRERMKRIEEGIKELGSQILKEHPVENTQLQNEKLYLYYLQNGRDMYVDQELDINRLSDYDVDHIVPQSFLKDDSIDNKVLTRSDKARGKSDNVPSEEVVKKMKNYWRQLLNAKLITQRKFDNLTKAERGGLSELDKAGFIKRQLVETRQITKHVAQILDSRMNTKYDENDKLIREVKVITLKSKLVSDFRKDFQFYKVREINNYHHAHDAYLNAVVGTALIKKYPKLESEFVYGDYKVYDVRKMIAKSEQEIGKATAKYFFYSNIMNFFKTEITLANGEIRKRPLIETNGETGEIVWDKGRDFATVRKVLSMPQVNIVKKTEVQTGGFSKESILPKRNSDKLIARKKDWDPKKYGGFDSPTVAYSVLVVAKVEKGKSKKLKSVKELLGITIMERSSFEKNPIDFLEAKGYKEVKKDLIIKLPKYSLFELENGRKRMLASAGELQKGNELALPSKYVNFLYLASHYEKLKGSPEDNEQKQLFVEQHKHYLDEIIEQISEFSKRVILADANLDKVLSAYNKHRDKPIREQAENIIHLFTLTNLGAPAAFKYFDTTIDRKRYTSTKEVLDATLIHQSITGLYETRIDLSQLGGDGGGGGGGGGTLGDQGSRGSDPLPEPRVTLTVEGIPTEFLVNTGAEHSVLTKPMGKMGSKRTVVAGATGSKVYPWTTKRLLKIGQKQVTHSFLVIPECPAPLLGRDLLTKLKAQIQFSTEGPQVTWEDRPAMCLVLNLEEEYRLHEKPVPPSIDPSWLQLFPMVWAEKAGMGLANQVPPVVVELKSDASPVAVRQYPMSKEAREGIRPHIQRFLDLGILVPCQSPWNTPLLPVKKPGTNDYRPVQDLREVNKRVQDIHPTVPNPYNLLSSLPPSHTWYSVLDLKDAFFCLKLHPNSQPLFAFEWRDPEKGNTGQLTWTRLPQGFKNSPTLFNEALHRDLASFRALNPQVVMLQYVDDLLVAAPTYRDCKEGTRRLLQELSKLGYRVSAKKAQLCREEVTYLGYLLKGGKRWLTPARKATVMKIPTPTTPRQVREFLGKAGFCRLFIPGFASLAAPLYPLTRPKVPFTWTEAHQEAFGRIKEALLSAPALALPDLTKPFALYVDEKEGVARGVLTQTLGPWRRPVAYLSKKLDPVASGWPTCLKAIAAVALLLKDADKLTLGQNVLVIAPHNLESIVRQPPDRWMTNARMTHYQSLLLNERVSFAPPAILNPATLLPVESDDTPIHICSEILAEETGTRPDLRDQPLPGVPAWYTDGSSFIMDGRRQAGAAIVDNKRTVWASNLPEGTSAQKAELIALTQALRLAEGKSINIYTDSRYAFATAHVHGAIYKQRGWLTSAGKDIKNKEEILALLEAIHLPKRVAIIHCPGHQRGTDPVATGNRKADEAAKQAAQSTRILTETTKNAGKRTADGSEFEKRTADGSEFESPKKKAKVE

SEQ ID NO: 1829 - protein, 2218 aa, synthetic construct
MPAAKRVKLDGGDKKYSIGLDIGTNSVGWAVITDEYKVPSKKFKVLGNTDRHSIKKNLIGALLFDSGETAEATRLKRTARRRYTRRKNRICYLQEIFSNEMAKVDDSFFHRLEESFLVEEDKKHERHPIFGNIVDEVAYHEKYPTIYHLRKKLVDSTDKADLRLIYLALAHMIKFRGHFLIEGDLNPDNSDVDKLFIQLVQTYNQLFEENPINASGVDAKAILSARLSKSRRLENLIAQLPGEKKNGLFGNLIALSLGLTPNFKSNFDLAEDAKLQLSKDTYDDDLDNLLAQIGDQYADLFLAAKNLSDAILLSDILRVNTEITKAPLSASMIKRYDEHHQDLTLLKALVRQQLPEKYKEIFFDQSKNGYAGYIDGGASQEEFYKFIKPILEKMDGTEELLVKLNREDLLRKQRTFDNGSIPHQIHLGELHAILRRQEDFYPFLKDNREKIEKILTFRIPYYVGPLARGNSRFAWMTRKSEETITPWNFEEVVDKGASAQSFIERMTNFDKNLPNEKVLPKHSLLYEYFTVYNELTKVKYVTEGMRKPAFLSGEQKKAIVDLLFKTNRKVTVKQLKEDYFKKIECFDSVEISGVEDRFNASLGTYHDLLKIIKDKDFLDNEENEDILEDIVLTLTLFEDREMIEERLKTYAHLFDDKVMKQLKRRRYTGWGRLSRKLINGIRDKQSGKTILDFLKSDGFANRNFMQLIHDDSLTFKEDIQKAQVSGQGDSLHEHIANLAGSPAIKKGILQTVKVVDELVKVMGRHKPENIVIEMARENQTTQKGQKNSRERMKRIEEGIKELGSQILKEHPVENTQLQNEKLYLYYLQNGRDMYVDQELDINRLSDYDVDHIVPQSFLKDDSIDNKVLTRSDKARGKSDNVPSEEVVKKMKNYWRQLLNAKLITQRKFDNLTKAERGGLSELDKAGFIKRQLVETRQITKHVAQILDSRMNTKYDENDKLIREVKVITLKSKLVSDFRKDFQFYKVREINNYHHAHDAYLNAVVGTALIKKYPKLESEFVYGDYKVYDVRKMIAKSEQEIGKATAKYFFYSNIMNFFKTEITLANGEIRKRPLIETNGETGEIVWDKGRDFATVRKVLSMPQVNIVKKTEVQTGGFSKESILPKRNSDKLIARKKDWDPKKYGGFDSPTVAYSVLVVAKVEKGKSKKLKSVKELLGITIMERSSFEKNPIDFLEAKGYKEVKKDLIIKLPKYSLFELENGRKRMLASAGELQKGNELALPSKYVNFLYLASHYEKLKGSPEDNEQKQLFVEQHKHYLDEIIEQISEFSKRVILADANLDKVLSAYNKHRDKPIREQAENIIHLFTLTNLGAPAAFKYFDTTIDRKRYTSTKEVLDATLIHQSITGLYETRIDLSQLGGDGGGGSEAAAKGGGGGTLGDQGSRGSDPLPEPRVTLTVEGIPTEFLVNTGAEHSVLTKPMGKMGSKRTVVAGATGSKVYPWTTKRLLKIGQKQVTHSFLVIPECPAPLLGRDLLTKLKAQIQFSTEGPQVTWEDRPAMCLVLNLEEEYRLHEKPVPPSIDPSWLQLFPMVWAEKAGMGLANQVPPVVVELKSDASPVAVRQYPMSKEAREGIRPHIQRFLDLGILVPCQSPWNTPLLPVKKPGTNDYRPVQDLREVNKRVQDIHPTVPNPYNLLSSLPPSHTWYSVLDLKDAFFCLKLHPNSQPLFAFEWRDPEKGNTGQLTWTRLPQGFKNSPTLFNEALHRDLASFRALNPQVVMLQYVDDLLVAAPTYRDCKEGTRRLLQELSKLGYRVSAKKAQLCREEVTYLGYLLKGGKRWLTPARKATVMKIPTPTTPRQVREFLGKAGFCRLFIPGFASLAAPLYPLTRPKVPFTWTEAHQEAFGRIKEALLSAPALALPDLTKPFALYVDEKEGVARGVLTQTLGPWRRPVAYLSKKLDPVASGWPTCLKAIAAVALLLKDADKLTLGQNVLVIAPHNLESIVRQPPDRWMTNARMTHYQSLLLNERVSFAPPAILNPATLLPVESDDTPIHICSEILAEETGTRPDLRDQPLPGVPAWYTDGSSFIMDGRRQAGAAIVDNKRTVWASNLPEGTSAQKAELIALTQALRLAEGKSINIYTDSRYAFATAHVHGAIYKQRGWLTSAGKDIKNKEEILALLEAIHLPKRVAIIHCPGHQRGTDPVATGNRKADEAAKQAAQSTRILTETTKNAGKRTADGSEFEKRTADGSEFESPKKKAKVE

SEQ ID NO: 1830 - protein, 2216 aa, synthetic construct
MPAAKRVKLDGGDKKYSIGLDIGTNSVGWAVITDEYKVPSKKFKVLGNTDRHSIKKNLIGALLFDSGETAEATRLKRTARRRYTRRKNRICYLQEIFSNEMAKVDDSFFHRLEESFLVEEDKKHERHPIFGNIVDEVAYHEKYPTIYHLRKKLVDSTDKADLRLIYLALAHMIKFRGHFLIEGDLNPDNSDVDKLFIQLVQTYNQLFEENPINASGVDAKAILSARLSKSRRLENLIAQLPGEKKNGLFGNLIALSLGLTPNFKSNFDLAEDAKLQLSKDTYDDDLDNLLAQIGDQYADLFLAAKNLSDAILLSDILRVNTEITKAPLSASMIKRYDEHHQDLTLLKALVRQQLPEKYKEIFFDQSKNGYAGYIDGGASQEEFYKFIKPILEKMDGTEELLVKLNREDLLRKQRTFDNGSIPHQIHLGELHAILRRQEDFYPFLKDNREKIEKILTFRIPYYVGPLARGNSRFAWMTRKSEETITPWNFEEVVDKGASAQSFIERMTNFDKNLPNEKVLPKHSLLYEYFTVYNELTKVKYVTEGMRKPAFLSGEQKKAIVDLLFKTNRKVTVKQLKEDYFKKIECFDSVEISGVEDRFNASLGTYHDLLKIIKDKDFLDNEENEDILEDIVLTLTLFEDREMIEERLKTYAHLFDDKVMKQLKRRRYTGWGRLSRKLINGIRDKQSGKTILDFLKSDGFANRNFMQLIHDDSLTFKEDIQKAQVSGQGDSLHEHIANLAGSPAIKKGILQTVKVVDELVKVMGRHKPENIVIEMARENQTTQKGQKNSRERMKRIEEGIKELGSQILKEHPVENTQLQNEKLYLYYLQNGRDMYVDQELDINRLSDYDVDHIVPQSFLKDDSIDNKVLTRSDKARGKSDNVPSEEVVKKMKNYWRQLLNAKLITQRKFDNLTKAERGGLSELDKAGFIKRQLVETRQITKHVAQILDSRMNTKYDENDKLIREVKVITLKSKLVSDFRKDFQFYKVREINNYHHAHDAYLNAVVGTALIKKYPKLESEFVYGDYKVYDVRKMIAKSEQEIGKATAKYFFYSNIMNFFKTEITLANGEIRKRPLIETNGETGEIVWDKGRDFATVRKVLSMPQVNIVKKTEVQTGGFSKESILPKRNSDKLIARKKDWDPKKYGGFDSPTVAYSVLVVAKVEKGKSKKLKSVKELLGITIMERSSFEKNPIDFLEAKGYKEVKKDLIIKLPKYSLFELENGRKRMLASAGELQKGNELALPSKYVNFLYLASHYEKLKGSPEDNEQKQLFVEQHKHYLDEIIEQISEFSKRVILADANLDKVLSAYNKHRDKPIREQAENIIHLFTLTNLGAPAAFKYFDTTIDRKRYTSTKEVLDATLIHQSITGLYETRIDLSQLGGDGGGSSGGSPAPGGTLGDQGSRGSDPLPEPRVTLTVEGIPTEFLVNTGAEHSVLTKPMGKMGSKRTVVAGATGSKVYPWTTKRLLKIGQKQVTHSFLVIPECPAPLLGRDLLTKLKAQIQFSTEGPQVTWEDRPAMCLVLNLEEEYRLHEKPVPPSIDPSWLQLFPMVWAEKAGMGLANQVPPVVVELKSDASPVAVRQYPMSKEAREGIRPHIQRFLDLGILVPCQSPWNTPLLPVKKPGTNDYRPVQDLREVNKRVQDIHPTVPNPYNLLSSLPPSHTWYSVLDLKDAFFCLKLHPNSQPLFAFEWRDPEKGNTGQLTWTRLPQGFKNSPTLFNEALHRDLASFRALNPQVVMLQYVDDLLVAAPTYRDCKEGTRRLLQELSKLGYRVSAKKAQLCREEVTYLGYLLKGGKRWLTPARKATVMKIPTPTTPRQVREFLGKAGFCRLFIPGFASLAAPLYPLTRPKVPFTWTEAHQEAFGRIKEALLSAPALALPDLTKPFALYVDEKEGVARGVLTQTLGPWRRPVAYLSKKLDPVASGWPTCLKAIAAVALLLKDADKLTLGQNVLVIAPHNLESIVRQPPDRWMTNARMTHYQSLLLNERVSFAPPAILNPATLLPVESDDTPIHICSEILAEETGTRPDLRDQPLPGVPAWYTDGSSFIMDGRRQAGAAIVDNKRTVWASNLPEGTSAQKAELIALTQALRLAEGKSINIYTDSRYAFATAHVHGAIYKQRGWLTSAGKDIKNKEEILALLEAIHLPKRVAIIHCPGHQRGTDPVATGNRKADEAAKQAAQSTRILTETTKNAGKRTADGSEFEKRTADGSEFESPKKKAKVE

SEQ ID NO: 1831 - protein, 2213 aa, synthetic construct
MPAAKRVKLDGGDKKYSIGLDIGTNSVGWAVITDEYKVPSKKFKVLGNTDRHSIKKNLIGALLFDSGETAEATRLKRTARRRYTRRKNRICYLQEIFSNEMAKVDDSFFHRLEESFLVEEDKKHERHPIFGNIVDEVAYHEKYPTIYHLRKKLVDSTDKADLRLIYLALAHMIKFRGHFLIEGDLNPDNSDVDKLFIQLVQTYNQLFEENPINASGVDAKAILSARLSKSRRLENLIAQLPGEKKNGLFGNLIALSLGLTPNFKSNFDLAEDAKLQLSKDTYDDDLDNLLAQIGDQYADLFLAAKNLSDAILLSDILRVNTEITKAPLSASMIKRYDEHHQDLTLLKALVRQQLPEKYKEIFFDQSKNGYAGYIDGGASQEEFYKFIKPILEKMDGTEELLVKLNREDLLRKQRTFDNGSIPHQIHLGELHAILRRQEDFYPFLKDNREKIEKILTFRIPYYVGPLARGNSRFAWMTRKSEETITPWNFEEVVDKGASAQSFIERMTNFDKNLPNEKVLPKHSLLYEYFTVYNELTKVKYVTEGMRKPAFLSGEQKKAIVDLLFKTNRKVTVKQLKEDYFKKIECFDSVEISGVEDRFNASLGTYHDLLKIIKDKDFLDNEENEDILEDIVLTLTLFEDREMIEERLKTYAHLFDDKVMKQLKRRRYTGWGRLSRKLINGIRDKQSGKTILDFLKSDGFANRNFMQLIHDDSLTFKEDIQKAQVSGQGDSLHEHIANLAGSPAIKKGILQTVKVVDELVKVMGRHKPENIVIEMARENQTTQKGQKNSRERMKRIEEGIKELGSQILKEHPVENTQLQNEKLYLYYLQNGRDMYVDQELDINRLSDYDVDHIVPQSFLKDDSIDNKVLTRSDKARGKSDNVPSEEVVKKMKNYWRQLLNAKLITQRKFDNLTKAERGGLSELDKAGFIKRQLVETRQITKHVAQILDSRMNTKYDENDKLIREVKVITLKSKLVSDFRKDFQFYKVREINNYHHAHDAYLNAVVGTALIKKYPKLESEFVYGDYKVYDVRKMIAKSEQEIGKATAKYFFYSNIMNFFKTEITLANGEIRKRPLIETNGETGEIVWDKGRDFATVRKVLSMPQVNIVKKTEVQTGGFSKESILPKRNSDKLIARKKDWDPKKYGGFDSPTVAYSVLVVAKVEKGKSKKLKSVKELLGITIMERSSFEKNPIDFLEAKGYKEVKKDLIIKLPKYSLFELENGRKRMLASAGELQKGNELALPSKYVNFLYLASHYEKLKGSPEDNEQKQLFVEQHKHYLDEIIEQISEFSKRVILADANLDKVLSAYNKHRDKPIREQAENIIHLFTLTNLGAPAAFKYFDTTIDRKRYTSTKEVLDATLIHQSITGLYETRIDLSQLGGDGGGSSGSSGGTLGDQGSRGSDPLPEPRVTLTVEGIPTEFLVNTGAEHSVLTKPMGKMGSKRTVVAGATGSKVYPWTTKRLLKIGQKQVTHSFLVIPECPAPLLGRDLLTKLKAQIQFSTEGPQVTWEDRPAMCLVLNLEEEYRLHEKPVPPSIDPSWLQLFPMVWAEKAGMGLANQVPPVVVELKSDASPVAVRQYPMSKEAREGIRPHIQRFLDLGILVPCQSPWNTPLLPVKKPGTNDYRPVQDLREVNKRVQDIHPTVPNPYNLLSSLPPSHTWYSVLDLKDAFFCLKLHPNSQPLFAFEWRDPEKGNTGQLTWTRLPQGFKNSPTLFNEALHRDLASFRALNPQVVMLQYVDDLLVAAPTYRDCKEGTRRLLQELSKLGYRVSAKKAQLCREEVTYLGYLLKGGKRWLTPARKATVMKIPTPTTPRQVREFLGKAGFCRLFIPGFASLAAPLYPLTRPKVPFTWTEAHQEAFGRIKEALLSAPALALPDLTKPFALYVDEKEGVARGVLTQTLGPWRRPVAYLSKKLDPVASGWPTCLKAIAAVALLLKDADKLTLGQNVLVIAPHNLESIVRQPPDRWMTNARMTHYQSLLLNERVSFAPPAILNPATLLPVESDDTPIHICSEILAEETGTRPDLRDQPLPGVPAWYTDGSSFIMDGRRQAGAAIVDNKRTVWASNLPEGTSAQKAELIALTQALRLAEGKSINIYTDSRYAFATAHVHGAIYKQRGWLTSAGKDIKNKEEILALLEAIHLPKRVAIIHCPGHQRGTDPVATGNRKADEAAKQAAQSTRILTETTKNAGKRTADGSEFEKRTADGSEFESPKKKAKVE

SEQ ID NO: 1832 - protein, 2216 aa, synthetic construct
MPAAKRVKLDGGDKKYSIGLDIGTNSVGWAVITDEYKVPSKKFKVLGNTDRHSIKKNLIGALLFDSGETAEATRLKRTARRRYTRRKNRICYLQEIFSNEMAKVDDSFFHRLEESFLVEEDKKHERHPIFGNIVDEVAYHEKYPTIYHLRKKLVDSTDKADLRLIYLALAHMIKFRGHFLIEGDLNPDNSDVDKLFIQLVQTYNQLFEENPINASGVDAKAILSARLSKSRRLENLIAQLPGEKKNGLFGNLIALSLGLTPNFKSNFDLAEDAKLQLSKDTYDDDLDNLLAQIGDQYADLFLAAKNLSDAILLSDILRVNTEITKAPLSASMIKRYDEHHQDLTLLKALVRQQLPEKYKEIFFDQSKNGYAGYIDGGASQEEFYKFIKPILEKMDGTEELLVKLNREDLLRKQRTFDNGSIPHQIHLGELHAILRRQEDFYPFLKDNREKIEKILTFRIPYYVGPLARGNSRFAWMTRKSEETITPWNFEEVVDKGASAQSFIERMTNFDKNLPNEKVLPKHSLLYEYFTVYNELTKVKYVTEGMRKPAFLSGEQKKAIVDLLFKTNRKVTVKQLKEDYFKKIECFDSVEISGVEDRFNASLGTYHDLLKIIKDKDFLDNEENEDILEDIVLTLTLFEDREMIEERLKTYAHLFDDKVMKQLKRRRYTGWGRLSRKLINGIRDKQSGKTILDFLKSDGFANRNFMQLIHDDSLTFKEDIQKAQVSGQGDSLHEHIANLAGSPAIKKGILQTVKVVDELVKVMGRHKPENIVIEMARENQTTQKGQKNSRERMKRIEEGIKELGSQILKEHPVENTQLQNEKLYLYYLQNGRDMYVDQELDINRLSDYDVDHIVPQSFLKDDSIDNKVLTRSDKARGKSDNVPSEEVVKKMKNYWRQLLNAKLITQRKFDNLTKAERGGLSELDKAGFIKRQLVETRQITKHVAQILDSRMNTKYDENDKLIREVKVITLKSKLVSDFRKDFQFYKVREINNYHHAHDAYLNAVVGTALIKKYPKLESEFVYGDYKVYDVRKMIAKSEQEIGKATAKYFFYSNIMNFFKTEITLANGEIRKRPLIETNGETGEIVWDKGRDFATVRKVLSMPQVNIVKKTEVQTGGFSKESILPKRNSDKLIARKKDWDPKKYGGFDSPTVAYSVLVVAKVEKGKSKKLKSVKELLGITIMERSSFEKNPIDFLEAKGYKEVKKDLIIKLPKYSLFELENGRKRMLASAGELQKGNELALPSKYVNFLYLASHYEKLKGSPEDNEQKQLFVEQHKHYLDEIIEQISEFSKRVILADANLDKVLSAYNKHRDKPIREQAENIIHLFTLTNLGAPAAFKYFDTTIDRKRYTSTKEVLDATLIHQSITGLYETRIDLSQLGGDGGGGSGGGPAPGGTLGDQGSRGSDPLPEPRVTLTVEGIPTEFLVNTGAEHSVLTKPMGKMGSKRTVVAGATGSKVYPWTTKRLLKIGQKQVTHSFLVIPECPAPLLGRDLLTKLKAQIQFSTEGPQVTWEDRPAMCLVLNLEEEYRLHEKPVPPSIDPSWLQLFPMVWAEKAGMGLANQVPPVVVELKSDASPVAVRQYPMSKEAREGIRPHIQRFLDLGILVPCQSPWNTPLLPVKKPGTNDYRPVQDLREVNKRVQDIHPTVPNPYNLLSSLPPSHTWYSVLDLKDAFFCLKLHPNSQPLFAFEWRDPEKGNTGQLTWTRLPQGFKNSPTLFNEALHRDLASFRALNPQVVMLQYVDDLLVAAPTYRDCKEGTRRLLQELSKLGYRVSAKKAQLCREEVTYLGYLLKGGKRWLTPARKATVMKIPTPTTPRQVREFLGKAGFCRLFIPGFASLAAPLYPLTRPKVPFTWTEAHQEAFGRIKEALLSAPALALPDLTKPFALYVDEKEGVARGVLTQTLGPWRRPVAYLSKKLDPVASGWPTCLKAIAAVALLLKDADKLTLGQNVLVIAPHNLESIVRQPPDRWMTNARMTHYQSLLLNERVSFAPPAILNPATLLPVESDDTPIHICSEILAEETGTRPDLRDQPLPGVPAWYTDGSSFIMDGRRQAGAAIVDNKRTVWASNLPEGTSAQKAELIALTQALRLAEGKSINIYTDSRYAFATAHVHGAIYKQRGWLTSAGKDIKNKEEILALLEAIHLPKRVAIIHCPGHQRGTDPVATGNRKADEAAKQAAQSTRILTETTKNAGKRTADGSEFEKRTADGSEFESPKKKAKVE

SEQ ID NO: 1833 - protein, 2218 aa, synthetic construct
MPAAKRVKLDGGDKKYSIGLDIGTNSVGWAVITDEYKVPSKKFKVLGNTDRHSIKKNLIGALLFDSGETAEATRLKRTARRRYTRRKNRICYLQEIFSNEMAKVDDSFFHRLEESFLVEEDKKHERHPIFGNIVDEVAYHEKYPTIYHLRKKLVDSTDKADLRLIYLALAHMIKFRGHFLIEGDLNPDNSDVDKLFIQLVQTYNQLFEENPINASGVDAKAILSARLSKSRRLENLIAQLPGEKKNGLFGNLIALSLGLTPNFKSNFDLAEDAKLQLSKDTYDDDLDNLLAQIGDQYADLFLAAKNLSDAILLSDILRVNTEITKAPLSASMIKRYDEHHQDLTLLKALVRQQLPEKYKEIFFDQSKNGYAGYIDGGASQEEFYKFIKPILEKMDGTEELLVKLNREDLLRKQRTFDNGSIPHQIHLGELHAILRRQEDFYPFLKDNREKIEKILTFRIPYYVGPLARGNSRFAWMTRKSEETITPWNFEEVVDKGASAQSFIERMTNFDKNLPNEKVLPKHSLLYEYFTVYNELTKVKYVTEGMRKPAFLSGEQKKAIVDLLFKTNRKVTVKQLKEDYFKKIECFDSVEISGVEDRFNASLGTYHDLLKIIKDKDFLDNEENEDILEDIVLTLTLFEDREMIEERLKTYAHLFDDKVMKQLKRRRYTGWGRLSRKLINGIRDKQSGKTILDFLKSDGFANRNFMQLIHDDSLTFKEDIQKAQVSGQGDSLHEHIANLAGSPAIKKGILQTVKVVDELVKVMGRHKPENIVIEMARENQTTQKGQKNSRERMKRIEEGIKELGSQILKEHPVENTQLQNEKLYLYYLQNGRDMYVDQELDINRLSDYDVDHIVPQSFLKDDSIDNKVLTRSDKARGKSDNVPSEEVVKKMKNYWRQLLNAKLITQRKFDNLTKAERGGLSELDKAGFIKRQLVETRQITKHVAQILDSRMNTKYDENDKLIREVKVITLKSKLVSDFRKDFQFYKVREINNYHHAHDAYLNAVVGTALIKKYPKLESEFVYGDYKVYDVRKMIAKSEQEIGKATAKYFFYSNIMNFFKTEITLANGEIRKRPLIETNGETGEIVWDKGRDFATVRKVLSMPQVNIVKKTEVQTGGFSKESILPKRNSDKLIARKKDWDPKKYGGFDSPTVAYSVLVVAKVEKGKSKKLKSVKELLGITIMERSSFEKNPIDFLEAKGYKEVKKDLIIKLPKYSLFELENGRKRMLASAGELQKGNELALPSKYVNFLYLASHYEKLKGSPEDNEQKQLFVEQHKHYLDEIIEQISEFSKRVILADANLDKVLSAYNKHRDKPIREQAENIIHLFTLTNLGAPAAFKYFDTTIDRKRYTSTKEVLDATLIHQSITGLYETRIDLSQLGGDGGEAAAKGGSPAPGGTLGDQGSRGSDPLPEPRVTLTVEGIPTEFLVNTGAEHSVLTKPMGKMGSKRTVVAGATGSKVYPWTTKRLLKIGQKQVTHSFLVIPECPAPLLGRDLLTKLKAQIQFSTEGPQVTWEDRPAMCLVLNLEEEYRLHEKPVPPSIDPSWLQLFPMVWAEKAGMGLANQVPPVVVELKSDASPVAVRQYPMSKEAREGIRPHIQRFLDLGILVPCQSPWNTPLLPVKKPGTNDYRPVQDLREVNKRVQDIHPTVPNPYNLLSSLPPSHTWYSVLDLKDAFFCLKLHPNSQPLFAFEWRDPEKGNTGQLTWTRLPQGFKNSPTLFNEALHRDLASFRALNPQVVMLQYVDDLLVAAPTYRDCKEGTRRLLQELSKLGYRVSAKKAQLCREEVTYLGYLLKGGKRWLTPARKATVMKIPTPTTPRQVREFLGKAGFCRLFIPGFASLAAPLYPLTRPKVPFTWTEAHQEAFGRIKEALLSAPALALPDLTKPFALYVDEKEGVARGVLTQTLGPWRRPVAYLSKKLDPVASGWPTCLKAIAAVALLLKDADKLTLGQNVLVIAPHNLESIVRQPPDRWMTNARMTHYQSLLLNERVSFAPPAILNPATLLPVESDDTPIHICSEILAEETGTRPDLRDQPLPGVPAWYTDGSSFIMDGRRQAGAAIVDNKRTVWASNLPEGTSAQKAELIALTQALRLAEGKSINIYTDSRYAFATAHVHGAIYKQRGWLTSAGKDIKNKEEILALLEAIHLPKRVAIIHCPGHQRGTDPVATGNRKADEAAKQAAQSTRILTETTKNAGKRTADGSEFEKRTADGSEFESPKKKAKVE

SEQ ID NO: 1834 - protein, 2216 aa, synthetic construct
MPAAKRVKLDGGDKKYSIGLDIGTNSVGWAVITDEYKVPSKKFKVLGNTDRHSIKKNLIGALLFDSGETAEATRLKRTARRRYTRRKNRICYLQEIFSNEMAKVDDSFFHRLEESFLVEEDKKHERHPIFGNIVDEVAYHEKYPTIYHLRKKLVDSTDKADLRLIYLALAHMIKFRGHFLIEGDLNPDNSDVDKLFIQLVQTYNQLFEENPINASGVDAKAILSARLSKSRRLENLIAQLPGEKKNGLFGNLIALSLGLTPNFKSNFDLAEDAKLQLSKDTYDDDLDNLLAQIGDQYADLFLAAKNLSDAILLSDILRVNTEITKAPLSASMIKRYDEHHQDLTLLKALVRQQLPEKYKEIFFDQSKNGYAGYIDGGASQEEFYKFIKPILEKMDGTEELLVKLNREDLLRKQRTFDNGSIPHQIHLGELHAILRRQEDFYPFLKDNREKIEKILTFRIPYYVGPLARGNSRFAWMTRKSEETITPWNFEEVVDKGASAQSFIERMTNFDKNLPNEKVLPKHSLLYEYFTVYNELTKVKYVTEGMRKPAFLSGEQKKAIVDLLFKTNRKVTVKQLKEDYFKKIECFDSVEISGVEDRFNASLGTYHDLLKIIKDKDFLDNEENEDILEDIVLTLTLFEDREMIEERLKTYAHLFDDKVMKQLKRRRYTGWGRLSRKLINGIRDKQSGKTILDFLKSDGFANRNFMQLIHDDSLTFKEDIQKAQVSGQGDSLHEHIANLAGSPAIKKGILQTVKVVDELVKVMGRHKPENIVIEMARENQTTQKGQKNSRERMKRIEEGIKELGSQILKEHPVENTQLQNEKLYLYYLQNGRDMYVDQELDINRLSDYDVDHIVPQSFLKDDSIDNKVLTRSDKARGKSDNVPSEEVVKKMKNYWRQLLNAKLITQRKFDNLTKAERGGLSELDKAGFIKRQLVETRQITKHVAQILDSRMNTKYDENDKLIREVKVITLKSKLVSDFRKDFQFYKVREINNYHHAHDAYLNAVVGTALIKKYPKLESEFVYGDYKVYDVRKMIAKSEQEIGKATAKYFFYSNIMNFFKTEITLANGEIRKRPLIETNGETGEIVWDKGRDFATVRKVLSMPQVNIVKKTEVQTGGFSKESILPKRNSDKLIARKKDWDPKKYGGFDSPTVAYSVLVVAKVEKGKSKKLKSVKELLGITIMERSSFEKNPIDFLEAKGYKEVKKDLIIKLPKYSLFELENGRKRMLASAGELQKGNELALPSKYVNFLYLASHYEKLKGSPEDNEQKQLFVEQHKHYLDEIIEQISEFSKRVILADANLDKVLSAYNKHRDKPIREQAENIIHLFTLTNLGAPAAFKYFDTTIDRKRYTSTKEVLDATLIHQSITGLYETRIDLSQLGGDGGGGGGGSPAPGGTLGDQGSRGSDPLPEPRVTLTVEGIPTEFLVNTGAEHSVLTKPMGKMGSKRTVVAGATGSKVYPWTTKRLLKIGQKQVTHSFLVIPECPAPLLGRDLLTKLKAQIQFSTEGPQVTWEDRPAMCLVLNLEEEYRLHEKPVPPSIDPSWLQLFPMVWAEKAGMGLANQVPPVVVELKSDASPVAVRQYPMSKEAREGIRPHIQRFLDLGILVPCQSPWNTPLLPVKKPGTNDYRPVQDLREVNKRVQDIHPTVPNPYNLLSSLPPSHTWYSVLDLKDAFFCLKLHPNSQPLFAFEWRDPEKGNTGQLTWTRLPQGFKNSPTLFNEALHRDLASFRALNPQVVMLQYVDDLLVAAPTYRDCKEGTRRLLQELSKLGYRVSAKKAQLCREEVTYLGYLLKGGKRWLTPARKATVMKIPTPTTPRQVREFLGKAGFCRLFIPGFASLAAPLYPLTRPKVPFTWTEAHQEAFGRIKEALLSAPALALPDLTKPFALYVDEKEGVARGVLTQTLGPWRRPVAYLSKKLDPVASGWPTCLKAIAAVALLLKDADKLTLGQNVLVIAPHNLESIVRQPPDRWMTNARMTHYQSLLLNERVSFAPPAILNPATLLPVESDDTPIHICSEILAEETGTRPDLRDQPLPGVPAWYTDGSSFIMDGRRQAGAAIVDNKRTVWASNLPEGTSAQKAELIALTQALRLAEGKSINIYTDSRYAFATAHVHGAIYKQRGWLTSAGKDIKNKEEILALLEAIHLPKRVAIIHCPGHQRGTDPVATGNRKADEAAKQAAQSTRILTETTKNAGKRTADGSEFEKRTADGSEFESPKKKAKVE

SEQ ID NO: 1835 - protein, 2216 aa, synthetic construct
MPAAKRVKLDGGDKKYSIGLDIGTNSVGWAVITDEYKVPSKKFKVLGNTDRHSIKKNLIGALLFDSGETAEATRLKRTARRRYTRRKNRICYLQEIFSNEMAKVDDSFFHRLEESFLVEEDKKHERHPIFGNIVDEVAYHEKYPTIYHLRKKLVDSTDKADLRLIYLALAHMIKFRGHFLIEGDLNPDNSDVDKLFIQLVQTYNQLFEENPINASGVDAKAILSARLSKSRRLENLIAQLPGEKKNGLFGNLIALSLGLTPNFKSNFDLAEDAKLQLSKDTYDDDLDNLLAQIGDQYADLFLAAKNLSDAILLSDILRVNTEITKAPLSASMIKRYDEHHQDLTLLKALVRQQLPEKYKEIFFDQSKNGYAGYIDGGASQEEFYKFIKPILEKMDGTEELLVKLNREDLLRKQRTFDNGSIPHQIHLGELHAILRRQEDFYPFLKDNREKIEKILTFRIPYYVGPLARGNSRFAWMTRKSEETITPWNFEEVVDKGASAQSFIERMTNFDKNLPNEKVLPKHSLLYEYFTVYNELTKVKYVTEGMRKPAFLSGEQKKAIVDLLFKTNRKVTVKQLKEDYFKKIECFDSVEISGVEDRFNASLGTYHDLLKIIKDKDFLDNEENEDILEDIVLTLTLFEDREMIEERLKTYAHLFDDKVMKQLKRRRYTGWGRLSRKLINGIRDKQSGKTILDFLKSDGFANRNFMQLIHDDSLTFKEDIQKAQVSGQGDSLHEHIANLAGSPAIKKGILQTVKVVDELVKVMGRHKPENIVIEMARENQTTQKGQKNSRERMKRIEEGIKELGSQILKEHPVENTQLQNEKLYLYYLQNGRDMYVDQELDINRLSDYDVDHIVPQSFLKDDSIDNKVLTRSDKARGKSDNVPSEEVVKKMKNYWRQLLNAKLITQRKFDNLTKAERGGLSELDKAGFIKRQLVETRQITKHVAQILDSRMNTKYDENDKLIREVKVITLKSKLVSDFRKDFQFYKVREINNYHHAHDAYLNAVVGTALIKKYPKLESEFVYGDYKVYDVRKMIAKSEQEIGKATAKYFFYSNIMNFFKTEITLANGEIRKRPLIETNGETGEIVWDKGRDFATVRKVLSMPQVNIVKKTEVQTGGFSKESILPKRNSDKLIARKKDWDPKKYGGFDSPTVAYSVLVVAKVEKGKSKKLKSVKELLGITIMERSSFEKNPIDFLEAKGYKEVKKDLIIKLPKYSLFELENGRKRMLASAGELQKGNELALPSKYVNFLYLASHYEKLKGSPEDNEQKQLFVEQHKHYLDEIIEQISEFSKRVILADANLDKVLSAYNKHRDKPIREQAENIIHLFTLTNLGAPAAFKYFDTTIDRKRYTSTKEVLDATLIHQSITGLYETRIDLSQLGGDGGPAPGGGGGSGGTLGDQGSRGSDPLPEPRVTLTVEGIPTEFLVNTGAEHSVLTKPMGKMGSKRTVVAGATGSKVYPWTTKRLLKIGQKQVTHSFLVIPECPAPLLGRDLLTKLKAQIQFSTEGPQVTWEDRPAMCLVLNLEEEYRLHEKPVPPSIDPSWLQLFPMVWAEKAGMGLANQVPPVVVELKSDASPVAVRQYPMSKEAREGIRPHIQRFLDLGILVPCQSPWNTPLLPVKKPGTNDYRPVQDLREVNKRVQDIHPTVPNPYNLLSSLPPSHTWYSVLDLKDAFFCLKLHPNSQPLFAFEWRDPEKGNTGQLTWTRLPQGFKNSPTLFNEALHRDLASFRALNPQVVMLQYVDDLLVAAPTYRDCKEGTRRLLQELSKLGYRVSAKKAQLCREEVTYLGYLLKGGKRWLTPARKATVMKIPTPTTPRQVREFLGKAGFCRLFIPGFASLAAPLYPLTRPKVPFTWTEAHQEAFGRIKEALLSAPALALPDLTKPFALYVDEKEGVARGVLTQTLGPWRRPVAYLSKKLDPVASGWPTCLKAIAAVALLLKDADKLTLGQNVLVIAPHNLESIVRQPPDRWMTNARMTHYQSLLLNERVSFAPPAILNPATLLPVESDDTPIHICSEILAEETGTRPDLRDQPLPGVPAWYTDGSSFIMDGRRQAGAAIVDNKRTVWASNLPEGTSAQKAELIALTQALRLAEGKSINIYTDSRYAFATAHVHGAIYKQRGWLTSAGKDIKNKEEILALLEAIHLPKRVAIIHCPGHQRGTDPVATGNRKADEAAKQAAQSTRILTETTKNAGKRTADGSEFEKRTADGSEFESPKKKAKVE

SEQ ID NO: 1836 - protein, 2118 aa, synthetic construct
MPAAKRVKLDGGDKKYSIGLDIGTNSVGWAVITDEYKVPSKKFKVLGNTDRHSIKKNLIGALLFDSGETAEATRLKRTARRRYTRRKNRICYLQEIFSNEMAKVDDSFFHRLEESFLVEEDKKHERHPIFGNIVDEVAYHEKYPTIYHLRKKLVDSTDKADLRLIYLALAHMIKFRGHFLIEGDLNPDNSDVDKLFIQLVQTYNQLFEENPINASGVDAKAILSARLSKSRRLENLIAQLPGEKKNGLFGNLIALSLGLTPNFKSNFDLAEDAKLQLSKDTYDDDLDNLLAQIGDQYADLFLAAKNLSDAILLSDILRVNTEITKAPLSASMIKRYDEHHQDLTLLKALVRQQLPEKYKEIFFDQSKNGYAGYIDGGASQEEFYKFIKPILEKMDGTEELLVKLNREDLLRKQRTFDNGSIPHQIHLGELHAILRRQEDFYPFLKDNREKIEKILTFRIPYYVGPLARGNSRFAWMTRKSEETITPWNFEEVVDKGASAQSFIERMTNFDKNLPNEKVLPKHSLLYEYFTVYNELTKVKYVTEGMRKPAFLSGEQKKAIVDLLFKTNRKVTVKQLKEDYFKKIECFDSVEISGVEDRFNASLGTYHDLLKIIKDKDFLDNEENEDILEDIVLTLTLFEDREMIEERLKTYAHLFDDKVMKQLKRRRYTGWGRLSRKLINGIRDKQSGKTILDFLKSDGFANRNFMQLIHDDSLTFKEDIQKAQVSGQGDSLHEHIANLAGSPAIKKGILQTVKVVDELVKVMGRHKPENIVIEMARENQTTQKGQKNSRERMKRIEEGIKELGSQILKEHPVENTQLQNEKLYLYYLQNGRDMYVDQELDINRLSDYDVDHIVPQSFLKDDSIDNKVLTRSDKARGKSDNVPSEEVVKKMKNYWRQLLNAKLITQRKFDNLTKAERGGLSELDKAGFIKRQLVETRQITKHVAQILDSRMNTKYDENDKLIREVKVITLKSKLVSDFRKDFQFYKVREINNYHHAHDAYLNAVVGTALIKKYPKLESEFVYGDYKVYDVRKMIAKSEQEIGKATAKYFFYSNIMNFFKTEITLANGEIRKRPLIETNGETGEIVWDKGRDFATVRKVLSMPQVNIVKKTEVQTGGFSKESILPKRNSDKLIARKKDWDPKKYGGFDSPTVAYSVLVVAKVEKGKSKKLKSVKELLGITIMERSSFEKNPIDFLEAKGYKEVKKDLIIKLPKYSLFELENGRKRMLASAGELQKGNELALPSKYVNFLYLASHYEKLKGSPEDNEQKQLFVEQHKHYLDEIIEQISEFSKRVILADANLDKVLSAYNKHRDKPIREQAENIIHLFTLTNLGAPAAFKYFDTTIDRKRYTSTKEVLDATLIHQSITGLYETRIDLSQLGGDGGSGGSSGGSSGSETPGTSESATPESSGGSSGGSSGGTLNLEDEYRLYETSAEPEVSPGSTWLSDFPQAWAETGGMGLAVRQAPLIIPLKATSTPVSIKQYPMSQEAKLGIKPHIQRLLDQGILVPCQSPWNTPLLPVKKPGTNDYRPVQDLREVNKRVEDIHPTVPNPYNLLSGLPPSHRWYTVLDLKDAFFCLRLHPTSQPLFAFEWRDPGMGISGQLTWTRLPQGFKNSPTLFDEALHRDLADFRIQHPDLILLQYVDDILLAATSELDCQQGTRALLLTLGNLGYRASAKKAQLCQKQVKYLGYLLKEGQRWLTEARKETVMGQPTPKTPRQLREFLGTAGFCRLWIPGFAEMAAPLYPLTKTGTLFNWGPDQQKAYQEIKQALLTAPALGLPDLTKPFELFVDEKQGYAKGVLTQKLGPWRRPVAYLSKKLDPVAAGWPPCLRMVAAIAVLRKDAGKLTMGQPLVILAPHAVEALVKQPPDRWLSNARMTHYQAMLLDTDRVQFGPVVALNPATLLPLPEEGAPHDCLEILAETHGTRPDLTDQPIPDADHTWYTDGSSFLQEGQRKAGAAVTTETEVIWARALPAGTSAQRAELIALTQALKMAEGKRLNVYTDSRYAFATAHIHGEIYRRRGLLTSEGREIKNKSEILALLKALFLPKRLSIIHCLGHQKGDSAEARGNRLADQAAREAAIKTPPDTSTLLAGKRTADGSEFEKRTADGSEFESPKKKAKVE

SEQ ID NO: 1837 - protein, 2105 aa, synthetic construct
MPAAKRVKLDGGDKKYSIGLDIGTNSVGWAVITDEYKVPSKKFKVLGNTDRHSIKKNLIGALLFDSGETAEATRLKRTARRRYTRRKNRICYLQEIFSNEMAKVDDSFFHRLEESFLVEEDKKHERHPIFGNIVDEVAYHEKYPTIYHLRKKLVDSTDKADLRLIYLALAHMIKFRGHFLIEGDLNPDNSDVDKLFIQLVQTYNQLFEENPINASGVDAKAILSARLSKSRRLENLIAQLPGEKKNGLFGNLIALSLGLTPNFKSNFDLAEDAKLQLSKDTYDDDLDNLLAQIGDQYADLFLAAKNLSDAILLSDILRVNTEITKAPLSASMIKRYDEHHQDLTLLKALVRQQLPEKYKEIFFDQSKNGYAGYIDGGASQEEFYKFIKPILEKMDGTEELLVKLNREDLLRKQRTFDNGSIPHQIHLGELHAILRRQEDFYPFLKDNREKIEKILTFRIPYYVGPLARGNSRFAWMTRKSEETITPWNFEEVVDKGASAQSFIERMTNFDKNLPNEKVLPKHSLLYEYFTVYNELTKVKYVTEGMRKPAFLSGEQKKAIVDLLFKTNRKVTVKQLKEDYFKKIECFDSVEISGVEDRFNASLGTYHDLLKIIKDKDFLDNEENEDILEDIVLTLTLFEDREMIEERLKTYAHLFDDKVMKQLKRRRYTGWGRLSRKLINGIRDKQSGKTILDFLKSDGFANRNFMQLIHDDSLTFKEDIQKAQVSGQGDSLHEHIANLAGSPAIKKGILQTVKVVDELVKVMGRHKPENIVIEMARENQTTQKGQKNSRERMKRIEEGIKELGSQILKEHPVENTQLQNEKLYLYYLQNGRDMYVDQELDINRLSDYDVDHIVPQSFLKDDSIDNKVLTRSDKARGKSDNVPSEEVVKKMKNYWRQLLNAKLITQRKFDNLTKAERGGLSELDKAGFIKRQLVETRQITKHVAQILDSRMNTKYDENDKLIREVKVITLKSKLVSDFRKDFQFYKVREINNYHHAHDAYLNAVVGTALIKKYPKLESEFVYGDYKVYDVRKMIAKSEQEIGKATAKYFFYSNIMNFFKTEITLANGEIRKRPLIETNGETGEIVWDKGRDFATVRKVLSMPQVNIVKKTEVQTGGFSKESILPKRNSDKLIARKKDWDPKKYGGFDSPTVAYSVLVVAKVEKGKSKKLKSVKELLGITIMERSSFEKNPIDFLEAKGYKEVKKDLIIKLPKYSLFELENGRKRMLASAGELQKGNELALPSKYVNFLYLASHYEKLKGSPEDNEQKQLFVEQHKHYLDEIIEQISEFSKRVILADANLDKVLSAYNKHRDKPIREQAENIIHLFTLTNLGAPAAFKYFDTTIDRKRYTSTKEVLDATLIHQSITGLYETRIDLSQLGGDGGEAAAKEAAAKEAAAKEAAAKGGTLNLEDEYRLYETSAEPEVSPGSTWLSDFPQAWAETGGMGLAVRQAPLIIPLKATSTPVSIKQYPMSQEAKLGIKPHIQRLLDQGILVPCQSPWNTPLLPVKKPGTNDYRPVQDLREVNKRVEDIHPTVPNPYNLLSGLPPSHRWYTVLDLKDAFFCLRLHPTSQPLFAFEWRDPGMGISGQLTWTRLPQGFKNSPTLFDEALHRDLADFRIQHPDLILLQYVDDILLAATSELDCQQGTRALLLTLGNLGYRASAKKAQLCQKQVKYLGYLLKEGQRWLTEARKETVMGQPTPKTPRQLREFLGTAGFCRLWIPGFAEMAAPLYPLTKTGTLFNWGPDQQKAYQEIKQALLTAPALGLPDLTKPFELFVDEKQGYAKGVLTQKLGPWRRPVAYLSKKLDPVAAGWPPCLRMVAAIAVLRKDAGKLTMGQPLVILAPHAVEALVKQPPDRWLSNARMTHYQAMLLDTDRVQFGPVVALNPATLLPLPEEGAPHDCLEILAETHGTRPDLTDQPIPDADHTWYTDGSSFLQEGQRKAGAAVTTETEVIWARALPAGTSAQRAELIALTQALKMAEGKRLNVYTDSRYAFATAHIHGEIYRRRGLLTSEGREIKNKSEILALLKALFLPKRLSIIHCLGHQKGDSAEARGNRLADQAAREAAIKTPPDTSTLLAGKRTADGSEFEKRTADGSEFESPKKKAKVE

SEQ ID NO: 1838 - protein, 2094 aa, synthetic construct
MPAAKRVKLDGGDKKYSIGLDIGTNSVGWAVITDEYKVPSKKFKVLGNTDRHSIKKNLIGALLFDSGETAEATRLKRTARRRYTRRKNRICYLQEIFSNEMAKVDDSFFHRLEESFLVEEDKKHERHPIFGNIVDEVAYHEKYPTIYHLRKKLVDSTDKADLRLIYLALAHMIKFRGHFLIEGDLNPDNSDVDKLFIQLVQTYNQLFEENPINASGVDAKAILSARLSKSRRLENLIAQLPGEKKNGLFGNLIALSLGLTPNFKSNFDLAEDAKLQLSKDTYDDDLDNLLAQIGDQYADLFLAAKNLSDAILLSDILRVNTEITKAPLSASMIKRYDEHHQDLTLLKALVRQQLPEKYKEIFFDQSKNGYAGYIDGGASQEEFYKFIKPILEKMDGTEELLVKLNREDLLRKQRTFDNGSIPHQIHLGELHAILRRQEDFYPFLKDNREKIEKILTFRIPYYVGPLARGNSRFAWMTRKSEETITPWNFEEVVDKGASAQSFIERMTNFDKNLPNEKVLPKHSLLYEYFTVYNELTKVKYVTEGMRKPAFLSGEQKKAIVDLLFKTNRKVTVKQLKEDYFKKIECFDSVEISGVEDRFNASLGTYHDLLKIIKDKDFLDNEENEDILEDIVLTLTLFEDREMIEERLKTYAHLFDDKVMKQLKRRRYTGWGRLSRKLINGIRDKQSGKTILDFLKSDGFANRNFMQLIHDDSLTFKEDIQKAQVSGQGDSLHEHIANLAGSPAIKKGILQTVKVVDELVKVMGRHKPENIVIEMARENQTTQKGQKNSRERMKRIEEGIKELGSQILKEHPVENTQLQNEKLYLYYLQNGRDMYVDQELDINRLSDYDVDHIVPQSFLKDDSIDNKVLTRSDKARGKSDNVPSEEVVKKMKNYWRQLLNAKLITQRKFDNLTKAERGGLSELDKAGFIKRQLVETRQITKHVAQILDSRMNTKYDENDKLIREVKVITLKSKLVSDFRKDFQFYKVREINNYHHAHDAYLNAVVGTALIKKYPKLESEFVYGDYKVYDVRKMIAKSEQEIGKATAKYFFYSNIMNFFKTEITLANGEIRKRPLIETNGETGEIVWDKGRDFATVRKVLSMPQVNIVKKTEVQTGGFSKESILPKRNSDKLIARKKDWDPKKYGGFDSPTVAYSVLVVAKVEKGKSKKLKSVKELLGITIMERSSFEKNPIDFLEAKGYKEVKKDLIIKLPKYSLFELENGRKRMLASAGELQKGNELALPSKYVNFLYLASHYEKLKGSPEDNEQKQLFVEQHKHYLDEIIEQISEFSKRVILADANLDKVLSAYNKHRDKPIREQAENIIHLFTLTNLGAPAAFKYFDTTIDRKRYTSTKEVLDATLIHQSITGLYETRIDLSQLGGDGGGSSGGGPAPGGTLNLEDEYRLYETSAEPEVSPGSTWLSDFPQAWAETGGMGLAVRQAPLIIPLKATSTPVSIKQYPMSQEAKLGIKPHIQRLLDQGILVPCQSPWNTPLLPVKKPGTNDYRPVQDLREVNKRVEDIHPTVPNPYNLLSGLPPSHRWYTVLDLKDAFFCLRLHPTSQPLFAFEWRDPGMGISGQLTWTRLPQGFKNSPTLFDEALHRDLADFRIQHPDLILLQYVDDILLAATSELDCQQGTRALLLTLGNLGYRASAKKAQLCQKQVKYLGYLLKEGQRWLTEARKETVMGQPTPKTPRQLREFLGTAGFCRLWIPGFAEMAAPLYPLTKTGTLFNWGPDQQKAYQEIKQALLTAPALGLPDLTKPFELFVDEKQGYAKGVLTQKLGPWRRPVAYLSKKLDPVAAGWPPCLRMVAAIAVLRKDAGKLTMGQPLVILAPHAVEALVKQPPDRWLSNARMTHYQAMLLDTDRVQFGPVVALNPATLLPLPEEGAPHDCLEILAETHGTRPDLTDQPIPDADHTWYTDGSSFLQEGQRKAGAAVTTETEVIWARALPAGTSAQRAELIALTQALKMAEGKRLNVYTDSRYAFATAHIHGEIYRRRGLLTSEGREIKNKSEILALLKALFLPKRLSIIHCLGHQKGDSAEARGNRLADQAAREAAIKTPPDTSTLLAGKRTADGSEFEKRTADGSEFESPKKKAKVE

SEQ ID NO: 1839 - protein, 2096 aa, synthetic construct
MPAAKRVKLDGGDKKYSIGLDIGTNSVGWAVITDEYKVPSKKFKVLGNTDRHSIKKNLIGALLFDSGETAEATRLKRTARRRYTRRKNRICYLQEIFSNEMAKVDDSFFHRLEESFLVEEDKKHERHPIFGNIVDEVAYHEKYPTIYHLRKKLVDSTDKADLRLIYLALAHMIKFRGHFLIEGDLNPDNSDVDKLFIQLVQTYNQLFEENPINASGVDAKAILSARLSKSRRLENLIAQLPGEKKNGLFGNLIALSLGLTPNFKSNFDLAEDAKLQLSKDTYDDDLDNLLAQIGDQYADLFLAAKNLSDAILLSDILRVNTEITKAPLSASMIKRYDEHHQDLTLLKALVRQQLPEKYKEIFFDQSKNGYAGYIDGGASQEEFYKFIKPILEKMDGTEELLVKLNREDLLRKQRTFDNGSIPHQIHLGELHAILRRQEDFYPFLKDNREKIEKILTFRIPYYVGPLARGNSRFAWMTRKSEETITPWNFEEVVDKGASAQSFIERMTNFDKNLPNEKVLPKHSLLYEYFTVYNELTKVKYVTEGMRKPAFLSGEQKKAIVDLLFKTNRKVTVKQLKEDYFKKIECFDSVEISGVEDRFNASLGTYHDLLKIIKDKDFLDNEENEDILEDIVLTLTLFEDREMIEERLKTYAHLFDDKVMKQLKRRRYTGWGRLSRKLINGIRDKQSGKTILDFLKSDGFANRNFMQLIHDDSLTFKEDIQKAQVSGQGDSLHEHIANLAGSPAIKKGILQTVKVVDELVKVMGRHKPENIVIEMARENQTTQKGQKNSRERMKRIEEGIKELGSQILKEHPVENTQLQNEKLYLYYLQNGRDMYVDQELDINRLSDYDVDHIVPQSFLKDDSIDNKVLTRSDKARGKSDNVPSEEVVKKMKNYWRQLLNAKLITQRKFDNLTKAERGGLSELDKAGFIKRQLVETRQITKHVAQILDSRMNTKYDENDKLIREVKVITLKSKLVSDFRKDFQFYKVREINNYHHAHDAYLNAVVGTALIKKYPKLESEFVYGDYKVYDVRKMIAKSEQEIGKATAKYFFYSNIMNFFKTEITLANGEIRKRPLIETNGETGEIVWDKGRDFATVRKVLSMPQVNIVKKTEVQTGGFSKESILPKRNSDKLIARKKDWDPKKYGGFDSPTVAYSVLVVAKVEKGKSKKLKSVKELLGITIMERSSFEKNPIDFLEAKGYKEVKKDLIIKLPKYSLFELENGRKRMLASAGELQKGNELALPSKYVNFLYLASHYEKLKGSPEDNEQKQLFVEQHKHYLDEIIEQISEFSKRVILADANLDKVLSAYNKHRDKPIREQAENIIHLFTLTNLGAPAAFKYFDTTIDRKRYTSTKEVLDATLIHQSITGLYETRIDLSQLGGDGGEAAAKGGGPAPGGTLNLEDEYRLYETSAEPEVSPGSTWLSDFPQAWAETGGMGLAVRQAPLIIPLKATSTPVSIKQYPMSQEAKLGIKPHIQRLLDQGILVPCQSPWNTPLLPVKKPGTNDYRPVQDLREVNKRVEDIHPTVPNPYNLLSGLPPSHRWYTVLDLKDAFFCLRLHPTSQPLFAFEWRDPGMGISGQLTWTRLPQGFKNSPTLFDEALHRDLADFRIQHPDLILLQYVDDILLAATSELDCQQGTRALLLTLGNLGYRASAKKAQLCQKQVKYLGYLLKEGQRWLTEARKETVMGQPTPKTPRQLREFLGTAGFCRLWIPGFAEMAAPLYPLTKTGTLFNWGPDQQKAYQEIKQALLTAPALGLPDLTKPFELFVDEKQGYAKGVLTQKLGPWRRPVAYLSKKLDPVAAGWPPCLRMVAAIAVLRKDAGKLTMGQPLVILAPHAVEALVKQPPDRWLSNARMTHYQAMLLDTDRVQFGPVVALNPATLLPLPEEGAPHDCLEILAETHGTRPDLTDQPIPDADHTWYTDGSSFLQEGQRKAGAAVTTETEVIWARALPAGTSAQRAELIALTQALKMAEGKRLNVYTDSRYAFATAHIHGEIYRRRGLLTSEGREIKNKSEILALLKALFLPKRLSIIHCLGHQKGDSAEARGNRLADQAAREAAIKTPPDTSTLLAGKRTADGSEFEKRTADGSEFESPKKKAKVE

SEQ ID NO: 1840 - protein, 2096 aa, synthetic construct
MPAAKRVKLDGGDKKYSIGLDIGTNSVGWAVITDEYKVPSKKFKVLGNTDRHSIKKNLIGALLFDSGETAEATRLKRTARRRYTRRKNRICYLQEIFSNEMAKVDDSFFHRLEESFLVEEDKKHERHPIFGNIVDEVAYHEKYPTIYHLRKKLVDSTDKADLRLIYLALAHMIKFRGHFLIEGDLNPDNSDVDKLFIQLVQTYNQLFEENPINASGVDAKAILSARLSKSRRLENLIAQLPGEKKNGLFGNLIALSLGLTPNFKSNFDLAEDAKLQLSKDTYDDDLDNLLAQIGDQYADLFLAAKNLSDAILLSDILRVNTEITKAPLSASMIKRYDEHHQDLTLLKALVRQQLPEKYKEIFFDQSKNGYAGYIDGGASQEEFYKFIKPILEKMDGTEELLVKLNREDLLRKQRTFDNGSIPHQIHLGELHAILRRQEDFYPFLKDNREKIEKILTFRIPYYVGPLARGNSRFAWMTRKSEETITPWNFEEVVDKGASAQSFIERMTNFDKNLPNEKVLPKHSLLYEYFTVYNELTKVKYVTEGMRKPAFLSGEQKKAIVDLLFKTNRKVTVKQLKEDYFKKIECFDSVEISGVEDRFNASLGTYHDLLKIIKDKDFLDNEENEDILEDIVLTLTLFEDREMIEERLKTYAHLFDDKVMKQLKRRRYTGWGRLSRKLINGIRDKQSGKTILDFLKSDGFANRNFMQLIHDDSLTFKEDIQKAQVSGQGDSLHEHIANLAGSPAIKKGILQTVKVVDELVKVMGRHKPENIVIEMARENQTTQKGQKNSRERMKRIEEGIKELGSQILKEHPVENTQLQNEKLYLYYLQNGRDMYVDQELDINRLSDYDVDHIVPQSFLKDDSIDNKVLTRSDKARGKSDNVPSEEVVKKMKNYWRQLLNAKLITQRKFDNLTKAERGGLSELDKAGFIKRQLVETRQITKHVAQILDSRMNTKYDENDKLIREVKVITLKSKLVSDFRKDFQFYKVREINNYHHAHDAYLNAVVGTALIKKYPKLESEFVYGDYKVYDVRKMIAKSEQEIGKATAKYFFYSNIMNFFKTEITLANGEIRKRPLIETNGETGEIVWDKGRDFATVRKVLSMPQVNIVKKTEVQTGGFSKESILPKRNSDKLIARKKDWDPKKYGGFDSPTVAYSVLVVAKVEKGKSKKLKSVKELLGITIMERSSFEKNPIDFLEAKGYKEVKKDLIIKLPKYSLFELENGRKRMLASAGELQKGNELALPSKYVNFLYLASHYEKLKGSPEDNEQKQLFVEQHKHYLDEIIEQISEFSKRVILADANLDKVLSAYNKHRDKPIREQAENIIHLFTLTNLGAPAAFKYFDTTIDRKRYTSTKEVLDATLIHQSITGLYETRIDLSQLGGDGGGGGPAPEAAAKGGTLNLEDEYRLYETSAEPEVSPGSTWLSDFPQAWAETGGMGLAVRQAPLIIPLKATSTPVSIKQYPMSQEAKLGIKPHIQRLLDQGILVPCQSPWNTPLLPVKKPGTNDYRPVQDLREVNKRVEDIHPTVPNPYNLLSGLPPSHRWYTVLDLKDAFFCLRLHPTSQPLFAFEWRDPGMGISGQLTWTRLPQGFKNSPTLFDEALHRDLADFRIQHPDLILLQYVDDILLAATSELDCQQGTRALLLTLGNLGYRASAKKAQLCQKQVKYLGYLLKEGQRWLTEARKETVMGQPTPKTPRQLREFLGTAGFCRLWIPGFAEMAAPLYPLTKTGTLFNWGPDQQKAYQEIKQALLTAPALGLPDLTKPFELFVDEKQGYAKGVLTQKLGPWRRPVAYLSKKLDPVAAGWPPCLRMVAAIAVLRKDAGKLTMGQPLVILAPHAVEALVKQPPDRWLSNARMTHYQAMLLDTDRVQFGPVVALNPATLLPLPEEGAPHDCLEILAETHGTRPDLTDQPIPDADHTWYTDGSSFLQEGQRKAGAAVTTETEVIWARALPAGTSAQRAELIALTQALKMAEGKRLNVYTDSRYAFATAHIHGEIYRRRGLLTSEGREIKNKSEILALLKALFLPKRLSIIHCLGHQKGDSAEARGNRLADQAAREAAIKTPPDTSTLLAGKRTADGSEFEKRTADGSEFESPKKKAKVE

SEQ ID NO: 1841 - protein, 2096 aa, synthetic construct
MPAAKRVKLDGGDKKYSIGLDIGTNSVGWAVITDEYKVPSKKFKVLGNTDRHSIKKNLIGALLFDSGETAEATRLKRTARRRYTRRKNRICYLQEIFSNEMAKVDDSFFHRLEESFLVEEDKKHERHPIFGNIVDEVAYHEKYPTIYHLRKKLVDSTDKADLRLIYLALAHMIKFRGHFLIEGDLNPDNSDVDKLFIQLVQTYNQLFEENPINASGVDAKAILSARLSKSRRLENLIAQLPGEKKNGLFGNLIALSLGLTPNFKSNFDLAEDAKLQLSKDTYDDDLDNLLAQIGDQYADLFLAAKNLSDAILLSDILRVNTEITKAPLSASMIKRYDEHHQDLTLLKALVRQQLPEKYKEIFFDQSKNGYAGYIDGGASQEEFYKFIKPILEKMDGTEELLVKLNREDLLRKQRTFDNGSIPHQIHLGELHAILRRQEDFYPFLKDNREKIEKILTFRIPYYVGPLARGNSRFAWMTRKSEETITPWNFEEVVDKGASAQSFIERMTNFDKNLPNEKVLPKHSLLYEYFTVYNELTKVKYVTEGMRKPAFLSGEQKKAIVDLLFKTNRKVTVKQLKEDYFKKIECFDSVEISGVEDRFNASLGTYHDLLKIIKDKDFLDNEENEDILEDIVLTLTLFEDREMIEERLKTYAHLFDDKVMKQLKRRRYTGWGRLSRKLINGIRDKQSGKTILDFLKSDGFANRNFMQLIHDDSLTFKEDIQKAQVSGQGDSLHEHIANLAGSPAIKKGILQTVKVVDELVKVMGRHKPENIVIEMARENQTTQKGQKNSRERMKRIEEGIKELGSQILKEHPVENTQLQNEKLYLYYLQNGRDMYVDQELDINRLSDYDVDHIVPQSFLKDDSIDNKVLTRSDKARGKSDNVPSEEVVKKMKNYWRQLLNAKLITQRKFDNLTKAERGGLSELDKAGFIKRQLVETRQITKHVAQILDSRMNTKYDENDKLIREVKVITLKSKLVSDFRKDFQFYKVREINNYHHAHDAYLNAVVGTALIKKYPKLESEFVYGDYKVYDVRKMIAKSEQEIGKATAKYFFYSNIMNFFKTEITLANGEIRKRPLIETNGETGEIVWDKGRDFATVRKVLSMPQVNIVKKTEVQTGGFSKESILPKRNSDKLIARKKDWDPKKYGGFDSPTVAYSVLVVAKVEKGKSKKLKSVKELLGITIMERSSFEKNPIDFLEAKGYKEVKKDLIIKLPKYSLFELENGRKRMLASAGELQKGNELALPSKYVNFLYLASHYEKLKGSPEDNEQKQLFVEQHKHYLDEIIEQISEFSKRVILADANLDKVLSAYNKHRDKPIREQAENIIHLFTLTNLGAPAAFKYFDTTIDRKRYTSTKEVLDATLIHQSITGLYETRIDLSQLGGDGGEAAAKGGGGGSGGTLNLEDEYRLYETSAEPEVSPGSTWLSDFPQAWAETGGMGLAVRQAPLIIPLKATSTPVSIKQYPMSQEAKLGIKPHIQRLLDQGILVPCQSPWNTPLLPVKKPGTNDYRPVQDLREVNKRVEDIHPTVPNPYNLLSGLPPSHRWYTVLDLKDAFFCLRLHPTSQPLFAFEWRDPGMGISGQLTWTRLPQGFKNSPTLFDEALHRDLADFRIQHPDLILLQYVDDILLAATSELDCQQGTRALLLTLGNLGYRASAKKAQLCQKQVKYLGYLLKEGQRWLTEARKETVMGQPTPKTPRQLREFLGTAGFCRLWIPGFAEMAAPLYPLTKTGTLFNWGPDQQKAYQEIKQALLTAPALGLPDLTKPFELFVDEKQGYAKGVLTQKLGPWRRPVAYLSKKLDPVAAGWPPCLRMVAAIAVLRKDAGKLTMGQPLVILAPHAVEALVKQPPDRWLSNARMTHYQAMLLDTDRVQFGPVVALNPATLLPLPEEGAPHDCLEILAETHGTRPDLTDQPIPDADHTWYTDGSSFLQEGQRKAGAAVTTETEVIWARALPAGTSAQRAELIALTQALKMAEGKRLNVYTDSRYAFATAHIHGEIYRRRGLLTSEGREIKNKSEILALLKALFLPKRLSIIHCLGHQKGDSAEARGNRLADQAAREAAIKTPPDTSTLLAGKRTADGSEFEKRTADGSEFESPKKKAKVE

SEQ ID NO: 1842 - protein, 2096 aa, synthetic construct
MPAAKRVKLDGGDKKYSIGLDIGTNSVGWAVITDEYKVPSKKFKVLGNTDRHSIKKNLIGALLFDSGETAEATRLKRTARRRYTRRKNRICYLQEIFSNEMAKVDDSFFHRLEESFLVEEDKKHERHPIFGNIVDEVAYHEKYPTIYHLRKKLVDSTDKADLRLIYLALAHMIKFRGHFLIEGDLNPDNSDVDKLFIQLVQTYNQLFEENPINASGVDAKAILSARLSKSRRLENLIAQLPGEKKNGLFGNLIALSLGLTPNFKSNFDLAEDAKLQLSKDTYDDDLDNLLAQIGDQYADLFLAAKNLSDAILLSDILRVNTEITKAPLSASMIKRYDEHHQDLTLLKALVRQQLPEKYKEIFFDQSKNGYAGYIDGGASQEEFYKFIKPILEKMDGTEELLVKLNREDLLRKQRTFDNGSIPHQIHLGELHAILRRQEDFYPFLKDNREKIEKILTFRIPYYVGPLARGNSRFAWMTRKSEETITPWNFEEVVDKGASAQSFIERMTNFDKNLPNEKVLPKHSLLYEYFTVYNELTKVKYVTEGMRKPAFLSGEQKKAIVDLLFKTNRKVTVKQLKEDYFKKIECFDSVEISGVEDRFNASLGTYHDLLKIIKDKDFLDNEENEDILEDIVLTLTLFEDREMIEERLKTYAHLFDDKVMKQLKRRRYTGWGRLSRKLINGIRDKQSGKTILDFLKSDGFANRNFMQLIHDDSLTFKEDIQKAQVSGQGDSLHEHIANLAGSPAIKKGILQTVKVVDELVKVMGRHKPENIVIEMARENQTTQKGQKNSRERMKRIEEGIKELGSQILKEHPVENTQLQNEKLYLYYLQNGRDMYVDQELDINRLSDYDVDHIVPQSFLKDDSIDNKVLTRSDKARGKSDNVPSEEVVKKMKNYWRQLLNAKLITQRKFDNLTKAERGGLSELDKAGFIKRQLVETRQITKHVAQILDSRMNTKYDENDKLIREVKVITLKSKLVSDFRKDFQFYKVREINNYHHAHDAYLNAVVGTALIKKYPKLESEFVYGDYKVYDVRKMIAKSEQEIGKATAKYFFYSNIMNFFKTEITLANGEIRKRPLIETNGETGEIVWDKGRDFATVRKVLSMPQVNIVKKTEVQTGGFSKESILPKRNSDKLIARKKDWDPKKYGGFDSPTVAYSVLVVAKVEKGKSKKLKSVKELLGITIMERSSFEKNPIDFLEAKGYKEVKKDLIIKLPKYSLFELENGRKRMLASAGELQKGNELALPSKYVNFLYLASHYEKLKGSPEDNEQKQLFVEQHKHYLDEIIEQISEFSKRVILADANLDKVLSAYNKHRDKPIREQAENIIHLFTLTNLGAPAAFKYFDTTIDRKRYTSTKEVLDATLIHQSITGLYETRIDLSQLGGDGGPAPEAAAKGSSGGTLNLEDEYRLYETSAEPEVSPGSTWLSDFPQAWAETGGMGLAVRQAPLIIPLKATSTPVSIKQYPMSQEAKLGIKPHIQRLLDQGILVPCQSPWNTPLLPVKKPGTNDYRPVQDLREVNKRVEDIHPTVPNPYNLLSGLPPSHRWYTVLDLKDAFFCLRLHPTSQPLFAFEWRDPGMGISGQLTWTRLPQGFKNSPTLFNEALHRDLADFRIQHPDLILLQYVDDILLAATSELDCQQGTRALLLTLGNLGYRASAKKAQLCQKQVKYLGYLLKEGQRWLTEARKETVMGQPTPKTPRQLREFLGTAGFCRLWIPGFAEMAAPLYPLTKPGTLFNWGPDQQKAYQEIKQALLTAPALGLPDLTKPFELFVDEKQGYAKGVLTQKLGPWRRPVAYLSKKLDPVAAGWPPCLRMVAAIAVLRKDAGKLTMGQPLVILAPHAVEALVKQPPDRWLSNARMTHYQAMLLDTDRVQFGPVVALNPATLLPLPEEGAPHDCLEILAETHGTRPDLTDQPIPDADHTWYTDGSSFLQEGQRKAGAAVTTETEVIWARALPAGTSAQRAELIALTQALKMAEGKRLNVYTDSRYAFATAHIHGEIYRRRGWLTSEGREIKNKSEILALLKALFLPKRLSIIHCLGHQKGDSAEARGNRLADQAAREAAIKTPPDTSTLLAGKRTADGSEFEKRTADGSEFESPKKKAKVE

SEQ ID NO: 1843 - protein, 2093 aa, synthetic construct
MPAAKRVKLDGGDKKYSIGLDIGTNSVGWAVITDEYKVPSKKFKVLGNTDRHSIKKNLIGALLFDSGETAEATRLKRTARRRYTRRKNRICYLQEIFSNEMAKVDDSFFHRLEESFLVEEDKKHERHPIFGNIVDEVAYHEKYPTIYHLRKKLVDSTDKADLRLIYLALAHMIKFRGHFLIEGDLNPDNSDVDKLFIQLVQTYNQLFEENPINASGVDAKAILSARLSKSRRLENLIAQLPGEKKNGLFGNLIALSLGLTPNFKSNFDLAEDAKLQLSKDTYDDDLDNLLAQIGDQYADLFLAAKNLSDAILLSDILRVNTEITKAPLSASMIKRYDEHHQDLTLLKALVRQQLPEKYKEIFFDQSKNGYAGYIDGGASQEEFYKFIKPILEKMDGTEELLVKLNREDLLRKQRTFDNGSIPHQIHLGELHAILRRQEDFYPFLKDNREKIEKILTFRIPYYVGPLARGNSRFAWMTRKSEETITPWNFEEVVDKGASAQSFIERMTNFDKNLPNEKVLPKHSLLYEYFTVYNELTKVKYVTEGMRKPAFLSGEQKKAIVDLLFKTNRKVTVKQLKEDYFKKIECFDSVEISGVEDRFNASLGTYHDLLKIIKDKDFLDNEENEDILEDIVLTLTLFEDREMIEERLKTYAHLFDDKVMKQLKRRRYTGWGRLSRKLINGIRDKQSGKTILDFLKSDGFANRNFMQLIHDDSLTFKEDIQKAQVSGQGDSLHEHIANLAGSPAIKKGILQTVKVVDELVKVMGRHKPENIVIEMARENQTTQKGQKNSRERMKRIEEGIKELGSQILKEHPVENTQLQNEKLYLYYLQNGRDMYVDQELDINRLSDYDVDHIVPQSFLKDDSIDNKVLTRSDKARGKSDNVPSEEVVKKMKNYWRQLLNAKLITQRKFDNLTKAERGGLSELDKAGFIKRQLVETRQITKHVAQILDSRMNTKYDENDKLIREVKVITLKSKLVSDFRKDFQFYKVREINNYHHAHDAYLNAVVGTALIKKYPKLESEFVYGDYKVYDVRKMIAKSEQEIGKATAKYFFYSNIMNFFKTEITLANGEIRKRPLIETNGETGEIVWDKGRDFATVRKVLSMPQVNIVKKTEVQTGGFSKESILPKRNSDKLIARKKDWDPKKYGGFDSPTVAYSVLVVAKVEKGKSKKLKSVKELLGITIMERSSFEKNPIDFLEAKGYKEVKKDLIIKLPKYSLFELENGRKRMLASAGELQKGNELALPSKYVNFLYLASHYEKLKGSPEDNEQKQLFVEQHKHYLDEIIEQISEFSKRVILADANLDKVLSAYNKHRDKPIREQAENIIHLFTLTNLGAPAAFKYFDTTIDRKRYTSTKEVLDATLIHQSITGLYETRIDLSQLGGDGGPAPEAAAKGGTLNLEDEYRLYETSAEPEVSPGSTWLSDFPQAWAETGGMGLAVRQAPLIIPLKATSTPVSIKQYPMSQEAKLGIKPHIQRLLDQGILVPCQSPWNTPLLPVKKPGTNDYRPVQDLREVNKRVEDIHPTVPNPYNLLSGLPPSHRWYTVLDLKDAFFCLRLHPTSQPLFAFEWRDPGMGISGQLTWTRLPQGFKNSPTLFNEALHRDLADFRIQHPDLILLQYVDDILLAATSELDCQQGTRALLLTLGNLGYRASAKKAQLCQKQVKYLGYLLKEGQRWLTEARKETVMGQPTPKTPRQLREFLGTAGFCRLWIPGFAEMAAPLYPLTKPGTLFNWGPDQQKAYQEIKQALLTAPALGLPDLTKPFELFVDEKQGYAKGVLTQKLGPWRRPVAYLSKKLDPVAAGWPPCLRMVAAIAVLRKDAGKLTMGQPLVILAPHAVEALVKQPPDRWLSNARMTHYQAMLLDTDRVQFGPVVALNPATLLPLPEEGAPHDCLEILAETHGTRPDLTDQPIPDADHTWYTDGSSFLQEGQRKAGAAVTTETEVIWARALPAGTSAQRAELIALTQALKMAEGKRLNVYTDSRYAFATAHIHGEIYRRRGWLTSEGREIKNKSEILALLKALFLPKRLSIIHCLGHQKGDSAEARGNRLADQAAREAAIKTPPDTSTLLAGKRTADGSEFEKRTADGSEFESPKKKAKVE

SEQ ID NO: 1844 - protein, 2098 aa, synthetic construct
MPAAKRVKLDGGDKKYSIGLDIGTNSVGWAVITDEYKVPSKKFKVLGNTDRHSIKKNLIGALLFDSGETAEATRLKRTARRRYTRRKNRICYLQEIFSNEMAKVDDSFFHRLEESFLVEEDKKHERHPIFGNIVDEVAYHEKYPTIYHLRKKLVDSTDKADLRLIYLALAHMIKFRGHFLIEGDLNPDNSDVDKLFIQLVQTYNQLFEENPINASGVDAKAILSARLSKSRRLENLIAQLPGEKKNGLFGNLIALSLGLTPNFKSNFDLAEDAKLQLSKDTYDDDLDNLLAQIGDQYADLFLAAKNLSDAILLSDILRVNTEITKAPLSASMIKRYDEHHQDLTLLKALVRQQLPEKYKEIFFDQSKNGYAGYIDGGASQEEFYKFIKPILEKMDGTEELLVKLNREDLLRKQRTFDNGSIPHQIHLGELHAILRRQEDFYPFLKDNREKIEKILTFRIPYYVGPLARGNSRFAWMTRKSEETITPWNFEEVVDKGASAQSFIERMTNFDKNLPNEKVLPKHSLLYEYFTVYNELTKVKYVTEGMRKPAFLSGEQKKAIVDLLFKTNRKVTVKQLKEDYFKKIECFDSVEISGVEDRFNASLGTYHDLLKIIKDKDFLDNEENEDILEDIVLTLTLFEDREMIEERLKTYAHLFDDKVMKQLKRRRYTGWGRLSRKLINGIRDKQSGKTILDFLKSDGFANRNFMQLIHDDSLTFKEDIQKAQVSGQGDSLHEHIANLAGSPAIKKGILQTVKVVDELVKVMGRHKPENIVIEMARENQTTQKGQKNSRERMKRIEEGIKELGSQILKEHPVENTQLQNEKLYLYYLQNGRDMYVDQELDINRLSDYDVDHIVPQSFLKDDSIDNKVLTRSDKARGKSDNVPSEEVVKKMKNYWRQLLNAKLITQRKFDNLTKAERGGLSELDKAGFIKRQLVETRQITKHVAQILDSRMNTKYDENDKLIREVKVITLKSKLVSDFRKDFQFYKVREINNYHHAHDAYLNAVVGTALIKKYPKLESEFVYGDYKVYDVRKMIAKSEQEIGKATAKYFFYSNIMNFFKTEITLANGEIRKRPLIETNGETGEIVWDKGRDFATVRKVLSMPQVNIVKKTEVQTGGFSKESILPKRNSDKLIARKKDWDPKKYGGFDSPTVAYSVLVVAKVEKGKSKKLKSVKELLGITIMERSSFEKNPIDFLEAKGYKEVKKDLIIKLPKYSLFELENGRKRMLASAGELQKGNELALPSKYVNFLYLASHYEKLKGSPEDNEQKQLFVEQHKHYLDEIIEQISEFSKRVILADANLDKVLSAYNKHRDKPIREQAENIIHLFTLTNLGAPAAFKYFDTTIDRKRYTSTKEVLDATLIHQSITGLYETRIDLSQLGGDGGPAPAPAPAPAPAPGGTLNLEDEYRLYETSAEPEVSPGSTWLSDFPQAWAETGGMGLAVRQAPLIIPLKATSTPVSIKQYPMSQEAKLGIKPHIQRLLDQGILVPCQSPWNTPLLPVKKPGTNDYRPVQDLREVNKRVEDIHPTVPNPYNLLSGLPPSHRWYTVLDLKDAFFCLRLHPTSQPLFAFEWRDPGMGISGQLTWTRLPQGFKNSPTLFNEALHRDLADFRIQHPDLILLQYVDDILLAATSELDCQQGTRALLLTLGNLGYRASAKKAQLCQKQVKYLGYLLKEGQRWLTEARKETVMGQPTPKTPRQLREFLGTAGFCRLWIPGFAEMAAPLYPLTKPGTLFNWGPDQQKAYQEIKQALLTAPALGLPDLTKPFELFVDEKQGYAKGVLTQKLGPWRRPVAYLSKKLDPVAAGWPPCLRMVAAIAVLRKDAGKLTMGQPLVILAPHAVEALVKQPPDRWLSNARMTHYQAMLLDTDRVQFGPVVALNPATLLPLPEEGAPHDCLEILAETHGTRPDLTDQPIPDADHTWYTDGSSFLQEGQRKAGAAVTTETEVIWARALPAGTSAQRAELIALTQALKMAEGKRLNVYTDSRYAFATAHIHGEIYRRRGWLTSEGREIKNKSEILALLKALFLPKRLSIIHCLGHQKGDSAEARGNRLADQAAREAAIKTPPDTSTLLAGKRTADGSEFEKRTADGSEFESPKKKAKVE

SEQ ID NO: 1845 - protein, 2096 aa, synthetic construct
MPAAKRVKLDGGDKKYSIGLDIGTNSVGWAVITDEYKVPSKKFKVLGNTDRHSIKKNLIGALLFDSGETAEATRLKRTARRRYTRRKNRICYLQEIFSNEMAKVDDSFFHRLEESFLVEEDKKHERHPIFGNIVDEVAYHEKYPTIYHLRKKLVDSTDKADLRLIYLALAHMIKFRGHFLIEGDLNPDNSDVDKLFIQLVQTYNQLFEENPINASGVDAKAILSARLSKSRRLENLIAQLPGEKKNGLFGNLIALSLGLTPNFKSNFDLAEDAKLQLSKDTYDDDLDNLLAQIGDQYADLFLAAKNLSDAILLSDILRVNTEITKAPLSASMIKRYDEHHQDLTLLKALVRQQLPEKYKEIFFDQSKNGYAGYIDGGASQEEFYKFIKPILEKMDGTEELLVKLNREDLLRKQRTFDNGSIPHQIHLGELHAILRRQEDFYPFLKDNREKIEKILTFRIPYYVGPLARGNSRFAWMTRKSEETITPWNFEEVVDKGASAQSFIERMTNFDKNLPNEKVLPKHSLLYEYFTVYNELTKVKYVTEGMRKPAFLSGEQKKAIVDLLFKTNRKVTVKQLKEDYFKKIECFDSVEISGVEDRFNASLGTYHDLLKIIKDKDFLDNEENEDILEDIVLTLTLFEDREMIEERLKTYAHLFDDKVMKQLKRRRYTGWGRLSRKLINGIRDKQSGKTILDFLKSDGFANRNFMQLIHDDSLTFKEDIQKAQVSGQGDSLHEHIANLAGSPAIKKGILQTVKVVDELVKVMGRHKPENIVIEMARENQTTQKGQKNSRERMKRIEEGIKELGSQILKEHPVENTQLQNEKLYLYYLQNGRDMYVDQELDINRLSDYDVDHIVPQSFLKDDSIDNKVLTRSDKARGKSDNVPSEEVVKKMKNYWRQLLNAKLITQRKFDNLTKAERGGLSELDKAGFIKRQLVETRQITKHVAQILDSRMNTKYDENDKLIREVKVITLKSKLVSDFRKDFQFYKVREINNYHHAHDAYLNAVVGTALIKKYPKLESEFVYGDYKVYDVRKMIAKSEQEIGKATAKYFFYSNIMNFFKTEITLANGEIRKRPLIETNGETGEIVWDKGRDFATVRKVLSMPQVNIVKKTEVQTGGFSKESILPKRNSDKLIARKKDWDPKKYGGFDSPTVAYSVLVVAKVEKGKSKKLKSVKELLGITIMERSSFEKNPIDFLEAKGYKEVKKDLIIKLPKYSLFELENGRKRMLASAGELQKGNELALPSKYVNFLYLASHYEKLKGSPEDNEQKQLFVEQHKHYLDEIIEQISEFSKRVILADANLDKVLSAYNKHRDKPIREQAENIIHLFTLTNLGAPAAFKYFDTTIDRKRYTSTKEVLDATLIHQSITGLYETRIDLSQLGGDGGGSSGGGEAAAKGGTLNLEDEYRLYETSAEPEVSPGSTWLSDFPQAWAETGGMGLAVRQAPLIIPLKATSTPVSIKQYPMSQEAKLGIKPHIQRLLDQGILVPCQSPWNTPLLPVKKPGTNDYRPVQDLREVNKRVEDIHPTVPNPYNLLSGLPPSHRWYTVLDLKDAFFCLRLHPTSQPLFAFEWRDPGMGISGQLTWTRLPQGFKNSPTLFNEALHRDLADFRIQHPDLILLQYVDDILLAATSELDCQQGTRALLLTLGNLGYRASAKKAQLCQKQVKYLGYLLKEGQRWLTEARKETVMGQPTPKTPRQLREFLGTAGFCRLWIPGFAEMAAPLYPLTKPGTLFNWGPDQQKAYQEIKQALLTAPALGLPDLTKPFELFVDEKQGYAKGVLTQKLGPWRRPVAYLSKKLDPVAAGWPPCLRMVAAIAVLRKDAGKLTMGQPLVILAPHAVEALVKQPPDRWLSNARMTHYQAMLLDTDRVQFGPVVALNPATLLPLPEEGAPHDCLEILAETHGTRPDLTDQPIPDADHTWYTDGSSFLQEGQRKAGAAVTTETEVIWARALPAGTSAQRAELIALTQALKMAEGKRLNVYTDSRYAFATAHIHGEIYRRRGWLTSEGREIKNKSEILALLKALFLPKRLSIIHCLGHQKGDSAEARGNRLADQAAREAAIKTPPDTSTLLAGKRTADGSEFEKRTADGSEFESPKKKAKVE

SEQ ID NO: 1846 - protein, 2096 aa, synthetic construct
MPAAKRVKLDGGDKKYSIGLDIGTNSVGWAVITDEYKVPSKKFKVLGNTDRHSIKKNLIGALLFDSGETAEATRLKRTARRRYTRRKNRICYLQEIFSNEMAKVDDSFFHRLEESFLVEEDKKHERHPIFGNIVDEVAYHEKYPTIYHLRKKLVDSTDKADLRLIYLALAHMIKFRGHFLIEGDLNPDNSDVDKLFIQLVQTYNQLFEENPINASGVDAKAILSARLSKSRRLENLIAQLPGEKKNGLFGNLIALSLGLTPNFKSNFDLAEDAKLQLSKDTYDDDLDNLLAQIGDQYADLFLAAKNLSDAILLSDILRVNTEITKAPLSASMIKRYDEHHQDLTLLKALVRQQLPEKYKEIFFDQSKNGYAGYIDGGASQEEFYKFIKPILEKMDGTEELLVKLNREDLLRKQRTFDNGSIPHQIHLGELHAILRRQEDFYPFLKDNREKIEKILTFRIPYYVGPLARGNSRFAWMTRKSEETITPWNFEEVVDKGASAQSFIERMTNFDKNLPNEKVLPKHSLLYEYFTVYNELTKVKYVTEGMRKPAFLSGEQKKAIVDLLFKTNRKVTVKQLKEDYFKKIECFDSVEISGVEDRFNASLGTYHDLLKIIKDKDFLDNEENEDILEDIVLTLTLFEDREMIEERLKTYAHLFDDKVMKQLKRRRYTGWGRLSRKLINGIRDKQSGKTILDFLKSDGFANRNFMQLIHDDSLTFKEDIQKAQVSGQGDSLHEHIANLAGSPAIKKGILQTVKVVDELVKVMGRHKPENIVIEMARENQTTQKGQKNSRERMKRIEEGIKELGSQILKEHPVENTQLQNEKLYLYYLQNGRDMYVDQELDINRLSDYDVDHIVPQSFLKDDSIDNKVLTRSDKARGKSDNVPSEEVVKKMKNYWRQLLNAKLITQRKFDNLTKAERGGLSELDKAGFIKRQLVETRQITKHVAQILDSRMNTKYDENDKLIREVKVITLKSKLVSDFRKDFQFYKVREINNYHHAHDAYLNAVVGTALIKKYPKLESEFVYGDYKVYDVRKMIAKSEQEIGKATAKYFFYSNIMNFFKTEITLANGEIRKRPLIETNGETGEIVWDKGRDFATVRKVLSMPQVNIVKKTEVQTGGFSKESILPKRNSDKLIARKKDWDPKKYGGFDSPTVAYSVLVVAKVEKGKSKKLKSVKELLGITIMERSSFEKNPIDFLEAKGYKEVKKDLIIKLPKYSLFELENGRKRMLASAGELQKGNELALPSKYVNFLYLASHYEKLKGSPEDNEQKQLFVEQHKHYLDEIIEQISEFSKRVILADANLDKVLSAYNKHRDKPIREQAENIIHLFTLTNLGAPAAFKYFDTTIDRKRYTSTKEVLDATLIHQSITGLYETRIDLSQLGGDGGEAAAKGGGGSSGGTLNLEDEYRLYETSAEPEVSPGSTWLSDFPQAWAETGGMGLAVRQAPLIIPLKATSTPVSIKQYPMSQEAKLGIKPHIQRLLDQGILVPCQSPWNTPLLPVKKPGTNDYRPVQDLREVNKRVEDIHPTVPNPYNLLSGLPPSHRWYTVLDLKDAFFCLRLHPTSQPLFAFEWRDPGMGISGQLTWTRLPQGFKNSPTLFNEALHRDLADFRIQHPDLILLQYVDDILLAATSELDCQQGTRALLLTLGNLGYRASAKKAQLCQKQVKYLGYLLKEGQRWLTEARKETVMGQPTPKTPRQLREFLGTAGFCRLWIPGFAEMAAPLYPLTKPGTLFNWGPDQQKAYQEIKQALLTAPALGLPDLTKPFELFVDEKQGYAKGVLTQKLGPWRRPVAYLSKKLDPVAAGWPPCLRMVAAIAVLRKDAGKLTMGQPLVILAPHAVEALVKQPPDRWLSNARMTHYQAMLLDTDRVQFGPVVALNPATLLPLPEEGAPHDCLEILAETHGTRPDLTDQPIPDADHTWYTDGSSFLQEGQRKAGAAVTTETEVIWARALPAGTSAQRAELIALTQALKMAEGKRLNVYTDSRYAFATAHIHGEIYRRRGWLTSEGREIKNKSEILALLKALFLPKRLSIIHCLGHQKGDSAEARGNRLADQAAREAAIKTPPDTSTLLAGKRTADGSEFEKRTADGSEFESPKKKAKVE

SEQ ID NO: 1847 - protein, 2095 aa, synthetic construct
MPAAKRVKLDGGDKKYSIGLDIGTNSVGWAVITDEYKVPSKKFKVLGNTDRHSIKKNLIGALLFDSGETAEATRLKRTARRRYTRRKNRICYLQEIFSNEMAKVDDSFFHRLEESFLVEEDKKHERHPIFGNIVDEVAYHEKYPTIYHLRKKLVDSTDKADLRLIYLALAHMIKFRGHFLIEGDLNPDNSDVDKLFIQLVQTYNQLFEENPINASGVDAKAILSARLSKSRRLENLIAQLPGEKKNGLFGNLIALSLGLTPNFKSNFDLAEDAKLQLSKDTYDDDLDNLLAQIGDQYADLFLAAKNLSDAILLSDILRVNTEITKAPLSASMIKRYDEHHQDLTLLKALVRQQLPEKYKEIFFDQSKNGYAGYIDGGASQEEFYKFIKPILEKMDGTEELLVKLNREDLLRKQRTFDNGSIPHQIHLGELHAILRRQEDFYPFLKDNREKIEKILTFRIPYYVGPLARGNSRFAWMTRKSEETITPWNFEEVVDKGASAQSFIERMTNFDKNLPNEKVLPKHSLLYEYFTVYNELTKVKYVTEGMRKPAFLSGEQKKAIVDLLFKTNRKVTVKQLKEDYFKKIECFDSVEISGVEDRFNASLGTYHDLLKIIKDKDFLDNEENEDILEDIVLTLTLFEDREMIEERLKTYAHLFDDKVMKQLKRRRYTGWGRLSRKLINGIRDKQSGKTILDFLKSDGFANRNFMQLIHDDSLTFKEDIQKAQVSGQGDSLHEHIANLAGSPAIKKGILQTVKVVDELVKVMGRHKPENIVIEMARENQTTQKGQKNSRERMKRIEEGIKELGSQILKEHPVENTQLQNEKLYLYYLQNGRDMYVDQELDINRLSDYDVDHIVPQSFLKDDSIDNKVLTRSDKARGKSDNVPSEEVVKKMKNYWRQLLNAKLITQRKFDNLTKAERGGLSELDKAGFIKRQLVETRQITKHVAQILDSRMNTKYDENDKLIREVKVITLKSKLVSDFRKDFQFYKVREINNYHHAHDAYLNAVVGTALIKKYPKLESEFVYGDYKVYDVRKMIAKSEQEIGKATAKYFFYSNIMNFFKTEITLANGEIRKRPLIETNGETGEIVWDKGRDFATVRKVLSMPQVNIVKKTEVQTGGFSKESILPKRNSDKLIARKKDWDPKKYGGFDSPTVAYSVLVVAKVEKGKSKKLKSVKELLGITIMERSSFEKNPIDFLEAKGYKEVKKDLIIKLPKYSLFELENGRKRMLASAGELQKGNELALPSKYVNFLYLASHYEKLKGSPEDNEQKQLFVEQHKHYLDEIIEQISEFSKRVILADANLDKVLSAYNKHRDKPIREQAENIIHLFTLTNLGAPAAFKYFDTTIDRKRYTSTKEVLDATLIHQSITGLYETRIDLSQLGGDGGEAAAKEAAAKGGTLNLEDEYRLYETSAEPEVSPGSTWLSDFPQAWAETGGMGLAVRQAPLIIPLKATSTPVSIKQYPMSQEAKLGIKPHIQRLLDQGILVPCQSPWNTPLLPVKKPGTNDYRPVQDLREVNKRVEDIHPTVPNPYNLLSGLPPSHRWYTVLDLKDAFFCLRLHPTSQPLFAFEWRDPGMGISGQLTWTRLPQGFKNSPTLFNEALHRDLADFRIQHPDLILLQYVDDILLAATSELDCQQGTRALLLTLGNLGYRASAKKAQLCQKQVKYLGYLLKEGQRWLTEARKETVMGQPTPKTPRQLREFLGTAGFCRLWIPGFAEMAAPLYPLTKPGTLFNWGPDQQKAYQEIKQALLTAPALGLPDLTKPFELFVDEKQGYAKGVLTQKLGPWRRPVAYLSKKLDPVAAGWPPCLRMVAAIAVLRKDAGKLTMGQPLVILAPHAVEALVKQPPDRWLSNARMTHYQAMLLDTDRVQFGPVVALNPATLLPLPEEGAPHDCLEILAETHGTRPDLTDQPIPDADHTWYTDGSSFLQEGQRKAGAAVTTETEVIWARALPAGTSAQRAELIALTQALKMAEGKRLNVYTDSRYAFATAHIHGEIYRRRGWLTSEGREIKNKSEILALLKALFLPKRLSIIHCLGHQKGDSAEARGNRLADQAAREAAIKTPPDTSTLLAGKRTADGSEFEKRTADGSEFESPKKKAKVE

SEQ ID NO: 1848 - protein, 2091 aa, synthetic construct
MPAAKRVKLDGGDKKYSIGLDIGTNSVGWAVITDEYKVPSKKFKVLGNTDRHSIKKNLIGALLFDSGETAEATRLKRTARRRYTRRKNRICYLQEIFSNEMAKVDDSFFHRLEESFLVEEDKKHERHPIFGNIVDEVAYHEKYPTIYHLRKKLVDSTDKADLRLIYLALAHMIKFRGHFLIEGDLNPDNSDVDKLFIQLVQTYNQLFEENPINASGVDAKAILSARLSKSRRLENLIAQLPGEKKNGLFGNLIALSLGLTPNFKSNFDLAEDAKLQLSKDTYDDDLDNLLAQIGDQYADLFLAAKNLSDAILLSDILRVNTEITKAPLSASMIKRYDEHHQDLTLLKALVRQQLPEKYKEIFFDQSKNGYAGYIDGGASQEEFYKFIKPILEKMDGTEELLVKLNREDLLRKQRTFDNGSIPHQIHLGELHAILRRQEDFYPFLKDNREKIEKILTFRIPYYVGPLARGNSRFAWMTRKSEETITPWNFEEVVDKGASAQSFIERMTNFDKNLPNEKVLPKHSLLYEYFTVYNELTKVKYVTEGMRKPAFLSGEQKKAIVDLLFKTNRKVTVKQLKEDYFKKIECFDSVEISGVEDRFNASLGTYHDLLKIIKDKDFLDNEENEDILEDIVLTLTLFEDREMIEERLKTYAHLFDDKVMKQLKRRRYTGWGRLSRKLINGIRDKQSGKTILDFLKSDGFANRNFMQLIHDDSLTFKEDIQKAQVSGQGDSLHEHIANLAGSPAIKKGILQTVKVVDELVKVMGRHKPENIVIEMARENQTTQKGQKNSRERMKRIEEGIKELGSQILKEHPVENTQLQNEKLYLYYLQNGRDMYVDQELDINRLSDYDVDHIVPQSFLKDDSIDNKVLTRSDKARGKSDNVPSEEVVKKMKNYWRQLLNAKLITQRKFDNLTKAERGGLSELDKAGFIKRQLVETRQITKHVAQILDSRMNTKYDENDKLIREVKVITLKSKLVSDFRKDFQFYKVREINNYHHAHDAYLNAVVGTALIKKYPKLESEFVYGDYKVYDVRKMIAKSEQEIGKATAKYFFYSNIMNFFKTEITLANGEIRKRPLIETNGETGEIVWDKGRDFATVRKVLSMPQVNIVKKTEVQTGGFSKESILPKRNSDKLIARKKDWDPKKYGGFDSPTVAYSVLVVAKVEKGKSKKLKSVKELLGITIMERSSFEKNPIDFLEAKGYKEVKKDLIIKLPKYSLFELENGRKRMLASAGELQKGNELALPSKYVNFLYLASHYEKLKGSPEDNEQKQLFVEQHKHYLDEIIEQISEFSKRVILADANLDKVLSAYNKHRDKPIREQAENIIHLFTLTNLGAPAAFKYFDTTIDRKRYTSTKEVLDATLIHQSITGLYETRIDLSQLGGDGGPAPGGGGGTLNLEDEYRLYETSAEPEVSPGSTWLSDFPQAWAETGGMGLAVRQAPLIIPLKATSTPVSIKQYPMSQEAKLGIKPHIQRLLDQGILVPCQSPWNTPLLPVKKPGTNDYRPVQDLREVNKRVEDIHPTVPNPYNLLSGLPPSHRWYTVLDLKDAFFCLRLHPTSQPLFAFEWRDPGMGISGQLTWTRLPQGFKNSPTLFNEALHRDLADFRIQHPDLILLQYVDDILLAATSELDCQQGTRALLLTLGNLGYRASAKKAQLCQKQVKYLGYLLKEGQRWLTEARKETVMGQPTPKTPRQLREFLGTAGFCRLWIPGFAEMAAPLYPLTKPGTLFNWGPDQQKAYQEIKQALLTAPALGLPDLTKPFELFVDEKQGYAKGVLTQKLGPWRRPVAYLSKKLDPVAAGWPPCLRMVAAIAVLRKDAGKLTMGQPLVILAPHAVEALVKQPPDRWLSNARMTHYQAMLLDTDRVQFGPVVALNPATLLPLPEEGAPHDCLEILAETHGTRPDLTDQPIPDADHTWYTDGSSFLQEGQRKAGAAVTTETEVIWARALPAGTSAQRAELIALTQALKMAEGKRLNVYTDSRYAFATAHIHGEIYRRRGWLTSEGREIKNKSEILALLKALFLPKRLSIIHCLGHQKGDSAEARGNRLADQAAREAAIKTPPDTSTLLAGKRTADGSEFEKRTADGSEFESPKKKAKVE

SEQ ID NO: 1849 - protein, 2097 aa, synthetic construct
MPAAKRVKLDGGDKKYSIGLDIGTNSVGWAVITDEYKVPSKKFKVLGNTDRHSIKKNLIGALLFDSGETAEATRLKRTARRRYTRRKNRICYLQEIFSNEMAKVDDSFFHRLEESFLVEEDKKHERHPIFGNIVDEVAYHEKYPTIYHLRKKLVDSTDKADLRLIYLALAHMIKFRGHFLIEGDLNPDNSDVDKLFIQLVQTYNQLFEENPINASGVDAKAILSARLSKSRRLENLIAQLPGEKKNGLFGNLIALSLGLTPNFKSNFDLAEDAKLQLSKDTYDDDLDNLLAQIGDQYADLFLAAKNLSDAILLSDILRVNTEITKAPLSASMIKRYDEHHQDLTLLKALVRQQLPEKYKEIFFDQSKNGYAGYIDGGASQEEFYKFIKPILEKMDGTEELLVKLNREDLLRKQRTFDNGSIPHQIHLGELHAILRRQEDFYPFLKDNREKIEKILTFRIPYYVGPLARGNSRFAWMTRKSEETITPWNFEEVVDKGASAQSFIERMTNFDKNLPNEKVLPKHSLLYEYFTVYNELTKVKYVTEGMRKPAFLSGEQKKAIVDLLFKTNRKVTVKQLKEDYFKKIECFDSVEISGVEDRFNASLGTYHDLLKIIKDKDFLDNEENEDILEDIVLTLTLFEDREMIEERLKTYAHLFDDKVMKQLKRRRYTGWGRLSRKLINGIRDKQSGKTILDFLKSDGFANRNFMQLIHDDSLTFKEDIQKAQVSGQGDSLHEHIANLAGSPAIKKGILQTVKVVDELVKVMGRHKPENIVIEMARENQTTQKGQKNSRERMKRIEEGIKELGSQILKEHPVENTQLQNEKLYLYYLQNGRDMYVDQELDINRLSDYDVDHIVPQSFLKDDSIDNKVLTRSDKARGKSDNVPSEEVVKKMKNYWRQLLNAKLITQRKFDNLTKAERGGLSELDKAGFIKRQLVETRQITKHVAQILDSRMNTKYDENDKLIREVKVITLKSKLVSDFRKDFQFYKVREINNYHHAHDAYLNAVVGTALIKKYPKLESEFVYGDYKVYDVRKMIAKSEQEIGKATAKYFFYSNIMNFFKTEITLANGEIRKRPLIETNGETGEIVWDKGRDFATVRKVLSMPQVNIVKKTEVQTGGFSKESILPKRNSDKLIARKKDWDPKKYGGFDSPTVAYSVLVVAKVEKGKSKKLKSVKELLGITIMERSSFEKNPIDFLEAKGYKEVKKDLIIKLPKYSLFELENGRKRMLASAGELQKGNELALPSKYVNFLYLASHYEKLKGSPEDNEQKQLFVEQHKHYLDEIIEQISEFSKRVILADANLDKVLSAYNKHRDKPIREQAENIIHLFTLTNLGAPAAFKYFDTTIDRKRYTSTKEVLDATLIHQSITGLYETRIDLSQLGGDGGGGSGGSGGSGGSGGTLNLEDEYRLYETSAEPEVSPGSTWLSDFPQAWAETGGMGLAVRQAPLIIPLKATSTPVSIKQYPMSQEAKLGIKPHIQRLLDQGILVPCQSPWNTPLLPVKKPGTNDYRPVQDLREVNKRVEDIHPTVPNPYNLLSGLPPSHRWYTVLDLKDAFFCLRLHPTSQPLFAFEWRDPGMGISGQLTWTRLPQGFKNSPTLFNEALHRDLADFRIQHPDLILLQYVDDILLAATSELDCQQGTRALLLTLGNLGYRASAKKAQLCQKQVKYLGYLLKEGQRWLTEARKETVMGQPTPKTPRQLREFLGTAGFCRLWIPGFAEMAAPLYPLTKPGTLFNWGPDQQKAYQEIKQALLTAPALGLPDLTKPFELFVDEKQGYAKGVLTQKLGPWRRPVAYLSKKLDPVAAGWPPCLRMVAAIAVLRKDAGKLTMGQPLVILAPHAVEALVKQPPDRWLSNARMTHYQAMLLDTDRVQFGPVVALNPATLLPLPEEGAPHDCLEILAETHGTRPDLTDQPIPDADHTWYTDGSSFLQEGQRKAGAAVTTETEVIWARALPAGTSAQRAELIALTQALKMAEGKRLNVYTDSRYAFATAHIHGEIYRRRGWLTSEGREIKNKSEILALLKALFLPKRLSIIHCLGHQKGDSAEARGNRLADQAAREAAIKTPPDTSTLLAGKRTADGSEFEKRTADGSEFESPKKKAKVE

SEQ ID NO: 1850 - protein, 2096 aa, synthetic construct
MPAAKRVKLDGGDKKYSIGLDIGTNSVGWAVITDEYKVPSKKFKVLGNTDRHSIKKNLIGALLFDSGETAEATRLKRTARRRYTRRKNRICYLQEIFSNEMAKVDDSFFHRLEESFLVEEDKKHERHPIFGNIVDEVAYHEKYPTIYHLRKKLVDSTDKADLRLIYLALAHMIKFRGHFLIEGDLNPDNSDVDKLFIQLVQTYNQLFEENPINASGVDAKAILSARLSKSRRLENLIAQLPGEKKNGLFGNLIALSLGLTPNFKSNFDLAEDAKLQLSKDTYDDDLDNLLAQIGDQYADLFLAAKNLSDAILLSDILRVNTEITKAPLSASMIKRYDEHHQDLTLLKALVRQQLPEKYKEIFFDQSKNGYAGYIDGGASQEEFYKFIKPILEKMDGTEELLVKLNREDLLRKQRTFDNGSIPHQIHLGELHAILRRQEDFYPFLKDNREKIEKILTFRIPYYVGPLARGNSRFAWMTRKSEETITPWNFEEVVDKGASAQSFIERMTNFDKNLPNEKVLPKHSLLYEYFTVYNELTKVKYVTEGMRKPAFLSGEQKKAIVDLLFKTNRKVTVKQLKEDYFKKIECFDSVEISGVEDRFNASLGTYHDLLKIIKDKDFLDNEENEDILEDIVLTLTLFEDREMIEERLKTYAHLFDDKVMKQLKRRRYTGWGRLSRKLINGIRDKQSGKTILDFLKSDGFANRNFMQLIHDDSLTFKEDIQKAQVSGQGDSLHEHIANLAGSPAIKKGILQTVKVVDELVKVMGRHKPENIVIEMARENQTTQKGQKNSRERMKRIEEGIKELGSQILKEHPVENTQLQNEKLYLYYLQNGRDMYVDQELDINRLSDYDVDHIVPQSFLKDDSIDNKVLTRSDKARGKSDNVPSEEVVKKMKNYWRQLLNAKLITQRKFDNLTKAERGGLSELDKAGFIKRQLVETRQITKHVAQILDSRMNTKYDENDKLIREVKVITLKSKLVSDFRKDFQFYKVREINNYHHAHDAYLNAVVGTALIKKYPKLESEFVYGDYKVYDVRKMIAKSEQEIGKATAKYFFYSNIMNFFKTEITLANGEIRKRPLIETNGETGEIVWDKGRDFATVRKVLSMPQVNIVKKTEVQTGGFSKESILPKRNSDKLIARKKDWDPKKYGGFDSPTVAYSVLVVAKVEKGKSKKLKSVKELLGITIMERSSFEKNPIDFLEAKGYKEVKKDLIIKLPKYSLFELENGRKRMLASAGELQKGNELALPSKYVNFLYLASHYEKLKGSPEDNEQKQLFVEQHKHYLDEIIEQISEFSKRVILADANLDKVLSAYNKHRDKPIREQAENIIHLFTLTNLGAPAAFKYFDTTIDRKRYTSTKEVLDATLIHQSITGLYETRIDLSQLGGDGGGSSEAAAKGGGGGTLNLEDEYRLYETSAEPEVSPGSTWLSDFPQAWAETGGMGLAVRQAPLIIPLKATSTPVSIKQYPMSQEAKLGIKPHIQRLLDQGILVPCQSPWNTPLLPVKKPGTNDYRPVQDLREVNKRVEDIHPTVPNPYNLLSGLPPSHRWYTVLDLKDAFFCLRLHPTSQPLFAFEWRDPGMGISGQLTWTRLPQGFKNSPTLFNEALHRDLADFRIQHPDLILLQYVDDILLAATSELDCQQGTRALLLTLGNLGYRASAKKAQLCQKQVKYLGYLLKEGQRWLTEARKETVMGQPTPKTPRQLREFLGTAGFCRLWIPGFAEMAAPLYPLTKPGTLFNWGPDQQKAYQEIKQALLTAPALGLPDLTKPFELFVDEKQGYAKGVLTQKLGPWRRPVAYLSKKLDPVAAGWPPCLRMVAAIAVLRKDAGKLTMGQPLVILAPHAVEALVKQPPDRWLSNARMTHYQAMLLDTDRVQFGPVVALNPATLLPLPEEGAPHDCLEILAETHGTRPDLTDQPIPDADHTWYTDGSSFLQEGQRKAGAAVTTETEVIWARALPAGTSAQRAELIALTQALKMAEGKRLNVYTDSRYAFATAHIHGEIYRRRGWLTSEGREIKNKSEILALLKALFLPKRLSIIHCLGHQKGDSAEARGNRLADQAAREAAIKTPPDTSTLLAGKRTADGSEFEKRTADGSEFESPKKKAKVE

SEQ ID NO: 1851 - protein, 2096 aa, synthetic construct
MPAAKRVKLDGGDKKYSIGLDIGTNSVGWAVITDEYKVPSKKFKVLGNTDRHSIKKNLIGALLFDSGETAEATRLKRTARRRYTRRKNRICYLQEIFSNEMAKVDDSFFHRLEESFLVEEDKKHERHPIFGNIVDEVAYHEKYPTIYHLRKKLVDSTDKADLRLIYLALAHMIKFRGHFLIEGDLNPDNSDVDKLFIQLVQTYNQLFEENPINASGVDAKAILSARLSKSRRLENLIAQLPGEKKNGLFGNLIALSLGLTPNFKSNFDLAEDAKLQLSKDTYDDDLDNLLAQIGDQYADLFLAAKNLSDAILLSDILRVNTEITKAPLSASMIKRYDEHHQDLTLLKALVRQQLPEKYKEIFFDQSKNGYAGYIDGGASQEEFYKFIKPILEKMDGTEELLVKLNREDLLRKQRTFDNGSIPHQIHLGELHAILRRQEDFYPFLKDNREKIEKILTFRIPYYVGPLARGNSRFAWMTRKSEETITPWNFEEVVDKGASAQSFIERMTNFDKNLPNEKVLPKHSLLYEYFTVYNELTKVKYVTEGMRKPAFLSGEQKKAIVDLLFKTNRKVTVKQLKEDYFKKIECFDSVEISGVEDRFNASLGTYHDLLKIIKDKDFLDNEENEDILEDIVLTLTLFEDREMIEERLKTYAHLFDDKVMKQLKRRRYTGWGRLSRKLINGIRDKQSGKTILDFLKSDGFANRNFMQLIHDDSLTFKEDIQKAQVSGQGDSLHEHIANLAGSPAIKKGILQTVKVVDELVKVMGRHKPENIVIEMARENQTTQKGQKNSRERMKRIEEGIKELGSQILKEHPVENTQLQNEKLYLYYLQNGRDMYVDQELDINRLSDYDVDHIVPQSFLKDDSIDNKVLTRSDKARGKSDNVPSEEVVKKMKNYWRQLLNAKLITQRKFDNLTKAERGGLSELDKAGFIKRQLVETRQITKHVAQILDSRMNTKYDENDKLIREVKVITLKSKLVSDFRKDFQFYKVREINNYHHAHDAYLNAVVGTALIKKYPKLESEFVYGDYKVYDVRKMIAKSEQEIGKATAKYFFYSNIMNFFKTEITLANGEIRKRPLIETNGETGEIVWDKGRDFATVRKVLSMPQVNIVKKTEVQTGGFSKESILPKRNSDKLIARKKDWDPKKYGGFDSPTVAYSVLVVAKVEKGKSKKLKSVKELLGITIMERSSFEKNPIDFLEAKGYKEVKKDLIIKLPKYSLFELENGRKRMLASAGELQKGNELALPSKYVNFLYLASHYEKLKGSPEDNEQKQLFVEQHKHYLDEIIEQISEFSKRVILADANLDKVLSAYNKHRDKPIREQAENIIHLFTLTNLGAPAAFKYFDTTIDRKRYTSTKEVLDATLIHQSITGLYETRIDLSQLGGDGGEAAAKPAPGGSGGTLNLEDEYRLYETSAEPEVSPGSTWLSDFPQAWAETGGMGLAVRQAPLIIPLKATSTPVSIKQYPMSQEAKLGIKPHIQRLLDQGILVPCQSPWNTPLLPVKKPGTNDYRPVQDLREVNKRVEDIHPTVPNPYNLLSGLPPSHRWYTVLDLKDAFFCLRLHPTSQPLFAFEWRDPGMGISGQLTWTRLPQGFKNSPTLFNEALHRDLADFRIQHPDLILLQYVDDILLAATSELDCQQGTRALLLTLGNLGYRASAKKAQLCQKQVKYLGYLLKEGQRWLTEARKETVMGQPTPKTPRQLREFLGTAGFCRLWIPGFAEMAAPLYPLTKPGTLFNWGPDQQKAYQEIKQALLTAPALGLPDLTKPFELFVDEKQGYAKGVLTQKLGPWRRPVAYLSKKLDPVAAGWPPCLRMVAAIAVLRKDAGKLTMGQPLVILAPHAVEALVKQPPDRWLSNARMTHYQAMLLDTDRVQFGPVVALNPATLLPLPEEGAPHDCLEILAETHGTRPDLTDQPIPDADHTWYTDGSSFLQEGQRKAGAAVTTETEVIWARALPAGTSAQRAELIALTQALKMAEGKRLNVYTDSRYAFATAHIHGEIYRRRGWLTSEGREIKNKSEILALLKALFLPKRLSIIHCLGHQKGDSAEARGNRLADQAAREAAIKTPPDTSTLLAGKRTADGSEFEKRTADGSEFESPKKKAKVE

SEQ ID NO: 1852 - protein, 2094 aa, synthetic construct
MPAAKRVKLDGGDKKYSIGLDIGTNSVGWAVITDEYKVPSKKFKVLGNTDRHSIKKNLIGALLFDSGETAEATRLKRTARRRYTRRKNRICYLQEIFSNEMAKVDDSFFHRLEESFLVEEDKKHERHPIFGNIVDEVAYHEKYPTIYHLRKKLVDSTDKADLRLIYLALAHMIKFRGHFLIEGDLNPDNSDVDKLFIQLVQTYNQLFEENPINASGVDAKAILSARLSKSRRLENLIAQLPGEKKNGLFGNLIALSLGLTPNFKSNFDLAEDAKLQLSKDTYDDDLDNLLAQIGDQYADLFLAAKNLSDAILLSDILRVNTEITKAPLSASMIKRYDEHHQDLTLLKALVRQQLPEKYKEIFFDQSKNGYAGYIDGGASQEEFYKFIKPILEKMDGTEELLVKLNREDLLRKQRTFDNGSIPHQIHLGELHAILRRQEDFYPFLKDNREKIEKILTFRIPYYVGPLARGNSRFAWMTRKSEETITPWNFEEVVDKGASAQSFIERMTNFDKNLPNEKVLPKHSLLYEYFTVYNELTKVKYVTEGMRKPAFLSGEQKKAIVDLLFKTNRKVTVKQLKEDYFKKIECFDSVEISGVEDRFNASLGTYHDLLKIIKDKDFLDNEENEDILEDIVLTLTLFEDREMIEERLKTYAHLFDDKVMKQLKRRRYTGWGRLSRKLINGIRDKQSGKTILDFLKSDGFANRNFMQLIHDDSLTFKEDIQKAQVSGQGDSLHEHIANLAGSPAIKKGILQTVKVVDELVKVMGRHKPENIVIEMARENQTTQKGQKNSRERMKRIEEGIKELGSQILKEHPVENTQLQNEKLYLYYLQNGRDMYVDQELDINRLSDYDVDHIVPQSFLKDDSIDNKVLTRSDKARGKSDNVPSEEVVKKMKNYWRQLLNAKLITQRKFDNLTKAERGGLSELDKAGFIKRQLVETRQITKHVAQILDSRMNTKYDENDKLIREVKVITLKSKLVSDFRKDFQFYKVREINNYHHAHDAYLNAVVGTALIKKYPKLESEFVYGDYKVYDVRKMIAKSEQEIGKATAKYFFYSNIMNFFKTEITLANGEIRKRPLIETNGETGEIVWDKGRDFATVRKVLSMPQVNIVKKTEVQTGGFSKESILPKRNSDKLIARKKDWDPKKYGGFDSPTVAYSVLVVAKVEKGKSKKLKSVKELLGITIMERSSFEKNPIDFLEAKGYKEVKKDLIIKLPKYSLFELENGRKRMLASAGELQKGNELALPSKYVNFLYLASHYEKLKGSPEDNEQKQLFVEQHKHYLDEIIEQISEFSKRVILADANLDKVLSAYNKHRDKPIREQAENIIHLFTLTNLGAPAAFKYFDTTIDRKRYTSTKEVLDATLIHQSITGLYETRIDLSQLGGDGGPAPAPAPAPGGTLNLEDEYRLYETSAEPEVSPGSTWLSDFPQAWAETGGMGLAVRQAPLIIPLKATSTPVSIKQYPMSQEAKLGIKPHIQRLLDQGILVPCQSPWNTPLLPVKKPGTNDYRPVQDLREVNKRVEDIHPTVPNPYNLLSGLPPSHRWYTVLDLKDAFFCLRLHPTSQPLFAFEWRDPGMGISGQLTWTRLPQGFKNSPTLFNEALHRDLADFRIQHPDLILLQYVDDILLAATSELDCQQGTRALLLTLGNLGYRASAKKAQLCQKQVKYLGYLLKEGQRWLTEARKETVMGQPTPKTPRQLREFLGTAGFCRLWIPGFAEMAAPLYPLTKPGTLFNWGPDQQKAYQEIKQALLTAPALGLPDLTKPFELFVDEKQGYAKGVLTQKLGPWRRPVAYLSKKLDPVAAGWPPCLRMVAAIAVLRKDAGKLTMGQPLVILAPHAVEALVKQPPDRWLSNARMTHYQAMLLDTDRVQFGPVVALNPATLLPLPEEGAPHDCLEILAETHGTRPDLTDQPIPDADHTWYTDGSSFLQEGQRKAGAAVTTETEVIWARALPAGTSAQRAELIALTQALKMAEGKRLNVYTDSRYAFATAHIHGEIYRRRGWLTSEGREIKNKSEILALLKALFLPKRLSIIHCLGHQKGDSAEARGNRLADQAAREAAIKTPPDTSTLLAGKRTADGSEFEKRTADGSEFESPKKKAKVE

SEQ ID NO: 1853 - protein, 2091 aa, synthetic construct
MPAAKRVKLDGGDKKYSIGLDIGTNSVGWAVITDEYKVPSKKFKVLGNTDRHSIKKNLIGALLFDSGETAEATRLKRTARRRYTRRKNRICYLQEIFSNEMAKVDDSFFHRLEESFLVEEDKKHERHPIFGNIVDEVAYHEKYPTIYHLRKKLVDSTDKADLRLIYLALAHMIKFRGHFLIEGDLNPDNSDVDKLFIQLVQTYNQLFEENPINASGVDAKAILSARLSKSRRLENLIAQLPGEKKNGLFGNLIALSLGLTPNFKSNFDLAEDAKLQLSKDTYDDDLDNLLAQIGDQYADLFLAAKNLSDAILLSDILRVNTEITKAPLSASMIKRYDEHHQDLTLLKALVRQQLPEKYKEIFFDQSKNGYAGYIDGGASQEEFYKFIKPILEKMDGTEELLVKLNREDLLRKQRTFDNGSIPHQIHLGELHAILRRQEDFYPFLKDNREKIEKILTFRIPYYVGPLARGNSRFAWMTRKSEETITPWNFEEVVDKGASAQSFIERMTNFDKNLPNEKVLPKHSLLYEYFTVYNELTKVKYVTEGMRKPAFLSGEQKKAIVDLLFKTNRKVTVKQLKEDYFKKIECFDSVEISGVEDRFNASLGTYHDLLKIIKDKDFLDNEENEDILEDIVLTLTLFEDREMIEERLKTYAHLFDDKVMKQLKRRRYTGWGRLSRKLINGIRDKQSGKTILDFLKSDGFANRNFMQLIHDDSLTFKEDIQKAQVSGQGDSLHEHIANLAGSPAIKKGILQTVKVVDELVKVMGRHKPENIVIEMARENQTTQKGQKNSRERMKRIEEGIKELGSQILKEHPVENTQLQNEKLYLYYLQNGRDMYVDQELDINRLSDYDVDHIVPQSFLKDDSIDNKVLTRSDKARGKSDNVPSEEVVKKMKNYWRQLLNAKLITQRKFDNLTKAERGGLSELDKAGFIKRQLVETRQITKHVAQILDSRMNTKYDENDKLIREVKVITLKSKLVSDFRKDFQFYKVREINNYHHAHDAYLNAVVGTALIKKYPKLESEFVYGDYKVYDVRKMIAKSEQEIGKATAKYFFYSNIMNFFKTEITLANGEIRKRPLIETNGETGEIVWDKGRDFATVRKVLSMPQVNIVKKTEVQTGGFSKESILPKRNSDKLIARKKDWDPKKYGGFDSPTVAYSVLVVAKVEKGKSKKLKSVKELLGITIMERSSFEKNPIDFLEAKGYKEVKKDLIIKLPKYSLFELENGRKRMLASAGELQKGNELALPSKYVNFLYLASHYEKLKGSPEDNEQKQLFVEQHKHYLDEIIEQISEFSKRVILADANLDKVLSAYNKHRDKPIREQAENIIHLFTLTNLGAPAAFKYFDTTIDRKRYTSTKEVLDATLIHQSITGLYETRIDLSQLGGDGGGGGGSSGGTLNLEDEYRLYETSAEPEVSPGSTWLSDFPQAWAETGGMGLAVRQAPLIIPLKATSTPVSIKQYPMSQEAKLGIKPHIQRLLDQGILVPCQSPWNTPLLPVKKPGTNDYRPVQDLREVNKRVEDIHPTVPNPYNLLSGLPPSHRWYTVLDLKDAFFCLRLHPTSQPLFAFEWRDPGMGISGQLTWTRLPQGFKNSPTLFNEALHRDLADFRIQHPDLILLQYVDDILLAATSELDCQQGTRALLLTLGNLGYRASAKKAQLCQKQVKYLGYLLKEGQRWLTEARKETVMGQPTPKTPRQLREFLGTAGFCRLWIPGFAEMAAPLYPLTKPGTLFNWGPDQQKAYQEIKQALLTAPALGLPDLTKPFELFVDEKQGYAKGVLTQKLGPWRRPVAYLSKKLDPVAAGWPPCLRMVAAIAVLRKDAGKLTMGQPLVILAPHAVEALVKQPPDRWLSNARMTHYQAMLLDTDRVQFGPVVALNPATLLPLPEEGAPHDCLEILAETHGTRPDLTDQPIPDADHTWYTDGSSFLQEGQRKAGAAVTTETEVIWARALPAGTSAQRAELIALTQALKMAEGKRLNVYTDSRYAFATAHIHGEIYRRRGWLTSEGREIKNKSEILALLKALFLPKRLSIIHCLGHQKGDSAEARGNRLADQAAREAAIKTPPDTSTLLAGKRTADGSEFEKRTADGSEFESPKKKAKVE

SEQ ID NO: 1854 - protein, 2091 aa, synthetic construct
MPAAKRVKLDGGDKKYSIGLDIGTNSVGWAVITDEYKVPSKKFKVLGNTDRHSIKKNLIGALLFDSGETAEATRLKRTARRRYTRRKNRICYLQEIFSNEMAKVDDSFFHRLEESFLVEEDKKHERHPIFGNIVDEVAYHEKYPTIYHLRKKLVDSTDKADLRLIYLALAHMIKFRGHFLIEGDLNPDNSDVDKLFIQLVQTYNQLFEENPINASGVDAKAILSARLSKSRRLENLIAQLPGEKKNGLFGNLIALSLGLTPNFKSNFDLAEDAKLQLSKDTYDDDLDNLLAQIGDQYADLFLAAKNLSDAILLSDILRVNTEITKAPLSASMIKRYDEHHQDLTLLKALVRQQLPEKYKEIFFDQSKNGYAGYIDGGASQEEFYKFIKPILEKMDGTEELLVKLNREDLLRKQRTFDNGSIPHQIHLGELHAILRRQEDFYPFLKDNREKIEKILTFRIPYYVGPLARGNSRFAWMTRKSEETITPWNFEEVVDKGASAQSFIERMTNFDKNLPNEKVLPKHSLLYEYFTVYNELTKVKYVTEGMRKPAFLSGEQKKAIVDLLFKTNRKVTVKQLKEDYFKKIECFDSVEISGVEDRFNASLGTYHDLLKIIKDKDFLDNEENEDILEDIVLTLTLFEDREMIEERLKTYAHLFDDKVMKQLKRRRYTGWGRLSRKLINGIRDKQSGKTILDFLKSDGFANRNFMQLIHDDSLTFKEDIQKAQVSGQGDSLHEHIANLAGSPAIKKGILQTVKVVDELVKVMGRHKPENIVIEMARENQTTQKGQKNSRERMKRIEEGIKELGSQILKEHPVENTQLQNEKLYLYYLQNGRDMYVDQELDINRLSDYDVDHIVPQSFLKDDSIDNKVLTRSDKARGKSDNVPSEEVVKKMKNYWRQLLNAKLITQRKFDNLTKAERGGLSELDKAGFIKRQLVETRQITKHVAQILDSRMNTKYDENDKLIREVKVITLKSKLVSDFRKDFQFYKVREINNYHHAHDAYLNAVVGTALIKKYPKLESEFVYGDYKVYDVRKMIAKSEQEIGKATAKYFFYSNIMNFFKTEITLANGEIRKRPLIETNGETGEIVWDKGRDFATVRKVLSMPQVNIVKKTEVQTGGFSKESILPKRNSDKLIARKKDWDPKKYGGFDSPTVAYSVLVVAKVEKGKSKKLKSVKELLGITIMERSSFEKNPIDFLEAKGYKEVKKDLIIKLPKYSLFELENGRKRMLASAGELQKGNELALPSKYVNFLYLASHYEKLKGSPEDNEQKQLFVEQHKHYLDEIIEQISEFSKRVILADANLDKVLSAYNKHRDKPIREQAENIIHLFTLTNLGAPAAFKYFDTTIDRKRYTSTKEVLDATLIHQSITGLYETRIDLSQLGGDGGGGGPAPGGTLNLEDEYRLYETSAEPEVSPGSTWLSDFPQAWAETGGMGLAVRQAPLIIPLKATSTPVSIKQYPMSQEAKLGIKPHIQRLLDQGILVPCQSPWNTPLLPVKKPGTNDYRPVQDLREVNKRVEDIHPTVPNPYNLLSGLPPSHRWYTVLDLKDAFFCLRLHPTSQPLFAFEWRDPGMGISGQLTWTRLPQGFKNSPTLFNEALHRDLADFRIQHPDLILLQYVDDILLAATSELDCQQGTRALLLTLGNLGYRASAKKAQLCQKQVKYLGYLLKEGQRWLTEARKETVMGQPTPKTPRQLREFLGTAGFCRLWIPGFAEMAAPLYPLTKPGTLFNWGPDQQKAYQEIKQALLTAPALGLPDLTKPFELFVDEKQGYAKGVLTQKLGPWRRPVAYLSKKLDPVAAGWPPCLRMVAAIAVLRKDAGKLTMGQPLVILAPHAVEALVKQPPDRWLSNARMTHYQAMLLDTDRVQFGPVVALNPATLLPLPEEGAPHDCLEILAETHGTRPDLTDQPIPDADHTWYTDGSSFLQEGQRKAGAAVTTETEVIWARALPAGTSAQRAELIALTQALKMAEGKRLNVYTDSRYAFATAHIHGEIYRRRGWLTSEGREIKNKSEILALLKALFLPKRLSIIHCLGHQKGDSAEARGNRLADQAAREAAIKTPPDTSTLLAGKRTADGSEFEKRTADGSEFESPKKKAKVE

SEQ ID NO: 1855 - protein, 2090 aa, synthetic construct
MPAAKRVKLDGGDKKYSIGLDIGTNSVGWAVITDEYKVPSKKFKVLGNTDRHSIKKNLIGALLFDSGETAEATRLKRTARRRYTRRKNRICYLQEIFSNEMAKVDDSFFHRLEESFLVEEDKKHERHPIFGNIVDEVAYHEKYPTIYHLRKKLVDSTDKADLRLIYLALAHMIKFRGHFLIEGDLNPDNSDVDKLFIQLVQTYNQLFEENPINASGVDAKAILSARLSKSRRLENLIAQLPGEKKNGLFGNLIALSLGLTPNFKSNFDLAEDAKLQLSKDTYDDDLDNLLAQIGDQYADLFLAAKNLSDAILLSDILRVNTEITKAPLSASMIKRYDEHHQDLTLLKALVRQQLPEKYKEIFFDQSKNGYAGYIDGGASQEEFYKFIKPILEKMDGTEELLVKLNREDLLRKQRTFDNGSIPHQIHLGELHAILRRQEDFYPFLKDNREKIEKILTFRIPYYVGPLARGNSRFAWMTRKSEETITPWNFEEVVDKGASAQSFIERMTNFDKNLPNEKVLPKHSLLYEYFTVYNELTKVKYVTEGMRKPAFLSGEQKKAIVDLLFKTNRKVTVKQLKEDYFKKIECFDSVEISGVEDRFNASLGTYHDLLKIIKDKDFLDNEENEDILEDIVLTLTLFEDREMIEERLKTYAHLFDDKVMKQLKRRRYTGWGRLSRKLINGIRDKQSGKTILDFLKSDGFANRNFMQLIHDDSLTFKEDIQKAQVSGQGDSLHEHIANLAGSPAIKKGILQTVKVVDELVKVMGRHKPENIVIEMARENQTTQKGQKNSRERMKRIEEGIKELGSQILKEHPVENTQLQNEKLYLYYLQNGRDMYVDQELDINRLSDYDVDHIVPQSFLKDDSIDNKVLTRSDKARGKSDNVPSEEVVKKMKNYWRQLLNAKLITQRKFDNLTKAERGGLSELDKAGFIKRQLVETRQITKHVAQILDSRMNTKYDENDKLIREVKVITLKSKLVSDFRKDFQFYKVREINNYHHAHDAYLNAVVGTALIKKYPKLESEFVYGDYKVYDVRKMIAKSEQEIGKATAKYFFYSNIMNFFKTEITLANGEIRKRPLIETNGETGEIVWDKGRDFATVRKVLSMPQVNIVKKTEVQTGGFSKESILPKRNSDKLIARKKDWDPKKYGGFDSPTVAYSVLVVAKVEKGKSKKLKSVKELLGITIMERSSFEKNPIDFLEAKGYKEVKKDLIIKLPKYSLFELENGRKRMLASAGELQKGNELALPSKYVNFLYLASHYEKLKGSPEDNEQKQLFVEQHKHYLDEIIEQISEFSKRVILADANLDKVLSAYNKHRDKPIREQAENIIHLFTLTNLGAPAAFKYFDTTIDRKRYTSTKEVLDATLIHQSITGLYETRIDLSQLGGDGGPAPAPGGTLNLEDEYRLYETSAEPEVSPGSTWLSDFPQAWAETGGMGLAVRQAPLIIPLKATSTPVSIKQYPMSQEAKLGIKPHIQRLLDQGILVPCQSPWNTPLLPVKKPGTNDYRPVQDLREVNKRVEDIHPTVPNPYNLLSGLPPSHRWYTVLDLKDAFFCLRLHPTSQPLFAFEWRDPGMGISGQLTWTRLPQGFKNSPTLFNEALHRDLADFRIQHPDLILLQYVDDILLAATSELDCQQGTRALLLTLGNLGYRASAKKAQLCQKQVKYLGYLLKEGQRWLTEARKETVMGQPTPKTPRQLREFLGTAGFCRLWIPGFAEMAAPLYPLTKPGTLFNWGPDQQKAYQEIKQALLTAPALGLPDLTKPFELFVDEKQGYAKGVLTQKLGPWRRPVAYLSKKLDPVAAGWPPCLRMVAAIAVLRKDAGKLTMGQPLVILAPHAVEALVKQPPDRWLSNARMTHYQAMLLDTDRVQFGPVVALNPATLLPLPEEGAPHDCLEILAETHGTRPDLTDQPIPDADHTWYTDGSSFLQEGQRKAGAAVTTETEVIWARALPAGTSAQRAELIALTQALKMAEGKRLNVYTDSRYAFATAHIHGEIYRRRGWLTSEGREIKNKSEILALLKALFLPKRLSIIHCLGHQKGDSAEARGNRLADQAAREAAIKTPPDTSTLLAGKRTADGSEFEKRTADGSEFESPKKKAKVE

SEQ ID NO: 1856 - protein, 2096 aa, synthetic construct
MPAAKRVKLDGGDKKYSIGLDIGTNSVGWAVITDEYKVPSKKFKVLGNTDRHSIKKNLIGALLFDSGETAEATRLKRTARRRYTRRKNRICYLQEIFSNEMAKVDDSFFHRLEESFLVEEDKKHERHPIFGNIVDEVAYHEKYPTIYHLRKKLVDSTDKADLRLIYLALAHMIKFRGHFLIEGDLNPDNSDVDKLFIQLVQTYNQLFEENPINASGVDAKAILSARLSKSRRLENLIAQLPGEKKNGLFGNLIALSLGLTPNFKSNFDLAEDAKLQLSKDTYDDDLDNLLAQIGDQYADLFLAAKNLSDAILLSDILRVNTEITKAPLSASMIKRYDEHHQDLTLLKALVRQQLPEKYKEIFFDQSKNGYAGYIDGGASQEEFYKFIKPILEKMDGTEELLVKLNREDLLRKQRTFDNGSIPHQIHLGELHAILRRQEDFYPFLKDNREKIEKILTFRIPYYVGPLARGNSRFAWMTRKSEETITPWNFEEVVDKGASAQSFIERMTNFDKNLPNEKVLPKHSLLYEYFTVYNELTKVKYVTEGMRKPAFLSGEQKKAIVDLLFKTNRKVTVKQLKEDYFKKIECFDSVEISGVEDRFNASLGTYHDLLKIIKDKDFLDNEENEDILEDIVLTLTLFEDREMIEERLKTYAHLFDDKVMKQLKRRRYTGWGRLSRKLINGIRDKQSGKTILDFLKSDGFANRNFMQLIHDDSLTFKEDIQKAQVSGQGDSLHEHIANLAGSPAIKKGILQTVKVVDELVKVMGRHKPENIVIEMARENQTTQKGQKNSRERMKRIEEGIKELGSQILKEHPVENTQLQNEKLYLYYLQNGRDMYVDQELDINRLSDYDVDHIVPQSFLKDDSIDNKVLTRSDKARGKSDNVPSEEVVKKMKNYWRQLLNAKLITQRKFDNLTKAERGGLSELDKAGFIKRQLVETRQITKHVAQILDSRMNTKYDENDKLIREVKVITLKSKLVSDFRKDFQFYKVREINNYHHAHDAYLNAVVGTALIKKYPKLESEFVYGDYKVYDVRKMIAKSEQEIGKATAKYFFYSNIMNFFKTEITLANGEIRKRPLIETNGETGEIVWDKGRDFATVRKVLSMPQVNIVKKTEVQTGGFSKESILPKRNSDKLIARKKDWDPKKYGGFDSPTVAYSVLVVAKVEKGKSKKLKSVKELLGITIMERSSFEKNPIDFLEAKGYKEVKKDLIIKLPKYSLFELENGRKRMLASAGELQKGNELALPSKYVNFLYLASHYEKLKGSPEDNEQKQLFVEQHKHYLDEIIEQISEFSKRVILADANLDKVLSAYNKHRDKPIREQAENIIHLFTLTNLGAPAAFKYFDTTIDRKRYTSTKEVLDATLIHQSITGLYETRIDLSQLGGDGGPAPGGGEAAAKGGTLNLEDEYRLYETSAEPEVSPGSTWLSDFPQAWAETGGMGLAVRQAPLIIPLKATSTPVSIKQYPMSQEAKLGIKPHIQRLLDQGILVPCQSPWNTPLLPVKKPGTNDYRPVQDLREVNKRVEDIHPTVPNPYNLLSGLPPSHRWYTVLDLKDAFFCLRLHPTSQPLFAFEWRDPGMGISGQLTWTRLPQGFKNSPTLFNEALHRDLADFRIQHPDLILLQYVDDILLAATSELDCQQGTRALLLTLGNLGYRASAKKAQLCQKQVKYLGYLLKEGQRWLTEARKETVMGQPTPKTPRQLREFLGKAGFCRLFIPGFAEMAAPLYPLTKPGTLFNWGPDQQKAYQEIKQALLTAPALGLPDLTKPFELFVDEKQGYAKGVLTQKLGPWRRPVAYLSKKLDPVAAGWPPCLRMVAAIAVLRKDAGKLTMGQPLVILAPHAVEALVKQPPDRWLSNARMTHYQAMLLDTDRVQFGPVVALNPATLLPLPEEGAPHDCLEILAETHGTRPDLTDQPIPDADHTWYTDGSSFLQEGQRKAGAAVTTETEVIWARALPAGTSAQRAELIALTQALKMAEGKRLNVYTDSRYAFATAHIHGEIYRRRGWLTSEGREIKNKSEILALLKALFLPKRLSIIHCLGHQKGDSAEARGNRLADQAAREAAIKTPPDTSTLLAGKRTADGSEFEKRTADGSEFESPKKKAKVE

SEQ ID NO: 1857 - protein, 2094 aa, synthetic construct
MPAAKRVKLDGGDKKYSIGLDIGTNSVGWAVITDEYKVPSKKFKVLGNTDRHSIKKNLIGALLFDSGETAEATRLKRTARRRYTRRKNRICYLQEIFSNEMAKVDDSFFHRLEESFLVEEDKKHERHPIFGNIVDEVAYHEKYPTIYHLRKKLVDSTDKADLRLIYLALAHMIKFRGHFLIEGDLNPDNSDVDKLFIQLVQTYNQLFEENPINASGVDAKAILSARLSKSRRLENLIAQLPGEKKNGLFGNLIALSLGLTPNFKSNFDLAEDAKLQLSKDTYDDDLDNLLAQIGDQYADLFLAAKNLSDAILLSDILRVNTEITKAPLSASMIKRYDEHHQDLTLLKALVRQQLPEKYKEIFFDQSKNGYAGYIDGGASQEEFYKFIKPILEKMDGTEELLVKLNREDLLRKQRTFDNGSIPHQIHLGELHAILRRQEDFYPFLKDNREKIEKILTFRIPYYVGPLARGNSRFAWMTRKSEETITPWNFEEVVDKGASAQSFIERMTNFDKNLPNEKVLPKHSLLYEYFTVYNELTKVKYVTEGMRKPAFLSGEQKKAIVDLLFKTNRKVTVKQLKEDYFKKIECFDSVEISGVEDRFNASLGTYHDLLKIIKDKDFLDNEENEDILEDIVLTLTLFEDREMIEERLKTYAHLFDDKVMKQLKRRRYTGWGRLSRKLINGIRDKQSGKTILDFLKSDGFANRNFMQLIHDDSLTFKEDIQKAQVSGQGDSLHEHIANLAGSPAIKKGILQTVKVVDELVKVMGRHKPENIVIEMARENQTTQKGQKNSRERMKRIEEGIKELGSQILKEHPVENTQLQNEKLYLYYLQNGRDMYVDQELDINRLSDYDVDHIVPQSFLKDDSIDNKVLTRSDKARGKSDNVPSEEVVKKMKNYWRQLLNAKLITQRKFDNLTKAERGGLSELDKAGFIKRQLVETRQITKHVAQILDSRMNTKYDENDKLIREVKVITLKSKLVSDFRKDFQFYKVREINNYHHAHDAYLNAVVGTALIKKYPKLESEFVYGDYKVYDVRKMIAKSEQEIGKATAKYFFYSNIMNFFKTEITLANGEIRKRPLIETNGETGEIVWDKGRDFATVRKVLSMPQVNIVKKTEVQTGGFSKESILPKRNSDKLIARKKDWDPKKYGGFDSPTVAYSVLVVAKVEKGKSKKLKSVKELLGITIMERSSFEKNPIDFLEAKGYKEVKKDLIIKLPKYSLFELENGRKRMLASAGELQKGNELALPSKYVNFLYLASHYEKLKGSPEDNEQKQLFVEQHKHYLDEIIEQISEFSKRVILADANLDKVLSAYNKHRDKPIREQAENIIHLFTLTNLGAPAAFKYFDTTIDRKRYTSTKEVLDATLIHQSITGLYETRIDLSQLGGDGGGGGPAPGSSGGTLNLEDEYRLYETSAEPEVSPGSTWLSDFPQAWAETGGMGLAVRQAPLIIPLKATSTPVSIKQYPMSQEAKLGIKPHIQRLLDQGILVPCQSPWNTPLLPVKKPGTNDYRPVQDLREVNKRVEDIHPTVPNPYNLLSGLPPSHRWYTVLDLKDAFFCLRLHPTSQPLFAFEWRDPGMGISGQLTWTRLPQGFKNSPTLFNEALHRDLADFRIQHPDLILLQYVDDILLAATSELDCQQGTRALLLTLGNLGYRASAKKAQLCQKQVKYLGYLLKEGQRWLTEARKETVMGQPTPKTPRQLREFLGKAGFCRLFIPGFAEMAAPLYPLTKPGTLFNWGPDQQKAYQEIKQALLTAPALGLPDLTKPFELFVDEKQGYAKGVLTQKLGPWRRPVAYLSKKLDPVAAGWPPCLRMVAAIAVLRKDAGKLTMGQPLVILAPHAVEALVKQPPDRWLSNARMTHYQAMLLDTDRVQFGPVVALNPATLLPLPEEGAPHDCLEILAETHGTRPDLTDQPIPDADHTWYTDGSSFLQEGQRKAGAAVTTETEVIWARALPAGTSAQRAELIALTQALKMAEGKRLNVYTDSRYAFATAHIHGEIYRRRGWLTSEGREIKNKSEILALLKALFLPKRLSIIHCLGHQKGDSAEARGNRLADQAAREAAIKTPPDTSTLLAGKRTADGSEFEKRTADGSEFESPKKKAKVE

SEQ ID NO: 1858 - protein, 2093 aa, synthetic construct
MPAAKRVKLDGGDKKYSIGLDIGTNSVGWAVITDEYKVPSKKFKVLGNTDRHSIKKNLIGALLFDSGETAEATRLKRTARRRYTRRKNRICYLQEIFSNEMAKVDDSFFHRLEESFLVEEDKKHERHPIFGNIVDEVAYHEKYPTIYHLRKKLVDSTDKADLRLIYLALAHMIKFRGHFLIEGDLNPDNSDVDKLFIQLVQTYNQLFEENPINASGVDAKAILSARLSKSRRLENLIAQLPGEKKNGLFGNLIALSLGLTPNFKSNFDLAEDAKLQLSKDTYDDDLDNLLAQIGDQYADLFLAAKNLSDAILLSDILRVNTEITKAPLSASMIKRYDEHHQDLTLLKALVRQQLPEKYKEIFFDQSKNGYAGYIDGGASQEEFYKFIKPILEKMDGTEELLVKLNREDLLRKQRTFDNGSIPHQIHLGELHAILRRQEDFYPFLKDNREKIEKILTFRIPYYVGPLARGNSRFAWMTRKSEETITPWNFEEVVDKGASAQSFIERMTNFDKNLPNEKVLPKHSLLYEYFTVYNELTKVKYVTEGMRKPAFLSGEQKKAIVDLLFKTNRKVTVKQLKEDYFKKIECFDSVEISGVEDRFNASLGTYHDLLKIIKDKDFLDNEENEDILEDIVLTLTLFEDREMIEERLKTYAHLFDDKVMKQLKRRRYTGWGRLSRKLINGIRDKQSGKTILDFLKSDGFANRNFMQLIHDDSLTFKEDIQKAQVSGQGDSLHEHIANLAGSPAIKKGILQTVKVVDELVKVMGRHKPENIVIEMARENQTTQKGQKNSRERMKRIEEGIKELGSQILKEHPVENTQLQNEKLYLYYLQNGRDMYVDQELDINRLSDYDVDHIVPQSFLKDDSIDNKVLTRSDKARGKSDNVPSEEVVKKMKNYWRQLLNAKLITQRKFDNLTKAERGGLSELDKAGFIKRQLVETRQITKHVAQILDSRMNTKYDENDKLIREVKVITLKSKLVSDFRKDFQFYKVREINNYHHAHDAYLNAVVGTALIKKYPKLESEFVYGDYKVYDVRKMIAKSEQEIGKATAKYFFYSNIMNFFKTEITLANGEIRKRPLIETNGETGEIVWDKGRDFATVRKVLSMPQVNIVKKTEVQTGGFSKESILPKRNSDKLIARKKDWDPKKYGGFDSPTVAYSVLVVAKVEKGKSKKLKSVKELLGITIMERSSFEKNPIDFLEAKGYKEVKKDLIIKLPKYSLFELENGRKRMLASAGELQKGNELALPSKYVNFLYLASHYEKLKGSPEDNEQKQLFVEQHKHYLDEIIEQISEFSKRVILADANLDKVLSAYNKHRDKPIREQAENIIHLFTLTNLGAPAAFKYFDTTIDRKRYTSTKEVLDATLIHQSITGLYETRIDLSQLGGDGGPAPEAAAKGGTLNLEDEYRLYETSAEPEVSPGSTWLSDFPQAWAETGGMGLAVRQAPLIIPLKATSTPVSIKQYPMSQEAKLGIKPHIQRLLDQGILVPCQSPWNTPLLPVKKPGTNDYRPVQDLREVNKRVEDIHPTVPNPYNLLSGLPPSHRWYTVLDLKDAFFCLRLHPTSQPLFAFEWRDPGMGISGQLTWTRLPQGFKNSPTLFNEALHRDLADFRIQHPDLILLQYVDDILLAATSELDCQQGTRALLLTLGNLGYRASAKKAQLCQKQVKYLGYLLKEGQRWLTEARKETVMGQPTPKTPRQLREFLGKAGFCRLFIPGFAEMAAPLYPLTKPGTLFNWGPDQQKAYQEIKQALLTAPALGLPDLTKPFELFVDEKQGYAKGVLTQKLGPWRRPVAYLSKKLDPVAAGWPPCLRMVAAIAVLRKDAGKLTMGQPLVILAPHAVEALVKQPPDRWLSNARMTHYQAMLLDTDRVQFGPVVALNPATLLPLPEEGAPHDCLEILAETHGTRPDLTDQPIPDADHTWYTDGSSFLQEGQRKAGAAVTTETEVIWARALPAGTSAQRAELIALTQALKMAEGKRLNVYTDSRYAFATAHIHGEIYRRRGWLTSEGREIKNKSEILALLKALFLPKRLSIIHCLGHQKGDSAEARGNRLADQAAREAAIKTPPDTSTLLAGKRTADGSEFEKRTADGSEFESPKKKAKVE

SEQ ID NO: 1859 - protein, 2096 aa, synthetic construct
MPAAKRVKLDGGDKKYSIGLDIGTNSVGWAVITDEYKVPSKKFKVLGNTDRHSIKKNLIGALLFDSGETAEATRLKRTARRRYTRRKNRICYLQEIFSNEMAKVDDSFFHRLEESFLVEEDKKHERHPIFGNIVDEVAYHEKYPTIYHLRKKLVDSTDKADLRLIYLALAHMIKFRGHFLIEGDLNPDNSDVDKLFIQLVQTYNQLFEENPINASGVDAKAILSARLSKSRRLENLIAQLPGEKKNGLFGNLIALSLGLTPNFKSNFDLAEDAKLQLSKDTYDDDLDNLLAQIGDQYADLFLAAKNLSDAILLSDILRVNTEITKAPLSASMIKRYDEHHQDLTLLKALVRQQLPEKYKEIFFDQSKNGYAGYIDGGASQEEFYKFIKPILEKMDGTEELLVKLNREDLLRKQRTFDNGSIPHQIHLGELHAILRRQEDFYPFLKDNREKIEKILTFRIPYYVGPLARGNSRFAWMTRKSEETITPWNFEEVVDKGASAQSFIERMTNFDKNLPNEKVLPKHSLLYEYFTVYNELTKVKYVTEGMRKPAFLSGEQKKAIVDLLFKTNRKVTVKQLKEDYFKKIECFDSVEISGVEDRFNASLGTYHDLLKIIKDKDFLDNEENEDILEDIVLTLTLFEDREMIEERLKTYAHLFDDKVMKQLKRRRYTGWGRLSRKLINGIRDKQSGKTILDFLKSDGFANRNFMQLIHDDSLTFKEDIQKAQVSGQGDSLHEHIANLAGSPAIKKGILQTVKVVDELVKVMGRHKPENIVIEMARENQTTQKGQKNSRERMKRIEEGIKELGSQILKEHPVENTQLQNEKLYLYYLQNGRDMYVDQELDINRLSDYDVDHIVPQSFLKDDSIDNKVLTRSDKARGKSDNVPSEEVVKKMKNYWRQLLNAKLITQRKFDNLTKAERGGLSELDKAGFIKRQLVETRQITKHVAQILDSRMNTKYDENDKLIREVKVITLKSKLVSDFRKDFQFYKVREINNYHHAHDAYLNAVVGTALIKKYPKLESEFVYGDYKVYDVRKMIAKSEQEIGKATAKYFFYSNIMNFFKTEITLANGEIRKRPLIETNGETGEIVWDKGRDFATVRKVLSMPQVNIVKKTEVQTGGFSKESILPKRNSDKLIARKKDWDPKKYGGFDSPTVAYSVLVVAKVEKGKSKKLKSVKELLGITIMERSSFEKNPIDFLEAKGYKEVKKDLIIKLPKYSLFELENGRKRMLASAGELQKGNELALPSKYVNFLYLASHYEKLKGSPEDNEQKQLFVEQHKHYLDEIIEQISEFSKRVILADANLDKVLSAYNKHRDKPIREQAENIIHLFTLTNLGAPAAFKYFDTTIDRKRYTSTKEVLDATLIHQSITGLYETRIDLSQLGGDGGGGSEAAAKGSSGGTLNLEDEYRLYETSAEPEVSPGSTWLSDFPQAWAETGGMGLAVRQAPLIIPLKATSTPVSIKQYPMSQEAKLGIKPHIQRLLDQGILVPCQSPWNTPLLPVKKPGTNDYRPVQDLREVNKRVEDIHPTVPNPYNLLSGLPPSHRWYTVLDLKDAFFCLRLHPTSQPLFAFEWRDPGMGISGQLTWTRLPQGFKNSPTLFNEALHRDLADFRIQHPDLILLQYVDDILLAATSELDCQQGTRALLLTLGNLGYRASAKKAQLCQKQVKYLGYLLKEGQRWLTEARKETVMGQPTPKTPRQLREFLGKAGFCRLFIPGFAEMAAPLYPLTKPGTLFNWGPDQQKAYQEIKQALLTAPALGLPDLTKPFELFVDEKQGYAKGVLTQKLGPWRRPVAYLSKKLDPVAAGWPPCLRMVAAIAVLRKDAGKLTMGQPLVILAPHAVEALVKQPPDRWLSNARMTHYQAMLLDTDRVQFGPVVALNPATLLPLPEEGAPHDCLEILAETHGTRPDLTDQPIPDADHTWYTDGSSFLQEGQRKAGAAVTTETEVIWARALPAGTSAQRAELIALTQALKMAEGKRLNVYTDSRYAFATAHIHGEIYRRRGWLTSEGREIKNKSEILALLKALFLPKRLSIIHCLGHQKGDSAEARGNRLADQAAREAAIKTPPDTSTLLAGKRTADGSEFEKRTADGSEFESPKKKAKVE

SEQ ID NO: 1860 - protein, 2100 aa, synthetic construct
MPAAKRVKLDGGDKKYSIGLDIGTNSVGWAVITDEYKVPSKKFKVLGNTDRHSIKKNLIGALLFDSGETAEATRLKRTARRRYTRRKNRICYLQEIFSNEMAKVDDSFFHRLEESFLVEEDKKHERHPIFGNIVDEVAYHEKYPTIYHLRKKLVDSTDKADLRLIYLALAHMIKFRGHFLIEGDLNPDNSDVDKLFIQLVQTYNQLFEENPINASGVDAKAILSARLSKSRRLENLIAQLPGEKKNGLFGNLIALSLGLTPNFKSNFDLAEDAKLQLSKDTYDDDLDNLLAQIGDQYADLFLAAKNLSDAILLSDILRVNTEITKAPLSASMIKRYDEHHQDLTLLKALVRQQLPEKYKEIFFDQSKNGYAGYIDGGASQEEFYKFIKPILEKMDGTEELLVKLNREDLLRKQRTFDNGSIPHQIHLGELHAILRRQEDFYPFLKDNREKIEKILTFRIPYYVGPLARGNSRFAWMTRKSEETITPWNFEEVVDKGASAQSFIERMTNFDKNLPNEKVLPKHSLLYEYFTVYNELTKVKYVTEGMRKPAFLSGEQKKAIVDLLFKTNRKVTVKQLKEDYFKKIECFDSVEISGVEDRFNASLGTYHDLLKIIKDKDFLDNEENEDILEDIVLTLTLFEDREMIEERLKTYAHLFDDKVMKQLKRRRYTGWGRLSRKLINGIRDKQSGKTILDFLKSDGFANRNFMQLIHDDSLTFKEDIQKAQVSGQGDSLHEHIANLAGSPAIKKGILQTVKVVDELVKVMGRHKPENIVIEMARENQTTQKGQKNSRERMKRIEEGIKELGSQILKEHPVENTQLQNEKLYLYYLQNGRDMYVDQELDINRLSDYDVDHIVPQSFLKDDSIDNKVLTRSDKARGKSDNVPSEEVVKKMKNYWRQLLNAKLITQRKFDNLTKAERGGLSELDKAGFIKRQLVETRQITKHVAQILDSRMNTKYDENDKLIREVKVITLKSKLVSDFRKDFQFYKVREINNYHHAHDAYLNAVVGTALIKKYPKLESEFVYGDYKVYDVRKMIAKSEQEIGKATAKYFFYSNIMNFFKTEITLANGEIRKRPLIETNGETGEIVWDKGRDFATVRKVLSMPQVNIVKKTEVQTGGFSKESILPKRNSDKLIARKKDWDPKKYGGFDSPTVAYSVLVVAKVEKGKSKKLKSVKELLGITIMERSSFEKNPIDFLEAKGYKEVKKDLIIKLPKYSLFELENGRKRMLASAGELQKGNELALPSKYVNFLYLASHYEKLKGSPEDNEQKQLFVEQHKHYLDEIIEQISEFSKRVILADANLDKVLSAYNKHRDKPIREQAENIIHLFTLTNLGAPAAFKYFDTTIDRKRYTSTKEVLDATLIHQSITGLYETRIDLSQLGGDGGEAAAKGGGGSEAAAKGGTLNLEDEYRLYETSAEPEVSPGSTWLSDFPQAWAETGGMGLAVRQAPLIIPLKATSTPVSIKQYPMSQEAKLGIKPHIQRLLDQGILVPCQSPWNTPLLPVKKPGTNDYRPVQDLREVNKRVEDIHPTVPNPYNLLSGLPPSHRWYTVLDLKDAFFCLRLHPTSQPLFAFEWRDPGMGISGQLTWTRLPQGFKNSPTLFNEALHRDLADFRIQHPDLILLQYVDDILLAATSELDCQQGTRALLLTLGNLGYRASAKKAQLCQKQVKYLGYLLKEGQRWLTEARKETVMGQPTPKTPRQLREFLGKAGFCRLFIPGFAEMAAPLYPLTKPGTLFNWGPDQQKAYQEIKQALLTAPALGLPDLTKPFELFVDEKQGYAKGVLTQKLGPWRRPVAYLSKKLDPVAAGWPPCLRMVAAIAVLRKDAGKLTMGQPLVILAPHAVEALVKQPPDRWLSNARMTHYQAMLLDTDRVQFGPVVALNPATLLPLPEEGAPHDCLEILAETHGTRPDLTDQPIPDADHTWYTDGSSFLQEGQRKAGAAVTTETEVIWARALPAGTSAQRAELIALTQALKMAEGKRLNVYTDSRYAFATAHIHGEIYRRRGWLTSEGREIKNKSEILALLKALFLPKRLSIIHCLGHQKGDSAEARGNRLADQAAREAAIKTPPDTSTLLAGKRTADGSEFEKRTADGSEFESPKKKAKVE

SEQ ID NO: 1861 - protein, 2096 aa, synthetic construct
MPAAKRVKLDGGDKKYSIGLDIGTNSVGWAVITDEYKVPSKKFKVLGNTDRHSIKKNLIGALLFDSGETAEATRLKRTARRRYTRRKNRICYLQEIFSNEMAKVDDSFFHRLEESFLVEEDKKHERHPIFGNIVDEVAYHEKYPTIYHLRKKLVDSTDKADLRLIYLALAHMIKFRGHFLIEGDLNPDNSDVDKLFIQLVQTYNQLFEENPINASGVDAKAILSARLSKSRRLENLIAQLPGEKKNGLFGNLIALSLGLTPNFKSNFDLAEDAKLQLSKDTYDDDLDNLLAQIGDQYADLFLAAKNLSDAILLSDILRVNTEITKAPLSASMIKRYDEHHQDLTLLKALVRQQLPEKYKEIFFDQSKNGYAGYIDGGASQEEFYKFIKPILEKMDGTEELLVKLNREDLLRKQRTFDNGSIPHQIHLGELHAILRRQEDFYPFLKDNREKIEKILTFRIPYYVGPLARGNSRFAWMTRKSEETITPWNFEEVVDKGASAQSFIERMTNFDKNLPNEKVLPKHSLLYEYFTVYNELTKVKYVTEGMRKPAFLSGEQKKAIVDLLFKTNRKVTVKQLKEDYFKKIECFDSVEISGVEDRFNASLGTYHDLLKIIKDKDFLDNEENEDILEDIVLTLTLFEDREMIEERLKTYAHLFDDKVMKQLKRRRYTGWGRLSRKLINGIRDKQSGKTILDFLKSDGFANRNFMQLIHDDSLTFKEDIQKAQVSGQGDSLHEHIANLAGSPAIKKGILQTVKVVDELVKVMGRHKPENIVIEMARENQTTQKGQKNSRERMKRIEEGIKELGSQILKEHPVENTQLQNEKLYLYYLQNGRDMYVDQELDINRLSDYDVDHIVPQSFLKDDSIDNKVLTRSDKARGKSDNVPSEEVVKKMKNYWRQLLNAKLITQRKFDNLTKAERGGLSELDKAGFIKRQLVETRQITKHVAQILDSRMNTKYDENDKLIREVKVITLKSKLVSDFRKDFQFYKVREINNYHHAHDAYLNAVVGTALIKKYPKLESEFVYGDYKVYDVRKMIAKSEQEIGKATAKYFFYSNIMNFFKTEITLANGEIRKRPLIETNGETGEIVWDKGRDFATVRKVLSMPQVNIVKKTEVQTGGFSKESILPKRNSDKLIARKKDWDPKKYGGFDSPTVAYSVLVVAKVEKGKSKKLKSVKELLGITIMERSSFEKNPIDFLEAKGYKEVKKDLIIKLPKYSLFELENGRKRMLASAGELQKGNELALPSKYVNFLYLASHYEKLKGSPEDNEQKQLFVEQHKHYLDEIIEQISEFSKRVILADANLDKVLSAYNKHRDKPIREQAENIIHLFTLTNLGAPAAFKYFDTTIDRKRYTSTKEVLDATLIHQSITGLYETRIDLSQLGGDGGGSSEAAAKGGGGGTLNLEDEYRLYETSAEPEVSPGSTWLSDFPQAWAETGGMGLAVRQAPLIIPLKATSTPVSIKQYPMSQEAKLGIKPHIQRLLDQGILVPCQSPWNTPLLPVKKPGTNDYRPVQDLREVNKRVEDIHPTVPNPYNLLSGLPPSHRWYTVLDLKDAFFCLRLHPTSQPLFAFEWRDPGMGISGQLTWTRLPQGFKNSPTLFNEALHRDLADFRIQHPDLILLQYVDDILLAATSELDCQQGTRALLLTLGNLGYRASAKKAQLCQKQVKYLGYLLKEGQRWLTEARKETVMGQPTPKTPRQLREFLGKAGFCRLFIPGFAEMAAPLYPLTKPGTLFNWGPDQQKAYQEIKQALLTAPALGLPDLTKPFELFVDEKQGYAKGVLTQKLGPWRRPVAYLSKKLDPVAAGWPPCLRMVAAIAVLRKDAGKLTMGQPLVILAPHAVEALVKQPPDRWLSNARMTHYQAMLLDTDRVQFGPVVALNPATLLPLPEEGAPHDCLEILAETHGTRPDLTDQPIPDADHTWYTDGSSFLQEGQRKAGAAVTTETEVIWARALPAGTSAQRAELIALTQALKMAEGKRLNVYTDSRYAFATAHIHGEIYRRRGWLTSEGREIKNKSEILALLKALFLPKRLSIIHCLGHQKGDSAEARGNRLADQAAREAAIKTPPDTSTLLAGKRTADGSEFEKRTADGSEFESPKKKAKVE

SEQ ID NO: 1862 - protein, 2110 aa, synthetic construct
MPAAKRVKLDGGDKKYSIGLDIGTNSVGWAVITDEYKVPSKKFKVLGNTDRHSIKKNLIGALLFDSGETAEATRLKRTARRRYTRRKNRICYLQEIFSNEMAKVDDSFFHRLEESFLVEEDKKHERHPIFGNIVDEVAYHEKYPTIYHLRKKLVDSTDKADLRLIYLALAHMIKFRGHFLIEGDLNPDNSDVDKLFIQLVQTYNQLFEENPINASGVDAKAILSARLSKSRRLENLIAQLPGEKKNGLFGNLIALSLGLTPNFKSNFDLAEDAKLQLSKDTYDDDLDNLLAQIGDQYADLFLAAKNLSDAILLSDILRVNTEITKAPLSASMIKRYDEHHQDLTLLKALVRQQLPEKYKEIFFDQSKNGYAGYIDGGASQEEFYKFIKPILEKMDGTEELLVKLNREDLLRKQRTFDNGSIPHQIHLGELHAILRRQEDFYPFLKDNREKIEKILTFRIPYYVGPLARGNSRFAWMTRKSEETITPWNFEEVVDKGASAQSFIERMTNFDKNLPNEKVLPKHSLLYEYFTVYNELTKVKYVTEGMRKPAFLSGEQKKAIVDLLFKTNRKVTVKQLKEDYFKKIECFDSVEISGVEDRFNASLGTYHDLLKIIKDKDFLDNEENEDILEDIVLTLTLFEDREMIEERLKTYAHLFDDKVMKQLKRRRYTGWGRLSRKLINGIRDKQSGKTILDFLKSDGFANRNFMQLIHDDSLTFKEDIQKAQVSGQGDSLHEHIANLAGSPAIKKGILQTVKVVDELVKVMGRHKPENIVIEMARENQTTQKGQKNSRERMKRIEEGIKELGSQILKEHPVENTQLQNEKLYLYYLQNGRDMYVDQELDINRLSDYDVDHIVPQSFLKDDSIDNKVLTRSDKARGKSDNVPSEEVVKKMKNYWRQLLNAKLITQRKFDNLTKAERGGLSELDKAGFIKRQLVETRQITKHVAQILDSRMNTKYDENDKLIREVKVITLKSKLVSDFRKDFQFYKVREINNYHHAHDAYLNAVVGTALIKKYPKLESEFVYGDYKVYDVRKMIAKSEQEIGKATAKYFFYSNIMNFFKTEITLANGEIRKRPLIETNGETGEIVWDKGRDFATVRKVLSMPQVNIVKKTEVQTGGFSKESILPKRNSDKLIARKKDWDPKKYGGFDSPTVAYSVLVVAKVEKGKSKKLKSVKELLGITIMERSSFEKNPIDFLEAKGYKEVKKDLIIKLPKYSLFELENGRKRMLASAGELQKGNELALPSKYVNFLYLASHYEKLKGSPEDNEQKQLFVEQHKHYLDEIIEQISEFSKRVILADANLDKVLSAYNKHRDKPIREQAENIIHLFTLTNLGAPAAFKYFDTTIDRKRYTSTKEVLDATLIHQSITGLYETRIDLSQLGGDGGEAAAKEAAAKEAAAKEAAAKEAAAKGGTLNLEDEYRLYETSAEPEVSPGSTWLSDFPQAWAETGGMGLAVRQAPLIIPLKATSTPVSIKQYPMSQEAKLGIKPHIQRLLDQGILVPCQSPWNTPLLPVKKPGTNDYRPVQDLREVNKRVEDIHPTVPNPYNLLSGLPPSHRWYTVLDLKDAFFCLRLHPTSQPLFAFEWRDPGMGISGQLTWTRLPQGFKNSPTLFNEALHRDLADFRIQHPDLILLQYVDDILLAATSELDCQQGTRALLLTLGNLGYRASAKKAQLCQKQVKYLGYLLKEGQRWLTEARKETVMGQPTPKTPRQLREFLGKAGFCRLFIPGFAEMAAPLYPLTKPGTLFNWGPDQQKAYQEIKQALLTAPALGLPDLTKPFELFVDEKQGYAKGVLTQKLGPWRRPVAYLSKKLDPVAAGWPPCLRMVAAIAVLRKDAGKLTMGQPLVILAPHAVEALVKQPPDRWLSNARMTHYQAMLLDTDRVQFGPVVALNPATLLPLPEEGAPHDCLEILAETHGTRPDLTDQPIPDADHTWYTDGSSFLQEGQRKAGAAVTTETEVIWARALPAGTSAQRAELIALTQALKMAEGKRLNVYTDSRYAFATAHIHGEIYRRRGWLTSEGREIKNKSEILALLKALFLPKRLSIIHCLGHQKGDSAEARGNRLADQAAREAAIKTPPDTSTLLAGKRTADGSEFEKRTADGSEFESPKKKAKVE

SEQ ID NO: 1863 - protein, 2098 aa, synthetic construct
MPAAKRVKLDGGDKKYSIGLDIGTNSVGWAVITDEYKVPSKKFKVLGNTDRHSIKKNLIGALLFDSGETAEATRLKRTARRRYTRRKNRICYLQEIFSNEMAKVDDSFFHRLEESFLVEEDKKHERHPIFGNIVDEVAYHEKYPTIYHLRKKLVDSTDKADLRLIYLALAHMIKFRGHFLIEGDLNPDNSDVDKLFIQLVQTYNQLFEENPINASGVDAKAILSARLSKSRRLENLIAQLPGEKKNGLFGNLIALSLGLTPNFKSNFDLAEDAKLQLSKDTYDDDLDNLLAQIGDQYADLFLAAKNLSDAILLSDILRVNTEITKAPLSASMIKRYDEHHQDLTLLKALVRQQLPEKYKEIFFDQSKNGYAGYIDGGASQEEFYKFIKPILEKMDGTEELLVKLNREDLLRKQRTFDNGSIPHQIHLGELHAILRRQEDFYPFLKDNREKIEKILTFRIPYYVGPLARGNSRFAWMTRKSEETITPWNFEEVVDKGASAQSFIERMTNFDKNLPNEKVLPKHSLLYEYFTVYNELTKVKYVTEGMRKPAFLSGEQKKAIVDLLFKTNRKVTVKQLKEDYFKKIECFDSVEISGVEDRFNASLGTYHDLLKIIKDKDFLDNEENEDILEDIVLTLTLFEDREMIEERLKTYAHLFDDKVMKQLKRRRYTGWGRLSRKLINGIRDKQSGKTILDFLKSDGFANRNFMQLIHDDSLTFKEDIQKAQVSGQGDSLHEHIANLAGSPAIKKGILQTVKVVDELVKVMGRHKPENIVIEMARENQTTQKGQKNSRERMKRIEEGIKELGSQILKEHPVENTQLQNEKLYLYYLQNGRDMYVDQELDINRLSDYDVDHIVPQSFLKDDSIDNKVLTRSDKARGKSDNVPSEEVVKKMKNYWRQLLNAKLITQRKFDNLTKAERGGLSELDKAGFIKRQLVETRQITKHVAQILDSRMNTKYDENDKLIREVKVITLKSKLVSDFRKDFQFYKVREINNYHHAHDAYLNAVVGTALIKKYPKLESEFVYGDYKVYDVRKMIAKSEQEIGKATAKYFFYSNIMNFFKTEITLANGEIRKRPLIETNGETGEIVWDKGRDFATVRKVLSMPQVNIVKKTEVQTGGFSKESILPKRNSDKLIARKKDWDPKKYGGFDSPTVAYSVLVVAKVEKGKSKKLKSVKELLGITIMERSSFEKNPIDFLEAKGYKEVKKDLIIKLPKYSLFELENGRKRMLASAGELQKGNELALPSKYVNFLYLASHYEKLKGSPEDNEQKQLFVEQHKHYLDEIIEQISEFSKRVILADANLDKVLSAYNKHRDKPIREQAENIIHLFTLTNLGAPAAFKYFDTTIDRKRYTSTKEVLDATLIHQSITGLYETRIDLSQLGGDGGPAPAPAPAPAPAPGGTLNLEDEYRLYETSAEPEVSPGSTWLSDFPQAWAETGGMGLAVRQAPLIIPLKATSTPVSIKQYPMSQEAKLGIKPHIQRLLDQGILVPCQSPWNTPLLPVKKPGTNDYRPVQDLREVNKRVEDIHPTVPNPYNLLSGLPPSHRWYTVLDLKDAFFCLRLHPTSQPLFAFEWRDPGMGISGQLTWTRLPQGFKNSPTLFNEALHRDLADFRIQHPDLILLQYVDDILLAATSELDCQQGTRALLLTLGNLGYRASAKKAQLCQKQVKYLGYLLKEGQRWLTEARKETVMGQPTPKTPRQLREFLGKAGFCRLFIPGFAEMAAPLYPLTKPGTLFNWGPDQQKAYQEIKQALLTAPALGLPDLTKPFELFVDEKQGYAKGVLTQKLGPWRRPVAYLSKKLDPVAAGWPPCLRMVAAIAVLRKDAGKLTMGQPLVILAPHAVEALVKQPPDRWLSNARMTHYQAMLLDTDRVQFGPVVALNPATLLPLPEEGAPHDCLEILAETHGTRPDLTDQPIPDADHTWYTDGSSFLQEGQRKAGAAVTTETEVIWARALPAGTSAQRAELIALTQALKMAEGKRLNVYTDSRYAFATAHIHGEIYRRRGWLTSEGREIKNKSEILALLKALFLPKRLSIIHCLGHQKGDSAEARGNRLADQAAREAAIKTPPDTSTLLAGKRTADGSEFEKRTADGSEFESPKKKAKVE

SEQ ID NO: 1864 - protein, 2096 aa, synthetic construct
MPAAKRVKLDGGDKKYSIGLDIGTNSVGWAVITDEYKVPSKKFKVLGNTDRHSIKKNLIGALLFDSGETAEATRLKRTARRRYTRRKNRICYLQEIFSNEMAKVDDSFFHRLEESFLVEEDKKHERHPIFGNIVDEVAYHEKYPTIYHLRKKLVDSTDKADLRLIYLALAHMIKFRGHFLIEGDLNPDNSDVDKLFIQLVQTYNQLFEENPINASGVDAKAILSARLSKSRRLENLIAQLPGEKKNGLFGNLIALSLGLTPNFKSNFDLAEDAKLQLSKDTYDDDLDNLLAQIGDQYADLFLAAKNLSDAILLSDILRVNTEITKAPLSASMIKRYDEHHQDLTLLKALVRQQLPEKYKEIFFDQSKNGYAGYIDGGASQEEFYKFIKPILEKMDGTEELLVKLNREDLLRKQRTFDNGSIPHQIHLGELHAILRRQEDFYPFLKDNREKIEKILTFRIPYYVGPLARGNSRFAWMTRKSEETITPWNFEEVVDKGASAQSFIERMTNFDKNLPNEKVLPKHSLLYEYFTVYNELTKVKYVTEGMRKPAFLSGEQKKAIVDLLFKTNRKVTVKQLKEDYFKKIECFDSVEISGVEDRFNASLGTYHDLLKIIKDKDFLDNEENEDILEDIVLTLTLFEDREMIEERLKTYAHLFDDKVMKQLKRRRYTGWGRLSRKLINGIRDKQSGKTILDFLKSDGFANRNFMQLIHDDSLTFKEDIQKAQVSGQGDSLHEHIANLAGSPAIKKGILQTVKVVDELVKVMGRHKPENIVIEMARENQTTQKGQKNSRERMKRIEEGIKELGSQILKEHPVENTQLQNEKLYLYYLQNGRDMYVDQELDINRLSDYDVDHIVPQSFLKDDSIDNKVLTRSDKARGKSDNVPSEEVVKKMKNYWRQLLNAKLITQRKFDNLTKAERGGLSELDKAGFIKRQLVETRQITKHVAQILDSRMNTKYDENDKLIREVKVITLKSKLVSDFRKDFQFYKVREINNYHHAHDAYLNAVVGTALIKKYPKLESEFVYGDYKVYDVRKMIAKSEQEIGKATAKYFFYSNIMNFFKTEITLANGEIRKRPLIETNGETGEIVWDKGRDFATVRKVLSMPQVNIVKKTEVQTGGFSKESILPKRNSDKLIARKKDWDPKKYGGFDSPTVAYSVLVVAKVEKGKSKKLKSVKELLGITIMERSSFEKNPIDFLEAKGYKEVKKDLIIKLPKYSLFELENGRKRMLASAGELQKGNELALPSKYVNFLYLASHYEKLKGSPEDNEQKQLFVEQHKHYLDEIIEQISEFSKRVILADANLDKVLSAYNKHRDKPIREQAENIIHLFTLTNLGAPAAFKYFDTTIDRKRYTSTKEVLDATLIHQSITGLYETRIDLSQLGGDGGPAPEAAAKGGGGGTLNLEDEYRLYETSAEPEVSPGSTWLSDFPQAWAETGGMGLAVRQAPLIIPLKATSTPVSIKQYPMSQEAKLGIKPHIQRLLDQGILVPCQSPWNTPLLPVKKPGTNDYRPVQDLREVNKRVEDIHPTVPNPYNLLSGLPPSHRWYTVLDLKDAFFCLRLHPTSQPLFAFEWRDPGMGISGQLTWTRLPQGFKNSPTLFNEALHRDLADFRIQHPDLILLQYVDDILLAATSELDCQQGTRALLLTLGNLGYRASAKKAQLCQKQVKYLGYLLKEGQRWLTEARKETVMGQPTPKTPRQLREFLGKAGFCRLFIPGFAEMAAPLYPLTKPGTLFNWGPDQQKAYQEIKQALLTAPALGLPDLTKPFELFVDEKQGYAKGVLTQKLGPWRRPVAYLSKKLDPVAAGWPPCLRMVAAIAVLRKDAGKLTMGQPLVILAPHAVEALVKQPPDRWLSNARMTHYQAMLLDTDRVQFGPVVALNPATLLPLPEEGAPHDCLEILAETHGTRPDLTDQPIPDADHTWYTDGSSFLQEGQRKAGAAVTTETEVIWARALPAGTSAQRAELIALTQALKMAEGKRLNVYTDSRYAFATAHIHGEIYRRRGWLTSEGREIKNKSEILALLKALFLPKRLSIIHCLGHQKGDSAEARGNRLADQAAREAAIKTPPDTSTLLAGKRTADGSEFEKRTADGSEFESPKKKAKVE

SEQ ID NO: 1865 - protein, 2105 aa, synthetic construct
MPAAKRVKLDGGDKKYSIGLDIGTNSVGWAVITDEYKVPSKKFKVLGNTDRHSIKKNLIGALLFDSGETAEATRLKRTARRRYTRRKNRICYLQEIFSNEMAKVDDSFFHRLEESFLVEEDKKHERHPIFGNIVDEVAYHEKYPTIYHLRKKLVDSTDKADLRLIYLALAHMIKFRGHFLIEGDLNPDNSDVDKLFIQLVQTYNQLFEENPINASGVDAKAILSARLSKSRRLENLIAQLPGEKKNGLFGNLIALSLGLTPNFKSNFDLAEDAKLQLSKDTYDDDLDNLLAQIGDQYADLFLAAKNLSDAILLSDILRVNTEITKAPLSASMIKRYDEHHQDLTLLKALVRQQLPEKYKEIFFDQSKNGYAGYIDGGASQEEFYKFIKPILEKMDGTEELLVKLNREDLLRKQRTFDNGSIPHQIHLGELHAILRRQEDFYPFLKDNREKIEKILTFRIPYYVGPLARGNSRFAWMTRKSEETITPWNFEEVVDKGASAQSFIERMTNFDKNLPNEKVLPKHSLLYEYFTVYNELTKVKYVTEGMRKPAFLSGEQKKAIVDLLFKTNRKVTVKQLKEDYFKKIECFDSVEISGVEDRFNASLGTYHDLLKIIKDKDFLDNEENEDILEDIVLTLTLFEDREMIEERLKTYAHLFDDKVMKQLKRRRYTGWGRLSRKLINGIRDKQSGKTILDFLKSDGFANRNFMQLIHDDSLTFKEDIQKAQVSGQGDSLHEHIANLAGSPAIKKGILQTVKVVDELVKVMGRHKPENIVIEMARENQTTQKGQKNSRERMKRIEEGIKELGSQILKEHPVENTQLQNEKLYLYYLQNGRDMYVDQELDINRLSDYDVDHIVPQSFLKDDSIDNKVLTRSDKARGKSDNVPSEEVVKKMKNYWRQLLNAKLITQRKFDNLTKAERGGLSELDKAGFIKRQLVETRQITKHVAQILDSRMNTKYDENDKLIREVKVITLKSKLVSDFRKDFQFYKVREINNYHHAHDAYLNAVVGTALIKKYPKLESEFVYGDYKVYDVRKMIAKSEQEIGKATAKYFFYSNIMNFFKTEITLANGEIRKRPLIETNGETGEIVWDKGRDFATVRKVLSMPQVNIVKKTEVQTGGFSKESILPKRNSDKLIARKKDWDPKKYGGFDSPTVAYSVLVVAKVEKGKSKKLKSVKELLGITIMERSSFEKNPIDFLEAKGYKEVKKDLIIKLPKYSLFELENGRKRMLASAGELQKGNELALPSKYVNFLYLASHYEKLKGSPEDNEQKQLFVEQHKHYLDEIIEQISEFSKRVILADANLDKVLSAYNKHRDKPIREQAENIIHLFTLTNLGAPAAFKYFDTTIDRKRYTSTKEVLDATLIHQSITGLYETRIDLSQLGGDGGEAAAKEAAAKEAAAKEAAAKGGTLNLEDEYRLYETSAEPEVSPGSTWLSDFPQAWAETGGMGLAVRQAPLIIPLKATSTPVSIKQYPMSQEAKLGIKPHIQRLLDQGILVPCQSPWNTPLLPVKKPGTNDYRPVQDLREVNKRVEDIHPTVPNPYNLLSGLPPSHRWYTVLDLKDAFFCLRLHPTSQPLFAFEWRDPGMGISGQLTWTRLPQGFKNSPTLFNEALHRDLADFRIQHPDLILLQYVDDILLAATSELDCQQGTRALLLTLGNLGYRASAKKAQLCQKQVKYLGYLLKEGQRWLTEARKETVMGQPTPKTPRQLREFLGKAGFCRLFIPGFAEMAAPLYPLTKPGTLFNWGPDQQKAYQEIKQALLTAPALGLPDLTKPFELFVDEKQGYAKGVLTQKLGPWRRPVAYLSKKLDPVAAGWPPCLRMVAAIAVLRKDAGKLTMGQPLVILAPHAVEALVKQPPDRWLSNARMTHYQAMLLDTDRVQFGPVVALNPATLLPLPEEGAPHDCLEILAETHGTRPDLTDQPIPDADHTWYTDGSSFLQEGQRKAGAAVTTETEVIWARALPAGTSAQRAELIALTQALKMAEGKRLNVYTDSRYAFATAHIHGEIYRRRGWLTSEGREIKNKSEILALLKALFLPKRLSIIHCLGHQKGDSAEARGNRLADQAAREAAIKTPPDTSTLLAGKRTADGSEFEKRTADGSEFESPKKKAKVE

SEQ ID NO: 1866 - protein, 2096 aa, synthetic construct
MPAAKRVKLDGGDKKYSIGLDIGTNSVGWAVITDEYKVPSKKFKVLGNTDRHSIKKNLIGALLFDSGETAEATRLKRTARRRYTRRKNRICYLQEIFSNEMAKVDDSFFHRLEESFLVEEDKKHERHPIFGNIVDEVAYHEKYPTIYHLRKKLVDSTDKADLRLIYLALAHMIKFRGHFLIEGDLNPDNSDVDKLFIQLVQTYNQLFEENPINASGVDAKAILSARLSKSRRLENLIAQLPGEKKNGLFGNLIALSLGLTPNFKSNFDLAEDAKLQLSKDTYDDDLDNLLAQIGDQYADLFLAAKNLSDAILLSDILRVNTEITKAPLSASMIKRYDEHHQDLTLLKALVRQQLPEKYKEIFFDQSKNGYAGYIDGGASQEEFYKFIKPILEKMDGTEELLVKLNREDLLRKQRTFDNGSIPHQIHLGELHAILRRQEDFYPFLKDNREKIEKILTFRIPYYVGPLARGNSRFAWMTRKSEETITPWNFEEVVDKGASAQSFIERMTNFDKNLPNEKVLPKHSLLYEYFTVYNELTKVKYVTEGMRKPAFLSGEQKKAIVDLLFKTNRKVTVKQLKEDYFKKIECFDSVEISGVEDRFNASLGTYHDLLKIIKDKDFLDNEENEDILEDIVLTLTLFEDREMIEERLKTYAHLFDDKVMKQLKRRRYTGWGRLSRKLINGIRDKQSGKTILDFLKSDGFANRNFMQLIHDDSLTFKEDIQKAQVSGQGDSLHEHIANLAGSPAIKKGILQTVKVVDELVKVMGRHKPENIVIEMARENQTTQKGQKNSRERMKRIEEGIKELGSQILKEHPVENTQLQNEKLYLYYLQNGRDMYVDQELDINRLSDYDVDHIVPQSFLKDDSIDNKVLTRSDKARGKSDNVPSEEVVKKMKNYWRQLLNAKLITQRKFDNLTKAERGGLSELDKAGFIKRQLVETRQITKHVAQILDSRMNTKYDENDKLIREVKVITLKSKLVSDFRKDFQFYKVREINNYHHAHDAYLNAVVGTALIKKYPKLESEFVYGDYKVYDVRKMIAKSEQEIGKATAKYFFYSNIMNFFKTEITLANGEIRKRPLIETNGETGEIVWDKGRDFATVRKVLSMPQVNIVKKTEVQTGGFSKESILPKRNSDKLIARKKDWDPKKYGGFDSPTVAYSVLVVAKVEKGKSKKLKSVKELLGITIMERSSFEKNPIDFLEAKGYKEVKKDLIIKLPKYSLFELENGRKRMLASAGELQKGNELALPSKYVNFLYLASHYEKLKGSPEDNEQKQLFVEQHKHYLDEIIEQISEFSKRVILADANLDKVLSAYNKHRDKPIREQAENIIHLFTLTNLGAPAAFKYFDTTIDRKRYTSTKEVLDATLIHQSITGLYETRIDLSQLGGDGGPAPGGSEAAAKGGTLNLEDEYRLYETSAEPEVSPGSTWLSDFPQAWAETGGMGLAVRQAPLIIPLKATSTPVSIKQYPMSQEAKLGIKPHIQRLLDQGILVPCQSPWNTPLLPVKKPGTNDYRPVQDLREVNKRVEDIHPTVPNPYNLLSGLPPSHRWYTVLDLKDAFFCLRLHPTSQPLFAFEWRDPGMGISGQLTWTRLPQGFKNSPTLFNEALHRDLADFRIQHPDLILLQYVDDILLAATSELDCQQGTRALLLTLGNLGYRASAKKAQLCQKQVKYLGYLLKEGQRWLTEARKETVMGQPTPKTPRQLREFLGKAGFCRLFIPGFAEMAAPLYPLTKPGTLFNWGPDQQKAYQEIKQALLTAPALGLPDLTKPFELFVDEKQGYAKGVLTQKLGPWRRPVAYLSKKLDPVAAGWPPCLRMVAAIAVLRKDAGKLTMGQPLVILAPHAVEALVKQPPDRWLSNARMTHYQAMLLDTDRVQFGPVVALNPATLLPLPEEGAPHDCLEILAETHGTRPDLTDQPIPDADHTWYTDGSSFLQEGQRKAGAAVTTETEVIWARALPAGTSAQRAELIALTQALKMAEGKRLNVYTDSRYAFATAHIHGEIYRRRGWLTSEGREIKNKSEILALLKALFLPKRLSIIHCLGHQKGDSAEARGNRLADQAAREAAIKTPPDTSTLLAGKRTADGSEFEKRTADGSEFESPKKKAKVE

SEQ ID NO: 1867 - protein, 2096 aa, synthetic construct
MPAAKRVKLDGGDKKYSIGLDIGTNSVGWAVITDEYKVPSKKFKVLGNTDRHSIKKNLIGALLFDSGETAEATRLKRTARRRYTRRKNRICYLQEIFSNEMAKVDDSFFHRLEESFLVEEDKKHERHPIFGNIVDEVAYHEKYPTIYHLRKKLVDSTDKADLRLIYLALAHMIKFRGHFLIEGDLNPDNSDVDKLFIQLVQTYNQLFEENPINASGVDAKAILSARLSKSRRLENLIAQLPGEKKNGLFGNLIALSLGLTPNFKSNFDLAEDAKLQLSKDTYDDDLDNLLAQIGDQYADLFLAAKNLSDAILLSDILRVNTEITKAPLSASMIKRYDEHHQDLTLLKALVRQQLPEKYKEIFFDQSKNGYAGYIDGGASQEEFYKFIKPILEKMDGTEELLVKLNREDLLRKQRTFDNGSIPHQIHLGELHAILRRQEDFYPFLKDNREKIEKILTFRIPYYVGPLARGNSRFAWMTRKSEETITPWNFEEVVDKGASAQSFIERMTNFDKNLPNEKVLPKHSLLYEYFTVYNELTKVKYVTEGMRKPAFLSGEQKKAIVDLLFKTNRKVTVKQLKEDYFKKIECFDSVEISGVEDRFNASLGTYHDLLKIIKDKDFLDNEENEDILEDIVLTLTLFEDREMIEERLKTYAHLFDDKVMKQLKRRRYTGWGRLSRKLINGIRDKQSGKTILDFLKSDGFANRNFMQLIHDDSLTFKEDIQKAQVSGQGDSLHEHIANLAGSPAIKKGILQTVKVVDELVKVMGRHKPENIVIEMARENQTTQKGQKNSRERMKRIEEGIKELGSQILKEHPVENTQLQNEKLYLYYLQNGRDMYVDQELDINRLSDYDVDHIVPQSFLKDDSIDNKVLTRSDKARGKSDNVPSEEVVKKMKNYWRQLLNAKLITQRKFDNLTKAERGGLSELDKAGFIKRQLVETRQITKHVAQILDSRMNTKYDENDKLIREVKVITLKSKLVSDFRKDFQFYKVREINNYHHAHDAYLNAVVGTALIKKYPKLESEFVYGDYKVYDVRKMIAKSEQEIGKATAKYFFYSNIMNFFKTEITLANGEIRKRPLIETNGETGEIVWDKGRDFATVRKVLSMPQVNIVKKTEVQTGGFSKESILPKRNSDKLIARKKDWDPKKYGGFDSPTVAYSVLVVAKVEKGKSKKLKSVKELLGITIMERSSFEKNPIDFLEAKGYKEVKKDLIIKLPKYSLFELENGRKRMLASAGELQKGNELALPSKYVNFLYLASHYEKLKGSPEDNEQKQLFVEQHKHYLDEIIEQISEFSKRVILADANLDKVLSAYNKHRDKPIREQAENIIHLFTLTNLGAPAAFKYFDTTIDRKRYTSTKEVLDATLIHQSITGLYETRIDLSQLGGDGGEAAAKGGGPAPGGTLNLEDEYRLYETSAEPEVSPGSTWLSDFPQAWAETGGMGLAVRQAPLIIPLKATSTPVSIKQYPMSQEAKLGIKPHIQRLLDQGILVPCQSPWNTPLLPVKKPGTNDYRPVQDLREVNKRVEDIHPTVPNPYNLLSGLPPSHRWYTVLDLKDAFFCLRLHPTSQPLFAFEWRDPGMGISGQLTWTRLPQGFKNSPTLFNEALHRDLADFRIQHPDLILLQYVDDILLAATSELDCQQGTRALLLTLGNLGYRASAKKAQLCQKQVKYLGYLLKEGQRWLTEARKETVMGQPTPKTPRQLREFLGKAGFCRLFIPGFAEMAAPLYPLTKPGTLFNWGPDQQKAYQEIKQALLTAPALGLPDLTKPFELFVDEKQGYAKGVLTQKLGPWRRPVAYLSKKLDPVAAGWPPCLRMVAAIAVLRKDAGKLTMGQPLVILAPHAVEALVKQPPDRWLSNARMTHYQAMLLDTDRVQFGPVVALNPATLLPLPEEGAPHDCLEILAETHGTRPDLTDQPIPDADHTWYTDGSSFLQEGQRKAGAAVTTETEVIWARALPAGTSAQRAELIALTQALKMAEGKRLNVYTDSRYAFATAHIHGEIYRRRGWLTSEGREIKNKSEILALLKALFLPKRLSIIHCLGHQKGDSAEARGNRLADQAAREAAIKTPPDTSTLLAGKRTADGSEFEKRTADGSEFESPKKKAKVE

SEQ ID NO: 1868 - protein, 2090 aa, synthetic construct
MPAAKRVKLDGGDKKYSIGLDIGTNSVGWAVITDEYKVPSKKFKVLGNTDRHSIKKNLIGALLFDSGETAEATRLKRTARRRYTRRKNRICYLQEIFSNEMAKVDDSFFHRLEESFLVEEDKKHERHPIFGNIVDEVAYHEKYPTIYHLRKKLVDSTDKADLRLIYLALAHMIKFRGHFLIEGDLNPDNSDVDKLFIQLVQTYNQLFEENPINASGVDAKAILSARLSKSRRLENLIAQLPGEKKNGLFGNLIALSLGLTPNFKSNFDLAEDAKLQLSKDTYDDDLDNLLAQIGDQYADLFLAAKNLSDAILLSDILRVNTEITKAPLSASMIKRYDEHHQDLTLLKALVRQQLPEKYKEIFFDQSKNGYAGYIDGGASQEEFYKFIKPILEKMDGTEELLVKLNREDLLRKQRTFDNGSIPHQIHLGELHAILRRQEDFYPFLKDNREKIEKILTFRIPYYVGPLARGNSRFAWMTRKSEETITPWNFEEVVDKGASAQSFIERMTNFDKNLPNEKVLPKHSLLYEYFTVYNELTKVKYVTEGMRKPAFLSGEQKKAIVDLLFKTNRKVTVKQLKEDYFKKIECFDSVEISGVEDRFNASLGTYHDLLKIIKDKDFLDNEENEDILEDIVLTLTLFEDREMIEERLKTYAHLFDDKVMKQLKRRRYTGWGRLSRKLINGIRDKQSGKTILDFLKSDGFANRNFMQLIHDDSLTFKEDIQKAQVSGQGDSLHEHIANLAGSPAIKKGILQTVKVVDELVKVMGRHKPENIVIEMARENQTTQKGQKNSRERMKRIEEGIKELGSQILKEHPVENTQLQNEKLYLYYLQNGRDMYVDQELDINRLSDYDVDHIVPQSFLKDDSIDNKVLTRSDKARGKSDNVPSEEVVKKMKNYWRQLLNAKLITQRKFDNLTKAERGGLSELDKAGFIKRQLVETRQITKHVAQILDSRMNTKYDENDKLIREVKVITLKSKLVSDFRKDFQFYKVREINNYHHAHDAYLNAVVGTALIKKYPKLESEFVYGDYKVYDVRKMIAKSEQEIGKATAKYFFYSNIMNFFKTEITLANGEIRKRPLIETNGETGEIVWDKGRDFATVRKVLSMPQVNIVKKTEVQTGGFSKESILPKRNSDKLIARKKDWDPKKYGGFDSPTVAYSVLVVAKVEKGKSKKLKSVKELLGITIMERSSFEKNPIDFLEAKGYKEVKKDLIIKLPKYSLFELENGRKRMLASAGELQKGNELALPSKYVNFLYLASHYEKLKGSPEDNEQKQLFVEQHKHYLDEIIEQISEFSKRVILADANLDKVLSAYNKHRDKPIREQAENIIHLFTLTNLGAPAAFKYFDTTIDRKRYTSTKEVLDATLIHQSITGLYETRIDLSQLGGDGGEAAAKGGTLNLEDEYRLYETSAEPEVSPGSTWLSDFPQAWAETGGMGLAVRQAPLIIPLKATSTPVSIKQYPMSQEAKLGIKPHIQRLLDQGILVPCQSPWNTPLLPVKKPGTNDYRPVQDLREVNKRVEDIHPTVPNPYNLLSGLPPSHRWYTVLDLKDAFFCLRLHPTSQPLFAFEWRDPGMGISGQLTWTRLPQGFKNSPTLFNEALHRDLADFRIQHPDLILLQYVDDILLAATSELDCQQGTRALLLTLGNLGYRASAKKAQLCQKQVKYLGYLLKEGQRWLTEARKETVMGQPTPKTPRQLREFLGKAGFCRLFIPGFAEMAAPLYPLTKPGTLFNWGPDQQKAYQEIKQALLTAPALGLPDLTKPFELFVDEKQGYAKGVLTQKLGPWRRPVAYLSKKLDPVAAGWPPCLRMVAAIAVLRKDAGKLTMGQPLVILAPHAVEALVKQPPDRWLSNARMTHYQAMLLDTDRVQFGPVVALNPATLLPLPEEGAPHDCLEILAETHGTRPDLTDQPIPDADHTWYTDGSSFLQEGQRKAGAAVTTETEVIWARALPAGTSAQRAELIALTQALKMAEGKRLNVYTDSRYAFATAHIHGEIYRRRGWLTSEGREIKNKSEILALLKALFLPKRLSIIHCLGHQKGDSAEARGNRLADQAAREAAIKTPPDTSTLLAGKRTADGSEFEKRTADGSEFESPKKKAKVE

SEQ ID NO: 1869 - protein, 2096 aa, synthetic construct
MPAAKRVKLDGGDKKYSIGLDIGTNSVGWAVITDEYKVPSKKFKVLGNTDRHSIKKNLIGALLFDSGETAEATRLKRTARRRYTRRKNRICYLQEIFSNEMAKVDDSFFHRLEESFLVEEDKKHERHPIFGNIVDEVAYHEKYPTIYHLRKKLVDSTDKADLRLIYLALAHMIKFRGHFLIEGDLNPDNSDVDKLFIQLVQTYNQLFEENPINASGVDAKAILSARLSKSRRLENLIAQLPGEKKNGLFGNLIALSLGLTPNFKSNFDLAEDAKLQLSKDTYDDDLDNLLAQIGDQYADLFLAAKNLSDAILLSDILRVNTEITKAPLSASMIKRYDEHHQDLTLLKALVRQQLPEKYKEIFFDQSKNGYAGYIDGGASQEEFYKFIKPILEKMDGTEELLVKLNREDLLRKQRTFDNGSIPHQIHLGELHAILRRQEDFYPFLKDNREKIEKILTFRIPYYVGPLARGNSRFAWMTRKSEETITPWNFEEVVDKGASAQSFIERMTNFDKNLPNEKVLPKHSLLYEYFTVYNELTKVKYVTEGMRKPAFLSGEQKKAIVDLLFKTNRKVTVKQLKEDYFKKIECFDSVEISGVEDRFNASLGTYHDLLKIIKDKDFLDNEENEDILEDIVLTLTLFEDREMIEERLKTYAHLFDDKVMKQLKRRRYTGWGRLSRKLINGIRDKQSGKTILDFLKSDGFANRNFMQLIHDDSLTFKEDIQKAQVSGQGDSLHEHIANLAGSPAIKKGILQTVKVVDELVKVMGRHKPENIVIEMARENQTTQKGQKNSRERMKRIEEGIKELGSQILKEHPVENTQLQNEKLYLYYLQNGRDMYVDQELDINRLSDYDVDHIVPQSFLKDDSIDNKVLTRSDKARGKSDNVPSEEVVKKMKNYWRQLLNAKLITQRKFDNLTKAERGGLSELDKAGFIKRQLVETRQITKHVAQILDSRMNTKYDENDKLIREVKVITLKSKLVSDFRKDFQFYKVREINNYHHAHDAYLNAVVGTALIKKYPKLESEFVYGDYKVYDVRKMIAKSEQEIGKATAKYFFYSNIMNFFKTEITLANGEIRKRPLIETNGETGEIVWDKGRDFATVRKVLSMPQVNIVKKTEVQTGGFSKESILPKRNSDKLIARKKDWDPKKYGGFDSPTVAYSVLVVAKVEKGKSKKLKSVKELLGITIMERSSFEKNPIDFLEAKGYKEVKKDLIIKLPKYSLFELENGRKRMLASAGELQKGNELALPSKYVNFLYLASHYEKLKGSPEDNEQKQLFVEQHKHYLDEIIEQISEFSKRVILADANLDKVLSAYNKHRDKPIREQAENIIHLFTLTNLGAPAAFKYFDTTIDRKRYTSTKEVLDATLIHQSITGLYETRIDLSQLGGDGGEAAAKGGGGSSGGTLNLEDEYRLYETSAEPEVSPGSTWLSDFPQAWAETGGMGLAVRQAPLIIPLKATSTPVSIKQYPMSQEAKLGIKPHIQRLLDQGILVPCQSPWNTPLLPVKKPGTNDYRPVQDLREVNKRVEDIHPTVPNPYNLLSGLPPSHRWYTVLDLKDAFFCLRLHPTSQPLFAFEWRDPGMGISGQLTWTRLPQGFKNSPTLFNEALHRDLADFRIQHPDLILLQYVDDILLAATSELDCQQGTRALLLTLGNLGYRASAKKAQLCQKQVKYLGYLLKEGQRWLTEARKETVMGQPTPKTPRQLREFLGKAGFCRLFIPGFAEMAAPLYPLTKPGTLFNWGPDQQKAYQEIKQALLTAPALGLPDLTKPFELFVDEKQGYAKGVLTQKLGPWRRPVAYLSKKLDPVAAGWPPCLRMVAAIAVLRKDAGKLTMGQPLVILAPHAVEALVKQPPDRWLSNARMTHYQAMLLDTDRVQFGPVVALNPATLLPLPEEGAPHDCLEILAETHGTRPDLTDQPIPDADHTWYTDGSSFLQEGQRKAGAAVTTETEVIWARALPAGTSAQRAELIALTQALKMAEGKRLNVYTDSRYAFATAHIHGEIYRRRGWLTSEGREIKNKSEILALLKALFLPKRLSIIHCLGHQKGDSAEARGNRLADQAAREAAIKTPPDTSTLLAGKRTADGSEFEKRTADGSEFESPKKKAKVE

SEQ ID NO: 1870 - protein, 2097 aa, synthetic construct
MPAAKRVKLDGGDKKYSIGLDIGTNSVGWAVITDEYKVPSKKFKVLGNTDRHSIKKNLIGALLFDSGETAEATRLKRTARRRYTRRKNRICYLQEIFSNEMAKVDDSFFHRLEESFLVEEDKKHERHPIFGNIVDEVAYHEKYPTIYHLRKKLVDSTDKADLRLIYLALAHMIKFRGHFLIEGDLNPDNSDVDKLFIQLVQTYNQLFEENPINASGVDAKAILSARLSKSRRLENLIAQLPGEKKNGLFGNLIALSLGLTPNFKSNFDLAEDAKLQLSKDTYDDDLDNLLAQIGDQYADLFLAAKNLSDAILLSDILRVNTEITKAPLSASMIKRYDEHHQDLTLLKALVRQQLPEKYKEIFFDQSKNGYAGYIDGGASQEEFYKFIKPILEKMDGTEELLVKLNREDLLRKQRTFDNGSIPHQIHLGELHAILRRQEDFYPFLKDNREKIEKILTFRIPYYVGPLARGNSRFAWMTRKSEETITPWNFEEVVDKGASAQSFIERMTNFDKNLPNEKVLPKHSLLYEYFTVYNELTKVKYVTEGMRKPAFLSGEQKKAIVDLLFKTNRKVTVKQLKEDYFKKIECFDSVEISGVEDRFNASLGTYHDLLKIIKDKDFLDNEENEDILEDIVLTLTLFEDREMIEERLKTYAHLFDDKVMKQLKRRRYTGWGRLSRKLINGIRDKQSGKTILDFLKSDGFANRNFMQLIHDDSLTFKEDIQKAQVSGQGDSLHEHIANLAGSPAIKKGILQTVKVVDELVKVMGRHKPENIVIEMARENQTTQKGQKNSRERMKRIEEGIKELGSQILKEHPVENTQLQNEKLYLYYLQNGRDMYVDQELDINRLSDYDVDHIVPQSFLKDDSIDNKVLTRSDKARGKSDNVPSEEVVKKMKNYWRQLLNAKLITQRKFDNLTKAERGGLSELDKAGFIKRQLVETRQITKHVAQILDSRMNTKYDENDKLIREVKVITLKSKLVSDFRKDFQFYKVREINNYHHAHDAYLNAVVGTALIKKYPKLESEFVYGDYKVYDVRKMIAKSEQEIGKATAKYFFYSNIMNFFKTEITLANGEIRKRPLIETNGETGEIVWDKGRDFATVRKVLSMPQVNIVKKTEVQTGGFSKESILPKRNSDKLIARKKDWDPKKYGGFDSPTVAYSVLVVAKVEKGKSKKLKSVKELLGITIMERSSFEKNPIDFLEAKGYKEVKKDLIIKLPKYSLFELENGRKRMLASAGELQKGNELALPSKYVNFLYLASHYEKLKGSPEDNEQKQLFVEQHKHYLDEIIEQISEFSKRVILADANLDKVLSAYNKHRDKPIREQAENIIHLFTLTNLGAPAAFKYFDTTIDRKRYTSTKEVLDATLIHQSITGLYETRIDLSQLGGDGGGSAGSAAGSGEFGGTLNLEDEYRLYETSAEPEVSPGSTWLSDFPQAWAETGGMGLAVRQAPLIIPLKATSTPVSIKQYPMSQEAKLGIKPHIQRLLDQGILVPCQSPWNTPLLPVKKPGTNDYRPVQDLREVNKRVEDIHPTVPNPYNLLSGLPPSHRWYTVLDLKDAFFCLRLHPTSQPLFAFEWRDPGMGISGQLTWTRLPQGFKNSPTLFNEALHRDLADFRIQHPDLILLQYVDDILLAATSELDCQQGTRALLLTLGNLGYRASAKKAQLCQKQVKYLGYLLKEGQRWLTEARKETVMGQPTPKTPRQLREFLGKAGFCRLFIPGFAEMAAPLYPLTKPGTLFNWGPDQQKAYQEIKQALLTAPALGLPDLTKPFELFVDEKQGYAKGVLTQKLGPWRRPVAYLSKKLDPVAAGWPPCLRMVAAIAVLRKDAGKLTMGQPLVILAPHAVEALVKQPPDRWLSNARMTHYQAMLLDTDRVQFGPVVALNPATLLPLPEEGAPHDCLEILAETHGTRPDLTDQPIPDADHTWYTDGSSFLQEGQRKAGAAVTTETEVIWARALPAGTSAQRAELIALTQALKMAEGKRLNVYTDSRYAFATAHIHGEIYRRRGWLTSEGREIKNKSEILALLKALFLPKRLSIIHCLGHQKGDSAEARGNRLADQAAREAAIKTPPDTSTLLAGKRTADGSEFEKRTADGSEFESPKKKAKVE

SEQ ID NO: 1871 - protein, 2096 aa, synthetic construct
MPAAKRVKLDGGDKKYSIGLDIGTNSVGWAVITDEYKVPSKKFKVLGNTDRHSIKKNLIGALLFDSGETAEATRLKRTARRRYTRRKNRICYLQEIFSNEMAKVDDSFFHRLEESFLVEEDKKHERHPIFGNIVDEVAYHEKYPTIYHLRKKLVDSTDKADLRLIYLALAHMIKFRGHFLIEGDLNPDNSDVDKLFIQLVQTYNQLFEENPINASGVDAKAILSARLSKSRRLENLIAQLPGEKKNGLFGNLIALSLGLTPNFKSNFDLAEDAKLQLSKDTYDDDLDNLLAQIGDQYADLFLAAKNLSDAILLSDILRVNTEITKAPLSASMIKRYDEHHQDLTLLKALVRQQLPEKYKEIFFDQSKNGYAGYIDGGASQEEFYKFIKPILEKMDGTEELLVKLNREDLLRKQRTFDNGSIPHQIHLGELHAILRRQEDFYPFLKDNREKIEKILTFRIPYYVGPLARGNSRFAWMTRKSEETITPWNFEEVVDKGASAQSFIERMTNFDKNLPNEKVLPKHSLLYEYFTVYNELTKVKYVTEGMRKPAFLSGEQKKAIVDLLFKTNRKVTVKQLKEDYFKKIECFDSVEISGVEDRFNASLGTYHDLLKIIKDKDFLDNEENEDILEDIVLTLTLFEDREMIEERLKTYAHLFDDKVMKQLKRRRYTGWGRLSRKLINGIRDKQSGKTILDFLKSDGFANRNFMQLIHDDSLTFKEDIQKAQVSGQGDSLHEHIANLAGSPAIKKGILQTVKVVDELVKVMGRHKPENIVIEMARENQTTQKGQKNSRERMKRIEEGIKELGSQILKEHPVENTQLQNEKLYLYYLQNGRDMYVDQELDINRLSDYDVDHIVPQSFLKDDSIDNKVLTRSDKARGKSDNVPSEEVVKKMKNYWRQLLNAKLITQRKFDNLTKAERGGLSELDKAGFIKRQLVETRQITKHVAQILDSRMNTKYDENDKLIREVKVITLKSKLVSDFRKDFQFYKVREINNYHHAHDAYLNAVVGTALIKKYPKLESEFVYGDYKVYDVRKMIAKSEQEIGKATAKYFFYSNIMNFFKTEITLANGEIRKRPLIETNGETGEIVWDKGRDFATVRKVLSMPQVNIVKKTEVQTGGFSKESILPKRNSDKLIARKKDWDPKKYGGFDSPTVAYSVLVVAKVEKGKSKKLKSVKELLGITIMERSSFEKNPIDFLEAKGYKEVKKDLIIKLPKYSLFELENGRKRMLASAGELQKGNELALPSKYVNFLYLASHYEKLKGSPEDNEQKQLFVEQHKHYLDEIIEQISEFSKRVILADANLDKVLSAYNKHRDKPIREQAENIIHLFTLTNLGAPAAFKYFDTTIDRKRYTSTKEVLDATLIHQSITGLYETRIDLSQLGGDGGEAAAKPAPGGSGGTLNLEDEYRLYETSAEPEVSPGSTWLSDFPQAWAETGGMGLAVRQAPLIIPLKATSTPVSIKQYPMSQEAKLGIKPHIQRLLDQGILVPCQSPWNTPLLPVKKPGTNDYRPVQDLREVNKRVEDIHPTVPNPYNLLSGLPPSHRWYTVLDLKDAFFCLRLHPTSQPLFAFEWRDPGMGISGQLTWTRLPQGFKNSPTLFNEALHRDLADFRIQHPDLILLQYVDDILLAATSELDCQQGTRALLLTLGNLGYRASAKKAQLCQKQVKYLGYLLKEGQRWLTEARKETVMGQPTPKTPRQLREFLGKAGFCRLFIPGFAEMAAPLYPLTKPGTLFNWGPDQQKAYQEIKQALLTAPALGLPDLTKPFELFVDEKQGYAKGVLTQKLGPWRRPVAYLSKKLDPVAAGWPPCLRMVAAIAVLRKDAGKLTMGQPLVILAPHAVEALVKQPPDRWLSNARMTHYQAMLLDTDRVQFGPVVALNPATLLPLPEEGAPHDCLEILAETHGTRPDLTDQPIPDADHTWYTDGSSFLQEGQRKAGAAVTTETEVIWARALPAGTSAQRAELIALTQALKMAEGKRLNVYTDSRYAFATAHIHGEIYRRRGWLTSEGREIKNKSEILALLKALFLPKRLSIIHCLGHQKGDSAEARGNRLADQAAREAAIKTPPDTSTLLAGKRTADGSEFEKRTADGSEFESPKKKAKVE

SEQ ID NO: 1872 - protein, 2096 aa, synthetic construct
MPAAKRVKLDGGDKKYSIGLDIGTNSVGWAVITDEYKVPSKKFKVLGNTDRHSIKKNLIGALLFDSGETAEATRLKRTARRRYTRRKNRICYLQEIFSNEMAKVDDSFFHRLEESFLVEEDKKHERHPIFGNIVDEVAYHEKYPTIYHLRKKLVDSTDKADLRLIYLALAHMIKFRGHFLIEGDLNPDNSDVDKLFIQLVQTYNQLFEENPINASGVDAKAILSARLSKSRRLENLIAQLPGEKKNGLFGNLIALSLGLTPNFKSNFDLAEDAKLQLSKDTYDDDLDNLLAQIGDQYADLFLAAKNLSDAILLSDILRVNTEITKAPLSASMIKRYDEHHQDLTLLKALVRQQLPEKYKEIFFDQSKNGYAGYIDGGASQEEFYKFIKPILEKMDGTEELLVKLNREDLLRKQRTFDNGSIPHQIHLGELHAILRRQEDFYPFLKDNREKIEKILTFRIPYYVGPLARGNSRFAWMTRKSEETITPWNFEEVVDKGASAQSFIERMTNFDKNLPNEKVLPKHSLLYEYFTVYNELTKVKYVTEGMRKPAFLSGEQKKAIVDLLFKTNRKVTVKQLKEDYFKKIECFDSVEISGVEDRFNASLGTYHDLLKIIKDKDFLDNEENEDILEDIVLTLTLFEDREMIEERLKTYAHLFDDKVMKQLKRRRYTGWGRLSRKLINGIRDKQSGKTILDFLKSDGFANRNFMQLIHDDSLTFKEDIQKAQVSGQGDSLHEHIANLAGSPAIKKGILQTVKVVDELVKVMGRHKPENIVIEMARENQTTQKGQKNSRERMKRIEEGIKELGSQILKEHPVENTQLQNEKLYLYYLQNGRDMYVDQELDINRLSDYDVDHIVPQSFLKDDSIDNKVLTRSDKARGKSDNVPSEEVVKKMKNYWRQLLNAKLITQRKFDNLTKAERGGLSELDKAGFIKRQLVETRQITKHVAQILDSRMNTKYDENDKLIREVKVITLKSKLVSDFRKDFQFYKVREINNYHHAHDAYLNAVVGTALIKKYPKLESEFVYGDYKVYDVRKMIAKSEQEIGKATAKYFFYSNIMNFFKTEITLANGEIRKRPLIETNGETGEIVWDKGRDFATVRKVLSMPQVNIVKKTEVQTGGFSKESILPKRNSDKLIARKKDWDPKKYGGFDSPTVAYSVLVVAKVEKGKSKKLKSVKELLGITIMERSSFEKNPIDFLEAKGYKEVKKDLIIKLPKYSLFELENGRKRMLASAGELQKGNELALPSKYVNFLYLASHYEKLKGSPEDNEQKQLFVEQHKHYLDEIIEQISEFSKRVILADANLDKVLSAYNKHRDKPIREQAENIIHLFTLTNLGAPAAFKYFDTTIDRKRYTSTKEVLDATLIHQSITGLYETRIDLSQLGGDGGEAAAKGSSPAPGGTLNLEDEYRLYETSAEPEVSPGSTWLSDFPQAWAETGGMGLAVRQAPLIIPLKATSTPVSIKQYPMSQEAKLGIKPHIQRLLDQGILVPCQSPWNTPLLPVKKPGTNDYRPVQDLREVNKRVEDIHPTVPNPYNLLSGLPPSHRWYTVLDLKDAFFCLRLHPTSQPLFAFEWRDPGMGISGQLTWTRLPQGFKNSPTLFNEALHRDLADFRIQHPDLILLQYVDDILLAATSELDCQQGTRALLLTLGNLGYRASAKKAQLCQKQVKYLGYLLKEGQRWLTEARKETVMGQPTPKTPRQLREFLGKAGFCRLFIPGFAEMAAPLYPLTKPGTLFNWGPDQQKAYQEIKQALLTAPALGLPDLTKPFELFVDEKQGYAKGVLTQKLGPWRRPVAYLSKKLDPVAAGWPPCLRMVAAIAVLRKDAGKLTMGQPLVILAPHAVEALVKQPPDRWLSNARMTHYQAMLLDTDRVQFGPVVALNPATLLPLPEEGAPHDCLEILAETHGTRPDLTDQPIPDADHTWYTDGSSFLQEGQRKAGAAVTTETEVIWARALPAGTSAQRAELIALTQALKMAEGKRLNVYTDSRYAFATAHIHGEIYRRRGWLTSEGREIKNKSEILALLKALFLPKRLSIIHCLGHQKGDSAEARGNRLADQAAREAAIKTPPDTSTLLAGKRTADGSEFEKRTADGSEFESPKKKAKVE

SEQ ID NO: 1873 - protein, 2091 aa, synthetic construct
MPAAKRVKLDGGDKKYSIGLDIGTNSVGWAVITDEYKVPSKKFKVLGNTDRHSIKKNLIGALLFDSGETAEATRLKRTARRRYTRRKNRICYLQEIFSNEMAKVDDSFFHRLEESFLVEEDKKHERHPIFGNIVDEVAYHEKYPTIYHLRKKLVDSTDKADLRLIYLALAHMIKFRGHFLIEGDLNPDNSDVDKLFIQLVQTYNQLFEENPINASGVDAKAILSARLSKSRRLENLIAQLPGEKKNGLFGNLIALSLGLTPNFKSNFDLAEDAKLQLSKDTYDDDLDNLLAQIGDQYADLFLAAKNLSDAILLSDILRVNTEITKAPLSASMIKRYDEHHQDLTLLKALVRQQLPEKYKEIFFDQSKNGYAGYIDGGASQEEFYKFIKPILEKMDGTEELLVKLNREDLLRKQRTFDNGSIPHQIHLGELHAILRRQEDFYPFLKDNREKIEKILTFRIPYYVGPLARGNSRFAWMTRKSEETITPWNFEEVVDKGASAQSFIERMTNFDKNLPNEKVLPKHSLLYEYFTVYNELTKVKYVTEGMRKPAFLSGEQKKAIVDLLFKTNRKVTVKQLKEDYFKKIECFDSVEISGVEDRFNASLGTYHDLLKIIKDKDFLDNEENEDILEDIVLTLTLFEDREMIEERLKTYAHLFDDKVMKQLKRRRYTGWGRLSRKLINGIRDKQSGKTILDFLKSDGFANRNFMQLIHDDSLTFKEDIQKAQVSGQGDSLHEHIANLAGSPAIKKGILQTVKVVDELVKVMGRHKPENIVIEMARENQTTQKGQKNSRERMKRIEEGIKELGSQILKEHPVENTQLQNEKLYLYYLQNGRDMYVDQELDINRLSDYDVDHIVPQSFLKDDSIDNKVLTRSDKARGKSDNVPSEEVVKKMKNYWRQLLNAKLITQRKFDNLTKAERGGLSELDKAGFIKRQLVETRQITKHVAQILDSRMNTKYDENDKLIREVKVITLKSKLVSDFRKDFQFYKVREINNYHHAHDAYLNAVVGTALIKKYPKLESEFVYGDYKVYDVRKMIAKSEQEIGKATAKYFFYSNIMNFFKTEITLANGEIRKRPLIETNGETGEIVWDKGRDFATVRKVLSMPQVNIVKKTEVQTGGFSKESILPKRNSDKLIARKKDWDPKKYGGFDSPTVAYSVLVVAKVEKGKSKKLKSVKELLGITIMERSSFEKNPIDFLEAKGYKEVKKDLIIKLPKYSLFELENGRKRMLASAGELQKGNELALPSKYVNFLYLASHYEKLKGSPEDNEQKQLFVEQHKHYLDEIIEQISEFSKRVILADANLDKVLSAYNKHRDKPIREQAENIIHLFTLTNLGAPAAFKYFDTTIDRKRYTSTKEVLDATLIHQSITGLYETRIDLSQLGGDGGGGGGGGGGTLNLEDEYRLYETSAEPEVSPGSTWLSDFPQAWAETGGMGLAVRQAPLIIPLKATSTPVSIKQYPMSQEAKLGIKPHIQRLLDQGILVPCQSPWNTPLLPVKKPGTNDYRPVQDLREVNKRVEDIHPTVPNPYNLLSGLPPSHRWYTVLDLKDAFFCLRLHPTSQPLFAFEWRDPGMGISGQLTWTRLPQGFKNSPTLFNEALHRDLADFRIQHPDLILLQYVDDILLAATSELDCQQGTRALLLTLGNLGYRASAKKAQLCQKQVKYLGYLLKEGQRWLTEARKETVMGQPTPKTPRQLREFLGKAGFCRLFIPGFAEMAAPLYPLTKPGTLFNWGPDQQKAYQEIKQALLTAPALGLPDLTKPFELFVDEKQGYAKGVLTQKLGPWRRPVAYLSKKLDPVAAGWPPCLRMVAAIAVLRKDAGKLTMGQPLVILAPHAVEALVKQPPDRWLSNARMTHYQAMLLDTDRVQFGPVVALNPATLLPLPEEGAPHDCLEILAETHGTRPDLTDQPIPDADHTWYTDGSSFLQEGQRKAGAAVTTETEVIWARALPAGTSAQRAELIALTQALKMAEGKRLNVYTDSRYAFATAHIHGEIYRRRGWLTSEGREIKNKSEILALLKALFLPKRLSIIHCLGHQKGDSAEARGNRLADQAAREAAIKTPPDTSTLLAGKRTADGSEFEKRTADGSEFESPKKKAKVE

SEQ ID NO: 1874 - protein, 2094 aa, synthetic construct
MPAAKRVKLDGGDKKYSIGLDIGTNSVGWAVITDEYKVPSKKFKVLGNTDRHSIKKNLIGALLFDSGETAEATRLKRTARRRYTRRKNRICYLQEIFSNEMAKVDDSFFHRLEESFLVEEDKKHERHPIFGNIVDEVAYHEKYPTIYHLRKKLVDSTDKADLRLIYLALAHMIKFRGHFLIEGDLNPDNSDVDKLFIQLVQTYNQLFEENPINASGVDAKAILSARLSKSRRLENLIAQLPGEKKNGLFGNLIALSLGLTPNFKSNFDLAEDAKLQLSKDTYDDDLDNLLAQIGDQYADLFLAAKNLSDAILLSDILRVNTEITKAPLSASMIKRYDEHHQDLTLLKALVRQQLPEKYKEIFFDQSKNGYAGYIDGGASQEEFYKFIKPILEKMDGTEELLVKLNREDLLRKQRTFDNGSIPHQIHLGELHAILRRQEDFYPFLKDNREKIEKILTFRIPYYVGPLARGNSRFAWMTRKSEETITPWNFEEVVDKGASAQSFIERMTNFDKNLPNEKVLPKHSLLYEYFTVYNELTKVKYVTEGMRKPAFLSGEQKKAIVDLLFKTNRKVTVKQLKEDYFKKIECFDSVEISGVEDRFNASLGTYHDLLKIIKDKDFLDNEENEDILEDIVLTLTLFEDREMIEERLKTYAHLFDDKVMKQLKRRRYTGWGRLSRKLINGIRDKQSGKTILDFLKSDGFANRNFMQLIHDDSLTFKEDIQKAQVSGQGDSLHEHIANLAGSPAIKKGILQTVKVVDELVKVMGRHKPENIVIEMARENQTTQKGQKNSRERMKRIEEGIKELGSQILKEHPVENTQLQNEKLYLYYLQNGRDMYVDQELDINRLSDYDVDHIVPQSFLKDDSIDNKVLTRSDKARGKSDNVPSEEVVKKMKNYWRQLLNAKLITQRKFDNLTKAERGGLSELDKAGFIKRQLVETRQITKHVAQILDSRMNTKYDENDKLIREVKVITLKSKLVSDFRKDFQFYKVREINNYHHAHDAYLNAVVGTALIKKYPKLESEFVYGDYKVYDVRKMIAKSEQEIGKATAKYFFYSNIMNFFKTEITLANGEIRKRPLIETNGETGEIVWDKGRDFATVRKVLSMPQVNIVKKTEVQTGGFSKESILPKRNSDKLIARKKDWDPKKYGGFDSPTVAYSVLVVAKVEKGKSKKLKSVKELLGITIMERSSFEKNPIDFLEAKGYKEVKKDLIIKLPKYSLFELENGRKRMLASAGELQKGNELALPSKYVNFLYLASHYEKLKGSPEDNEQKQLFVEQHKHYLDEIIEQISEFSKRVILADANLDKVLSAYNKHRDKPIREQAENIIHLFTLTNLGAPAAFKYFDTTIDRKRYTSTKEVLDATLIHQSITGLYETRIDLSQLGGDGGGSSPAPGGGGGTLNLEDEYRLYETSAEPEVSPGSTWLSDFPQAWAETGGMGLAVRQAPLIIPLKATSTPVSIKQYPMSQEAKLGIKPHIQRLLDQGILVPCQSPWNTPLLPVKKPGTNDYRPVQDLREVNKRVEDIHPTVPNPYNLLSGLPPSHRWYTVLDLKDAFFCLRLHPTSQPLFAFEWRDPGMGISGQLTWTRLPQGFKNSPTLFNEALHRDLADFRIQHPDLILLQYVDDILLAATSELDCQQGTRALLLTLGNLGYRASAKKAQLCQKQVKYLGYLLKEGQRWLTEARKETVMGQPTPKTPRQLREFLGKAGFCRLFIPGFAEMAAPLYPLTKPGTLFNWGPDQQKAYQEIKQALLTAPALGLPDLTKPFELFVDEKQGYAKGVLTQKLGPWRRPVAYLSKKLDPVAAGWPPCLRMVAAIAVLRKDAGKLTMGQPLVILAPHAVEALVKQPPDRWLSNARMTHYQAMLLDTDRVQFGPVVALNPATLLPLPEEGAPHDCLEILAETHGTRPDLTDQPIPDADHTWYTDGSSFLQEGQRKAGAAVTTETEVIWARALPAGTSAQRAELIALTQALKMAEGKRLNVYTDSRYAFATAHIHGEIYRRRGWLTSEGREIKNKSEILALLKALFLPKRLSIIHCLGHQKGDSAEARGNRLADQAAREAAIKTPPDTSTLLAGKRTADGSEFEKRTADGSEFESPKKKAKVE

SEQ ID NO: 1875 - protein, 2096 aa, synthetic construct
MPAAKRVKLDGGDKKYSIGLDIGTNSVGWAVITDEYKVPSKKFKVLGNTDRHSIKKNLIGALLFDSGETAEATRLKRTARRRYTRRKNRICYLQEIFSNEMAKVDDSFFHRLEESFLVEEDKKHERHPIFGNIVDEVAYHEKYPTIYHLRKKLVDSTDKADLRLIYLALAHMIKFRGHFLIEGDLNPDNSDVDKLFIQLVQTYNQLFEENPINASGVDAKAILSARLSKSRRLENLIAQLPGEKKNGLFGNLIALSLGLTPNFKSNFDLAEDAKLQLSKDTYDDDLDNLLAQIGDQYADLFLAAKNLSDAILLSDILRVNTEITKAPLSASMIKRYDEHHQDLTLLKALVRQQLPEKYKEIFFDQSKNGYAGYIDGGASQEEFYKFIKPILEKMDGTEELLVKLNREDLLRKQRTFDNGSIPHQIHLGELHAILRRQEDFYPFLKDNREKIEKILTFRIPYYVGPLARGNSRFAWMTRKSEETITPWNFEEVVDKGASAQSFIERMTNFDKNLPNEKVLPKHSLLYEYFTVYNELTKVKYVTEGMRKPAFLSGEQKKAIVDLLFKTNRKVTVKQLKEDYFKKIECFDSVEISGVEDRFNASLGTYHDLLKIIKDKDFLDNEENEDILEDIVLTLTLFEDREMIEERLKTYAHLFDDKVMKQLKRRRYTGWGRLSRKLINGIRDKQSGKTILDFLKSDGFANRNFMQLIHDDSLTFKEDIQKAQVSGQGDSLHEHIANLAGSPAIKKGILQTVKVVDELVKVMGRHKPENIVIEMARENQTTQKGQKNSRERMKRIEEGIKELGSQILKEHPVENTQLQNEKLYLYYLQNGRDMYVDQELDINRLSDYDVDHIVPQSFLKDDSIDNKVLTRSDKARGKSDNVPSEEVVKKMKNYWRQLLNAKLITQRKFDNLTKAERGGLSELDKAGFIKRQLVETRQITKHVAQILDSRMNTKYDENDKLIREVKVITLKSKLVSDFRKDFQFYKVREINNYHHAHDAYLNAVVGTALIKKYPKLESEFVYGDYKVYDVRKMIAKSEQEIGKATAKYFFYSNIMNFFKTEITLANGEIRKRPLIETNGETGEIVWDKGRDFATVRKVLSMPQVNIVKKTEVQTGGFSKESILPKRNSDKLIARKKDWDPKKYGGFDSPTVAYSVLVVAKVEKGKSKKLKSVKELLGITIMERSSFEKNPIDFLEAKGYKEVKKDLIIKLPKYSLFELENGRKRMLASAGELQKGNELALPSKYVNFLYLASHYEKLKGSPEDNEQKQLFVEQHKHYLDEIIEQISEFSKRVILADANLDKVLSAYNKHRDKPIREQAENIIHLFTLTNLGAPAAFKYFDTTIDRKRYTSTKEVLDATLIHQSITGLYETRIDLSQLGGDGGGSSGGGEAAAKGGTLNLEDEYRLYETSAEPEVSPGSTWLSDFPQAWAETGGMGLAVRQAPLIIPLKATSTPVSIKQYPMSQEAKLGIKPHIQRLLDQGILVPCQSPWNTPLLPVKKPGTNDYRPVQDLREVNKRVEDIHPTVPNPYNLLSGLPPSHRWYTVLDLKDAFFCLRLHPTSQPLFAFEWRDPGMGISGQLTWTRLPQGFKNSPTLFNEALHRDLADFRIQHPDLILLQYVDDILLAATSELDCQQGTRALLLTLGNLGYRASAKKAQLCQKQVKYLGYLLKEGQRWLTEARKETVMGQPTPKTPRQLREFLGKAGFCRLFIPGFAEMAAPLYPLTKPGTLFNWGPDQQKAYQEIKQALLTAPALGLPDLTKPFELFVDEKQGYAKGVLTQKLGPWRRPVAYLSKKLDPVAAGWPPCLRMVAAIAVLRKDAGKLTMGQPLVILAPHAVEALVKQPPDRWLSNARMTHYQAMLLDTDRVQFGPVVALNPATLLPLPEEGAPHDCLEILAETHGTRPDLTDQPIPDADHTWYTDGSSFLQEGQRKAGAAVTTETEVIWARALPAGTSAQRAELIALTQALKMAEGKRLNVYTDSRYAFATAHIHGEIYRRRGWLTSEGREIKNKSEILALLKALFLPKRLSIIHCLGHQKGDSAEARGNRLADQAAREAAIKTPPDTSTLLAGKRTADGSEFEKRTADGSEFESPKKKAKVE

SEQ ID NO: 1876 - protein, 2105 aa, synthetic construct
MPAAKRVKLDGGDKKYSIGLDIGTNSVGWAVITDEYKVPSKKFKVLGNTDRHSIKKNLIGALLFDSGETAEATRLKRTARRRYTRRKNRICYLQEIFSNEMAKVDDSFFHRLEESFLVEEDKKHERHPIFGNIVDEVAYHEKYPTIYHLRKKLVDSTDKADLRLIYLALAHMIKFRGHFLIEGDLNPDNSDVDKLFIQLVQTYNQLFEENPINASGVDAKAILSARLSKSRRLENLIAQLPGEKKNGLFGNLIALSLGLTPNFKSNFDLAEDAKLQLSKDTYDDDLDNLLAQIGDQYADLFLAAKNLSDAILLSDILRVNTEITKAPLSASMIKRYDEHHQDLTLLKALVRQQLPEKYKEIFFDQSKNGYAGYIDGGASQEEFYKFIKPILEKMDGTEELLVKLNREDLLRKQRTFDNGSIPHQIHLGELHAILRRQEDFYPFLKDNREKIEKILTFRIPYYVGPLARGNSRFAWMTRKSEETITPWNFEEVVDKGASAQSFIERMTNFDKNLPNEKVLPKHSLLYEYFTVYNELTKVKYVTEGMRKPAFLSGEQKKAIVDLLFKTNRKVTVKQLKEDYFKKIECFDSVEISGVEDRFNASLGTYHDLLKIIKDKDFLDNEENEDILEDIVLTLTLFEDREMIEERLKTYAHLFDDKVMKQLKRRRYTGWGRLSRKLINGIRDKQSGKTILDFLKSDGFANRNFMQLIHDDSLTFKEDIQKAQVSGQGDSLHEHIANLAGSPAIKKGILQTVKVVDELVKVMGRHKPENIVIEMARENQTTQKGQKNSRERMKRIEEGIKELGSQILKEHPVENTQLQNEKLYLYYLQNGRDMYVDQELDINRLSDYDVDHIVPQSFLKDDSIDNKVLTRSDKARGKSDNVPSEEVVKKMKNYWRQLLNAKLITQRKFDNLTKAERGGLSELDKAGFIKRQLVETRQITKHVAQILDSRMNTKYDENDKLIREVKVITLKSKLVSDFRKDFQFYKVREINNYHHAHDAYLNAVVGTALIKKYPKLESEFVYGDYKVYDVRKMIAKSEQEIGKATAKYFFYSNIMNFFKTEITLANGEIRKRPLIETNGETGEIVWDKGRDFATVRKVLSMPQVNIVKKTEVQTGGFSKESILPKRNSDKLIARKKDWDPKKYGGFDSPTVAYSVLVVAKVEKGKSKKLKSVKELLGITIMERSSFEKNPIDFLEAKGYKEVKKDLIIKLPKYSLFELENGRKRMLASAGELQKGNELALPSKYVNFLYLASHYEKLKGSPEDNEQKQLFVEQHKHYLDEIIEQISEFSKRVILADANLDKVLSAYNKHRDKPIREQAENIIHLFTLTNLGAPAAFKYFDTTIDRKRYTSTKEVLDATLIHQSITGLYETRIDLSQLGGDGGGGGGSGGGGSGGGGSGGGGSGGTLNLEDEYRLYETSAEPEVSPGSTWLSDFPQAWAETGGMGLAVRQAPLIIPLKATSTPVSIKQYPMSQEAKLGIKPHIQRLLDQGILVPCQSPWNTPLLPVKKPGTNDYRPVQDLREVNKRVEDIHPTVPNPYNLLSGLPPSHRWYTVLDLKDAFFCLRLHPTSQPLFAFEWRDPGMGISGQLTWTRLPQGFKNSPTLFNEALHRDLADFRIQHPDLILLQYVDDILLAATSELDCQQGTRALLLTLGNLGYRASAKKAQLCQKQVKYLGYLLKEGQRWLTEARKETVMGQPTPKTPRQLREFLGKAGFCRLFIPGFAEMAAPLYPLTKPGTLFNWGPDQQKAYQEIKQALLTAPALGLPDLTKPFELFVDEKQGYAKGVLTQKLGPWRRPVAYLSKKLDPVAAGWPPCLRMVAAIAVLRKDAGKLTMGQPLVILAPHAVEALVKQPPDRWLSNARMTHYQAMLLDTDRVQFGPVVALNPATLLPLPEEGAPHDCLEILAETHGTRPDLTDQPIPDADHTWYTDGSSFLQEGQRKAGAAVTTETEVIWARALPAGTSAQRAELIALTQALKMAEGKRLNVYTDSRYAFATAHIHGEIYRRRGWLTSEGREIKNKSEILALLKALFLPKRLSIIHCLGHQKGDSAEARGNRLADQAAREAAIKTPPDTSTLLAGKRTADGSEFEKRTADGSEFESPKKKAKVE

SEQ ID NO: 1877 - protein, 2097 aa, synthetic construct
MPAAKRVKLDGGDKKYSIGLDIGTNSVGWAVITDEYKVPSKKFKVLGNTDRHSIKKNLIGALLFDSGETAEATRLKRTARRRYTRRKNRICYLQEIFSNEMAKVDDSFFHRLEESFLVEEDKKHERHPIFGNIVDEVAYHEKYPTIYHLRKKLVDSTDKADLRLIYLALAHMIKFRGHFLIEGDLNPDNSDVDKLFIQLVQTYNQLFEENPINASGVDAKAILSARLSKSRRLENLIAQLPGEKKNGLFGNLIALSLGLTPNFKSNFDLAEDAKLQLSKDTYDDDLDNLLAQIGDQYADLFLAAKNLSDAILLSDILRVNTEITKAPLSASMIKRYDEHHQDLTLLKALVRQQLPEKYKEIFFDQSKNGYAGYIDGGASQEEFYKFIKPILEKMDGTEELLVKLNREDLLRKQRTFDNGSIPHQIHLGELHAILRRQEDFYPFLKDNREKIEKILTFRIPYYVGPLARGNSRFAWMTRKSEETITPWNFEEVVDKGASAQSFIERMTNFDKNLPNEKVLPKHSLLYEYFTVYNELTKVKYVTEGMRKPAFLSGEQKKAIVDLLFKTNRKVTVKQLKEDYFKKIECFDSVEISGVEDRFNASLGTYHDLLKIIKDKDFLDNEENEDILEDIVLTLTLFEDREMIEERLKTYAHLFDDKVMKQLKRRRYTGWGRLSRKLINGIRDKQSGKTILDFLKSDGFANRNFMQLIHDDSLTFKEDIQKAQVSGQGDSLHEHIANLAGSPAIKKGILQTVKVVDELVKVMGRHKPENIVIEMARENQTTQKGQKNSRERMKRIEEGIKELGSQILKEHPVENTQLQNEKLYLYYLQNGRDMYVDQELDINRLSDYDVDHIVPQSFLKDDSIDNKVLTRSDKARGKSDNVPSEEVVKKMKNYWRQLLNAKLITQRKFDNLTKAERGGLSELDKAGFIKRQLVETRQITKHVAQILDSRMNTKYDENDKLIREVKVITLKSKLVSDFRKDFQFYKVREINNYHHAHDAYLNAVVGTALIKKYPKLESEFVYGDYKVYDVRKMIAKSEQEIGKATAKYFFYSNIMNFFKTEITLANGEIRKRPLIETNGETGEIVWDKGRDFATVRKVLSMPQVNIVKKTEVQTGGFSKESILPKRNSDKLIARKKDWDPKKYGGFDSPTVAYSVLVVAKVEKGKSKKLKSVKELLGITIMERSSFEKNPIDFLEAKGYKEVKKDLIIKLPKYSLFELENGRKRMLASAGELQKGNELALPSKYVNFLYLASHYEKLKGSPEDNEQKQLFVEQHKHYLDEIIEQISEFSKRVILADANLDKVLSAYNKHRDKPIREQAENIIHLFTLTNLGAPAAFKYFDTTIDRKRYTSTKEVLDATLIHQSITGLYETRIDLSQLGGDGGGSSGSSGSSGSSGGTLNLEDEYRLYETSAEPEVSPGSTWLSDFPQAWAETGGMGLAVRQAPLIIPLKATSTPVSIKQYPMSQEAKLGIKPHIQRLLDQGILVPCQSPWNTPLLPVKKPGTNDYRPVQDLREVNKRVEDIHPTVPNPYNLLSGLPPSHRWYTVLDLKDAFFCLRLHPTSQPLFAFEWRDPGMGISGQLTWTRLPQGFKNSPTLFNEALHRDLADFRIQHPDLILLQYVDDILLAATSELDCQQGTRALLLTLGNLGYRASAKKAQLCQKQVKYLGYLLKEGQRWLTEARKETVMGQPTPKTPRQLREFLGKAGFCRLFIPGFAEMAAPLYPLTKPGTLFNWGPDQQKAYQEIKQALLTAPALGLPDLTKPFELFVDEKQGYAKGVLTQKLGPWRRPVAYLSKKLDPVAAGWPPCLRMVAAIAVLRKDAGKLTMGQPLVILAPHAVEALVKQPPDRWLSNARMTHYQAMLLDTDRVQFGPVVALNPATLLPLPEEGAPHDCLEILAETHGTRPDLTDQPIPDADHTWYTDGSSFLQEGQRKAGAAVTTETEVIWARALPAGTSAQRAELIALTQALKMAEGKRLNVYTDSRYAFATAHIHGEIYRRRGWLTSEGREIKNKSEILALLKALFLPKRLSIIHCLGHQKGDSAEARGNRLADQAAREAAIKTPPDTSTLLAGKRTADGSEFEKRTADGSEFESPKKKAKVE

SEQ ID NO: 1878 - protein, 2096 aa, synthetic construct
MPAAKRVKLDGGDKKYSIGLDIGTNSVGWAVITDEYKVPSKKFKVLGNTDRHSIKKNLIGALLFDSGETAEATRLKRTARRRYTRRKNRICYLQEIFSNEMAKVDDSFFHRLEESFLVEEDKKHERHPIFGNIVDEVAYHEKYPTIYHLRKKLVDSTDKADLRLIYLALAHMIKFRGHFLIEGDLNPDNSDVDKLFIQLVQTYNQLFEENPINASGVDAKAILSARLSKSRRLENLIAQLPGEKKNGLFGNLIALSLGLTPNFKSNFDLAEDAKLQLSKDTYDDDLDNLLAQIGDQYADLFLAAKNLSDAILLSDILRVNTEITKAPLSASMIKRYDEHHQDLTLLKALVRQQLPEKYKEIFFDQSKNGYAGYIDGGASQEEFYKFIKPILEKMDGTEELLVKLNREDLLRKQRTFDNGSIPHQIHLGELHAILRRQEDFYPFLKDNREKIEKILTFRIPYYVGPLARGNSRFAWMTRKSEETITPWNFEEVVDKGASAQSFIERMTNFDKNLPNEKVLPKHSLLYEYFTVYNELTKVKYVTEGMRKPAFLSGEQKKAIVDLLFKTNRKVTVKQLKEDYFKKIECFDSVEISGVEDRFNASLGTYHDLLKIIKDKDFLDNEENEDILEDIVLTLTLFEDREMIEERLKTYAHLFDDKVMKQLKRRRYTGWGRLSRKLINGIRDKQSGKTILDFLKSDGFANRNFMQLIHDDSLTFKEDIQKAQVSGQGDSLHEHIANLAGSPAIKKGILQTVKVVDELVKVMGRHKPENIVIEMARENQTTQKGQKNSRERMKRIEEGIKELGSQILKEHPVENTQLQNEKLYLYYLQNGRDMYVDQELDINRLSDYDVDHIVPQSFLKDDSIDNKVLTRSDKARGKSDNVPSEEVVKKMKNYWRQLLNAKLITQRKFDNLTKAERGGLSELDKAGFIKRQLVETRQITKHVAQILDSRMNTKYDENDKLIREVKVITLKSKLVSDFRKDFQFYKVREINNYHHAHDAYLNAVVGTALIKKYPKLESEFVYGDYKVYDVRKMIAKSEQEIGKATAKYFFYSNIMNFFKTEITLANGEIRKRPLIETNGETGEIVWDKGRDFATVRKVLSMPQVNIVKKTEVQTGGFSKESILPKRNSDKLIARKKDWDPKKYGGFDSPTVAYSVLVVAKVEKGKSKKLKSVKELLGITIMERSSFEKNPIDFLEAKGYKEVKKDLIIKLPKYSLFELENGRKRMLASAGELQKGNELALPSKYVNFLYLASHYEKLKGSPEDNEQKQLFVEQHKHYLDEIIEQISEFSKRVILADANLDKVLSAYNKHRDKPIREQAENIIHLFTLTNLGAPAAFKYFDTTIDRKRYTSTKEVLDATLIHQSITGLYETRIDLSQLGGDGGGGGEAAAKGSSGGTLNLEDEYRLYETSAEPEVSPGSTWLSDFPQAWAETGGMGLAVRQAPLIIPLKATSTPVSIKQYPMSQEAKLGIKPHIQRLLDQGILVPCQSPWNTPLLPVKKPGTNDYRPVQDLREVNKRVEDIHPTVPNPYNLLSGLPPSHRWYTVLDLKDAFFCLRLHPTSQPLFAFEWRDPGMGISGQLTWTRLPQGFKNSPTLFNEALHRDLADFRIQHPDLILLQYVDDILLAATSELDCQQGTRALLLTLGNLGYRASAKKAQLCQKQVKYLGYLLKEGQRWLTEARKETVMGQPTPKTPRQLREFLGKAGFCRLFIPGFAEMAAPLYPLTKPGTLFNWGPDQQKAYQEIKQALLTAPALGLPDLTKPFELFVDEKQGYAKGVLTQKLGPWRRPVAYLSKKLDPVAAGWPPCLRMVAAIAVLRKDAGKLTMGQPLVILAPHAVEALVKQPPDRWLSNARMTHYQAMLLDTDRVQFGPVVALNPATLLPLPEEGAPHDCLEILAETHGTRPDLTDQPIPDADHTWYTDGSSFLQEGQRKAGAAVTTETEVIWARALPAGTSAQRAELIALTQALKMAEGKRLNVYTDSRYAFATAHIHGEIYRRRGWLTSEGREIKNKSEILALLKALFLPKRLSIIHCLGHQKGDSAEARGNRLADQAAREAAIKTPPDTSTLLAGKRTADGSEFEKRTADGSEFESPKKKAKVE

SEQ ID NO: 1879 - protein, 2100 aa, synthetic construct
MPAAKRVKLDGGDKKYSIGLDIGTNSVGWAVITDEYKVPSKKFKVLGNTDRHSIKKNLIGALLFDSGETAEATRLKRTARRRYTRRKNRICYLQEIFSNEMAKVDDSFFHRLEESFLVEEDKKHERHPIFGNIVDEVAYHEKYPTIYHLRKKLVDSTDKADLRLIYLALAHMIKFRGHFLIEGDLNPDNSDVDKLFIQLVQTYNQLFEENPINASGVDAKAILSARLSKSRRLENLIAQLPGEKKNGLFGNLIALSLGLTPNFKSNFDLAEDAKLQLSKDTYDDDLDNLLAQIGDQYADLFLAAKNLSDAILLSDILRVNTEITKAPLSASMIKRYDEHHQDLTLLKALVRQQLPEKYKEIFFDQSKNGYAGYIDGGASQEEFYKFIKPILEKMDGTEELLVKLNREDLLRKQRTFDNGSIPHQIHLGELHAILRRQEDFYPFLKDNREKIEKILTFRIPYYVGPLARGNSRFAWMTRKSEETITPWNFEEVVDKGASAQSFIERMTNFDKNLPNEKVLPKHSLLYEYFTVYNELTKVKYVTEGMRKPAFLSGEQKKAIVDLLFKTNRKVTVKQLKEDYFKKIECFDSVEISGVEDRFNASLGTYHDLLKIIKDKDFLDNEENEDILEDIVLTLTLFEDREMIEERLKTYAHLFDDKVMKQLKRRRYTGWGRLSRKLINGIRDKQSGKTILDFLKSDGFANRNFMQLIHDDSLTFKEDIQKAQVSGQGDSLHEHIANLAGSPAIKKGILQTVKVVDELVKVMGRHKPENIVIEMARENQTTQKGQKNSRERMKRIEEGIKELGSQILKEHPVENTQLQNEKLYLYYLQNGRDMYVDQELDINRLSDYDVDHIVPQSFLKDDSIDNKVLTRSDKARGKSDNVPSEEVVKKMKNYWRQLLNAKLITQRKFDNLTKAERGGLSELDKAGFIKRQLVETRQITKHVAQILDSRMNTKYDENDKLIREVKVITLKSKLVSDFRKDFQFYKVREINNYHHAHDAYLNAVVGTALIKKYPKLESEFVYGDYKVYDVRKMIAKSEQEIGKATAKYFFYSNIMNFFKTEITLANGEIRKRPLIETNGETGEIVWDKGRDFATVRKVLSMPQVNIVKKTEVQTGGFSKESILPKRNSDKLIARKKDWDPKKYGGFDSPTVAYSVLVVAKVEKGKSKKLKSVKELLGITIMERSSFEKNPIDFLEAKGYKEVKKDLIIKLPKYSLFELENGRKRMLASAGELQKGNELALPSKYVNFLYLASHYEKLKGSPEDNEQKQLFVEQHKHYLDEIIEQISEFSKRVILADANLDKVLSAYNKHRDKPIREQAENIIHLFTLTNLGAPAAFKYFDTTIDRKRYTSTKEVLDATLIHQSITGLYETRIDLSQLGGDGGEAAAKEAAAKEAAAKGGTLNLEDEYRLYETSAEPEVSPGSTWLSDFPQAWAETGGMGLAVRQAPLIIPLKATSTPVSIKQYPMSQEAKLGIKPHIQRLLDQGILVPCQSPWNTPLLPVKKPGTNDYRPVQDLREVNKRVEDIHPTVPNPYNLLSGLPPSHRWYTVLDLKDAFFCLRLHPTSQPLFAFEWRDPGMGISGQLTWTRLPQGFKNSPTLFNEALHRDLADFRIQHPDLILLQYVDDILLAATSELDCQQGTRALLLTLGNLGYRASAKKAQLCQKQVKYLGYLLKEGQRWLTEARKETVMGQPTPKTPRQLREFLGKAGFCRLFIPGFAEMAAPLYPLTKPGTLFNWGPDQQKAYQEIKQALLTAPALGLPDLTKPFELFVDEKQGYAKGVLTQKLGPWRRPVAYLSKKLDPVAAGWPPCLRMVAAIAVLRKDAGKLTMGQPLVILAPHAVEALVKQPPDRWLSNARMTHYQAMLLDTDRVQFGPVVALNPATLLPLPEEGAPHDCLEILAETHGTRPDLTDQPIPDADHTWYTDGSSFLQEGQRKAGAAVTTETEVIWARALPAGTSAQRAELIALTQALKMAEGKRLNVYTDSRYAFATAHIHGEIYRRRGWLTSEGREIKNKSEILALLKALFLPKRLSIIHCLGHQKGDSAEARGNRLADQAAREAAIKTPPDTSTLLAGKRTADGSEFEKRTADGSEFESPKKKAKVE

SEQ ID NO: 1880 - protein, 2103 aa, synthetic construct
MPAAKRVKLDGGDKKYSIGLDIGTNSVGWAVITDEYKVPSKKFKVLGNTDRHSIKKNLIGALLFDSGETAEATRLKRTARRRYTRRKNRICYLQEIFSNEMAKVDDSFFHRLEESFLVEEDKKHERHPIFGNIVDEVAYHEKYPTIYHLRKKLVDSTDKADLRLIYLALAHMIKFRGHFLIEGDLNPDNSDVDKLFIQLVQTYNQLFEENPINASGVDAKAILSARLSKSRRLENLIAQLPGEKKNGLFGNLIALSLGLTPNFKSNFDLAEDAKLQLSKDTYDDDLDNLLAQIGDQYADLFLAAKNLSDAILLSDILRVNTEITKAPLSASMIKRYDEHHQDLTLLKALVRQQLPEKYKEIFFDQSKNGYAGYIDGGASQEEFYKFIKPILEKMDGTEELLVKLNREDLLRKQRTFDNGSIPHQIHLGELHAILRRQEDFYPFLKDNREKIEKILTFRIPYYVGPLARGNSRFAWMTRKSEETITPWNFEEVVDKGASAQSFIERMTNFDKNLPNEKVLPKHSLLYEYFTVYNELTKVKYVTEGMRKPAFLSGEQKKAIVDLLFKTNRKVTVKQLKEDYFKKIECFDSVEISGVEDRFNASLGTYHDLLKIIKDKDFLDNEENEDILEDIVLTLTLFEDREMIEERLKTYAHLFDDKVMKQLKRRRYTGWGRLSRKLINGIRDKQSGKTILDFLKSDGFANRNFMQLIHDDSLTFKEDIQKAQVSGQGDSLHEHIANLAGSPAIKKGILQTVKVVDELVKVMGRHKPENIVIEMARENQTTQKGQKNSRERMKRIEEGIKELGSQILKEHPVENTQLQNEKLYLYYLQNGRDMYVDQELDINRLSDYDVDHIVPQSFLKDDSIDNKVLTRSDKARGKSDNVPSEEVVKKMKNYWRQLLNAKLITQRKFDNLTKAERGGLSELDKAGFIKRQLVETRQITKHVAQILDSRMNTKYDENDKLIREVKVITLKSKLVSDFRKDFQFYKVREINNYHHAHDAYLNAVVGTALIKKYPKLESEFVYGDYKVYDVRKMIAKSEQEIGKATAKYFFYSNIMNFFKTEITLANGEIRKRPLIETNGETGEIVWDKGRDFATVRKVLSMPQVNIVKKTEVQTGGFSKESILPKRNSDKLIARKKDWDPKKYGGFDSPTVAYSVLVVAKVEKGKSKKLKSVKELLGITIMERSSFEKNPIDFLEAKGYKEVKKDLIIKLPKYSLFELENGRKRMLASAGELQKGNELALPSKYVNFLYLASHYEKLKGSPEDNEQKQLFVEQHKHYLDEIIEQISEFSKRVILADANLDKVLSAYNKHRDKPIREQAENIIHLFTLTNLGAPAAFKYFDTTIDRKRYTSTKEVLDATLIHQSITGLYETRIDLSQLGGDGGGGSGGSGGSGGSGGSGGSGGTLNLEDEYRLYETSAEPEVSPGSTWLSDFPQAWAETGGMGLAVRQAPLIIPLKATSTPVSIKQYPMSQEAKLGIKPHIQRLLDQGILVPCQSPWNTPLLPVKKPGTNDYRPVQDLREVNKRVEDIHPTVPNPYNLLSGLPPSHRWYTVLDLKDAFFCLRLHPTSQPLFAFEWRDPGMGISGQLTWTRLPQGFKNSPTLFNEALHRDLADFRIQHPDLILLQYVDDILLAATSELDCQQGTRALLLTLGNLGYRASAKKAQLCQKQVKYLGYLLKEGQRWLTEARKETVMGQPTPKTPRQLREFLGKAGFCRLFIPGFAEMAAPLYPLTKPGTLFNWGPDQQKAYQEIKQALLTAPALGLPDLTKPFELFVDEKQGYAKGVLTQKLGPWRRPVAYLSKKLDPVAAGWPPCLRMVAAIAVLRKDAGKLTMGQPLVILAPHAVEALVKQPPDRWLSNARMTHYQAMLLDTDRVQFGPVVALNPATLLPLPEEGAPHDCLEILAETHGTRPDLTDQPIPDADHTWYTDGSSFLQEGQRKAGAAVTTETEVIWARALPAGTSAQRAELIALTQALKMAEGKRLNVYTDSRYAFATAHIHGEIYRRRGWLTSEGREIKNKSEILALLKALFLPKRLSIIHCLGHQKGDSAEARGNRLADQAAREAAIKTPPDTSTLLAGKRTADGSEFEKRTADGSEFESPKKKAKVE

SEQ ID NO: 1881 - protein, 2094 aa, synthetic construct
MPAAKRVKLDGGDKKYSIGLDIGTNSVGWAVITDEYKVPSKKFKVLGNTDRHSIKKNLIGALLFDSGETAEATRLKRTARRRYTRRKNRICYLQEIFSNEMAKVDDSFFHRLEESFLVEEDKKHERHPIFGNIVDEVAYHEKYPTIYHLRKKLVDSTDKADLRLIYLALAHMIKFRGHFLIEGDLNPDNSDVDKLFIQLVQTYNQLFEENPINASGVDAKAILSARLSKSRRLENLIAQLPGEKKNGLFGNLIALSLGLTPNFKSNFDLAEDAKLQLSKDTYDDDLDNLLAQIGDQYADLFLAAKNLSDAILLSDILRVNTEITKAPLSASMIKRYDEHHQDLTLLKALVRQQLPEKYKEIFFDQSKNGYAGYIDGGASQEEFYKFIKPILEKMDGTEELLVKLNREDLLRKQRTFDNGSIPHQIHLGELHAILRRQEDFYPFLKDNREKIEKILTFRIPYYVGPLARGNSRFAWMTRKSEETITPWNFEEVVDKGASAQSFIERMTNFDKNLPNEKVLPKHSLLYEYFTVYNELTKVKYVTEGMRKPAFLSGEQKKAIVDLLFKTNRKVTVKQLKEDYFKKIECFDSVEISGVEDRFNASLGTYHDLLKIIKDKDFLDNEENEDILEDIVLTLTLFEDREMIEERLKTYAHLFDDKVMKQLKRRRYTGWGRLSRKLINGIRDKQSGKTILDFLKSDGFANRNFMQLIHDDSLTFKEDIQKAQVSGQGDSLHEHIANLAGSPAIKKGILQTVKVVDELVKVMGRHKPENIVIEMARENQTTQKGQKNSRERMKRIEEGIKELGSQILKEHPVENTQLQNEKLYLYYLQNGRDMYVDQELDINRLSDYDVDHIVPQSFLKDDSIDNKVLTRSDKARGKSDNVPSEEVVKKMKNYWRQLLNAKLITQRKFDNLTKAERGGLSELDKAGFIKRQLVETRQITKHVAQILDSRMNTKYDENDKLIREVKVITLKSKLVSDFRKDFQFYKVREINNYHHAHDAYLNAVVGTALIKKYPKLESEFVYGDYKVYDVRKMIAKSEQEIGKATAKYFFYSNIMNFFKTEITLANGEIRKRPLIETNGETGEIVWDKGRDFATVRKVLSMPQVNIVKKTEVQTGGFSKESILPKRNSDKLIARKKDWDPKKYGGFDSPTVAYSVLVVAKVEKGKSKKLKSVKELLGITIMERSSFEKNPIDFLEAKGYKEVKKDLIIKLPKYSLFELENGRKRMLASAGELQKGNELALPSKYVNFLYLASHYEKLKGSPEDNEQKQLFVEQHKHYLDEIIEQISEFSKRVILADANLDKVLSAYNKHRDKPIREQAENIIHLFTLTNLGAPAAFKYFDTTIDRKRYTSTKEVLDATLIHQSITGLYETRIDLSQLGGDGGPAPAPAPAPGGTLNLEDEYRLYETSAEPEVSPGSTWLSDFPQAWAETGGMGLAVRQAPLIIPLKATSTPVSIKQYPMSQEAKLGIKPHIQRLLDQGILVPCQSPWNTPLLPVKKPGTNDYRPVQDLREVNKRVEDIHPTVPNPYNLLSGLPPSHRWYTVLDLKDAFFCLRLHPTSQPLFAFEWRDPGMGISGQLTWTRLPQGFKNSPTLFNEALHRDLADFRIQHPDLILLQYVDDILLAATSELDCQQGTRALLLTLGNLGYRASAKKAQLCQKQVKYLGYLLKEGQRWLTEARKETVMGQPTPKTPRQLREFLGKAGFCRLFIPGFAEMAAPLYPLTKPGTLFNWGPDQQKAYQEIKQALLTAPALGLPDLTKPFELFVDEKQGYAKGVLTQKLGPWRRPVAYLSKKLDPVAAGWPPCLRMVAAIAVLRKDAGKLTMGQPLVILAPHAVEALVKQPPDRWLSNARMTHYQAMLLDTDRVQFGPVVALNPATLLPLPEEGAPHDCLEILAETHGTRPDLTDQPIPDADHTWYTDGSSFLQEGQRKAGAAVTTETEVIWARALPAGTSAQRAELIALTQALKMAEGKRLNVYTDSRYAFATAHIHGEIYRRRGWLTSEGREIKNKSEILALLKALFLPKRLSIIHCLGHQKGDSAEARGNRLADQAAREAAIKTPPDTSTLLAGKRTADGSEFEKRTADGSEFESPKKKAKVE

SEQ ID NO: 1882 - protein, 2093 aa, synthetic construct
MPAAKRVKLDGGDKKYSIGLDIGTNSVGWAVITDEYKVPSKKFKVLGNTDRHSIKKNLIGALLFDSGETAEATRLKRTARRRYTRRKNRICYLQEIFSNEMAKVDDSFFHRLEESFLVEEDKKHERHPIFGNIVDEVAYHEKYPTIYHLRKKLVDSTDKADLRLIYLALAHMIKFRGHFLIEGDLNPDNSDVDKLFIQLVQTYNQLFEENPINASGVDAKAILSARLSKSRRLENLIAQLPGEKKNGLFGNLIALSLGLTPNFKSNFDLAEDAKLQLSKDTYDDDLDNLLAQIGDQYADLFLAAKNLSDAILLSDILRVNTEITKAPLSASMIKRYDEHHQDLTLLKALVRQQLPEKYKEIFFDQSKNGYAGYIDGGASQEEFYKFIKPILEKMDGTEELLVKLNREDLLRKQRTFDNGSIPHQIHLGELHAILRRQEDFYPFLKDNREKIEKILTFRIPYYVGPLARGNSRFAWMTRKSEETITPWNFEEVVDKGASAQSFIERMTNFDKNLPNEKVLPKHSLLYEYFTVYNELTKVKYVTEGMRKPAFLSGEQKKAIVDLLFKTNRKVTVKQLKEDYFKKIECFDSVEISGVEDRFNASLGTYHDLLKIIKDKDFLDNEENEDILEDIVLTLTLFEDREMIEERLKTYAHLFDDKVMKQLKRRRYTGWGRLSRKLINGIRDKQSGKTILDFLKSDGFANRNFMQLIHDDSLTFKEDIQKAQVSGQGDSLHEHIANLAGSPAIKKGILQTVKVVDELVKVMGRHKPENIVIEMARENQTTQKGQKNSRERMKRIEEGIKELGSQILKEHPVENTQLQNEKLYLYYLQNGRDMYVDQELDINRLSDYDVDHIVPQSFLKDDSIDNKVLTRSDKARGKSDNVPSEEVVKKMKNYWRQLLNAKLITQRKFDNLTKAERGGLSELDKAGFIKRQLVETRQITKHVAQILDSRMNTKYDENDKLIREVKVITLKSKLVSDFRKDFQFYKVREINNYHHAHDAYLNAVVGTALIKKYPKLESEFVYGDYKVYDVRKMIAKSEQEIGKATAKYFFYSNIMNFFKTEITLANGEIRKRPLIETNGETGEIVWDKGRDFATVRKVLSMPQVNIVKKTEVQTGGFSKESILPKRNSDKLIARKKDWDPKKYGGFDSPTVAYSVLVVAKVEKGKSKKLKSVKELLGITIMERSSFEKNPIDFLEAKGYKEVKKDLIIKLPKYSLFELENGRKRMLASAGELQKGNELALPSKYVNFLYLASHYEKLKGSPEDNEQKQLFVEQHKHYLDEIIEQISEFSKRVILADANLDKVLSAYNKHRDKPIREQAENIIHLFTLTNLGAPAAFKYFDTTIDRKRYTSTKEVLDATLIHQSITGLYETRIDLSQLGGDGGEAAAKGGSGGTLNLEDEYRLYETSAEPEVSPGSTWLSDFPQAWAETGGMGLAVRQAPLIIPLKATSTPVSIKQYPMSQEAKLGIKPHIQRLLDQGILVPCQSPWNTPLLPVKKPGTNDYRPVQDLREVNKRVEDIHPTVPNPYNLLSGLPPSHRWYTVLDLKDAFFCLRLHPTSQPLFAFEWRDPGMGISGQLTWTRLPQGFKNSPTLFNEALHRDLADFRIQHPDLILLQYVDDILLAATSELDCQQGTRALLLTLGNLGYRASAKKAQLCQKQVKYLGYLLKEGQRWLTEARKETVMGQPTPKTPRQLREFLGKAGFCRLFIPGFAEMAAPLYPLTKPGTLFNWGPDQQKAYQEIKQALLTAPALGLPDLTKPFELFVDEKQGYAKGVLTQKLGPWRRPVAYLSKKLDPVAAGWPPCLRMVAAIAVLRKDAGKLTMGQPLVILAPHAVEALVKQPPDRWLSNARMTHYQAMLLDTDRVQFGPVVALNPATLLPLPEEGAPHDCLEILAETHGTRPDLTDQPIPDADHTWYTDGSSFLQEGQRKAGAAVTTETEVIWARALPAGTSAQRAELIALTQALKMAEGKRLNVYTDSRYAFATAHIHGEIYRRRGWLTSEGREIKNKSEILALLKALFLPKRLSIIHCLGHQKGDSAEARGNRLADQAAREAAIKTPPDTSTLLAGKRTADGSEFEKRTADGSEFESPKKKAKVE

SEQ ID NO: 1883 - protein, 2094 aa, synthetic construct
MPAAKRVKLDGGDKKYSIGLDIGTNSVGWAVITDEYKVPSKKFKVLGNTDRHSIKKNLIGALLFDSGETAEATRLKRTARRRYTRRKNRICYLQEIFSNEMAKVDDSFFHRLEESFLVEEDKKHERHPIFGNIVDEVAYHEKYPTIYHLRKKLVDSTDKADLRLIYLALAHMIKFRGHFLIEGDLNPDNSDVDKLFIQLVQTYNQLFEENPINASGVDAKAILSARLSKSRRLENLIAQLPGEKKNGLFGNLIALSLGLTPNFKSNFDLAEDAKLQLSKDTYDDDLDNLLAQIGDQYADLFLAAKNLSDAILLSDILRVNTEITKAPLSASMIKRYDEHHQDLTLLKALVRQQLPEKYKEIFFDQSKNGYAGYIDGGASQEEFYKFIKPILEKMDGTEELLVKLNREDLLRKQRTFDNGSIPHQIHLGELHAILRRQEDFYPFLKDNREKIEKILTFRIPYYVGPLARGNSRFAWMTRKSEETITPWNFEEVVDKGASAQSFIERMTNFDKNLPNEKVLPKHSLLYEYFTVYNELTKVKYVTEGMRKPAFLSGEQKKAIVDLLFKTNRKVTVKQLKEDYFKKIECFDSVEISGVEDRFNASLGTYHDLLKIIKDKDFLDNEENEDILEDIVLTLTLFEDREMIEERLKTYAHLFDDKVMKQLKRRRYTGWGRLSRKLINGIRDKQSGKTILDFLKSDGFANRNFMQLIHDDSLTFKEDIQKAQVSGQGDSLHEHIANLAGSPAIKKGILQTVKVVDELVKVMGRHKPENIVIEMARENQTTQKGQKNSRERMKRIEEGIKELGSQILKEHPVENTQLQNEKLYLYYLQNGRDMYVDQELDINRLSDYDVDHIVPQSFLKDDSIDNKVLTRSDKARGKSDNVPSEEVVKKMKNYWRQLLNAKLITQRKFDNLTKAERGGLSELDKAGFIKRQLVETRQITKHVAQILDSRMNTKYDENDKLIREVKVITLKSKLVSDFRKDFQFYKVREINNYHHAHDAYLNAVVGTALIKKYPKLESEFVYGDYKVYDVRKMIAKSEQEIGKATAKYFFYSNIMNFFKTEITLANGEIRKRPLIETNGETGEIVWDKGRDFATVRKVLSMPQVNIVKKTEVQTGGFSKESILPKRNSDKLIARKKDWDPKKYGGFDSPTVAYSVLVVAKVEKGKSKKLKSVKELLGITIMERSSFEKNPIDFLEAKGYKEVKKDLIIKLPKYSLFELENGRKRMLASAGELQKGNELALPSKYVNFLYLASHYEKLKGSPEDNEQKQLFVEQHKHYLDEIIEQISEFSKRVILADANLDKVLSAYNKHRDKPIREQAENIIHLFTLTNLGAPAAFKYFDTTIDRKRYTSTKEVLDATLIHQSITGLYETRIDLSQLGGDGGPAPGSSGGSGGTLNLEDEYRLYETSAEPEVSPGSTWLSDFPQAWAETGGMGLAVRQAPLIIPLKATSTPVSIKQYPMSQEAKLGIKPHIQRLLDQGILVPCQSPWNTPLLPVKKPGTNDYRPVQDLREVNKRVEDIHPTVPNPYNLLSGLPPSHRWYTVLDLKDAFFCLRLHPTSQPLFAFEWRDPGMGISGQLTWTRLPQGFKNSPTLFNEALHRDLADFRIQHPDLILLQYVDDILLAATSELDCQQGTRALLLTLGNLGYRASAKKAQLCQKQVKYLGYLLKEGQRWLTEARKETVMGQPTPKTPRQLREFLGKAGFCRLFIPGFAEMAAPLYPLTKPGTLFNWGPDQQKAYQEIKQALLTAPALGLPDLTKPFELFVDEKQGYAKGVLTQKLGPWRRPVAYLSKKLDPVAAGWPPCLRMVAAIAVLRKDAGKLTMGQPLVILAPHAVEALVKQPPDRWLSNARMTHYQAMLLDTDRVQFGPVVALNPATLLPLPEEGAPHDCLEILAETHGTRPDLTDQPIPDADHTWYTDGSSFLQEGQRKAGAAVTTETEVIWARALPAGTSAQRAELIALTQALKMAEGKRLNVYTDSRYAFATAHIHGEIYRRRGWLTSEGREIKNKSEILALLKALFLPKRLSIIHCLGHQKGDSAEARGNRLADQAAREAAIKTPPDTSTLLAGKRTADGSEFEKRTADGSEFESPKKKAKVE

SEQ ID NO: 1884 - protein, 2094 aa, synthetic construct
MPAAKRVKLDGGDKKYSIGLDIGTNSVGWAVITDEYKVPSKKFKVLGNTDRHSIKKNLIGALLFDSGETAEATRLKRTARRRYTRRKNRICYLQEIFSNEMAKVDDSFFHRLEESFLVEEDKKHERHPIFGNIVDEVAYHEKYPTIYHLRKKLVDSTDKADLRLIYLALAHMIKFRGHFLIEGDLNPDNSDVDKLFIQLVQTYNQLFEENPINASGVDAKAILSARLSKSRRLENLIAQLPGEKKNGLFGNLIALSLGLTPNFKSNFDLAEDAKLQLSKDTYDDDLDNLLAQIGDQYADLFLAAKNLSDAILLSDILRVNTEITKAPLSASMIKRYDEHHQDLTLLKALVRQQLPEKYKEIFFDQSKNGYAGYIDGGASQEEFYKFIKPILEKMDGTEELLVKLNREDLLRKQRTFDNGSIPHQIHLGELHAILRRQEDFYPFLKDNREKIEKILTFRIPYYVGPLARGNSRFAWMTRKSEETITPWNFEEVVDKGASAQSFIERMTNFDKNLPNEKVLPKHSLLYEYFTVYNELTKVKYVTEGMRKPAFLSGEQKKAIVDLLFKTNRKVTVKQLKEDYFKKIECFDSVEISGVEDRFNASLGTYHDLLKIIKDKDFLDNEENEDILEDIVLTLTLFEDREMIEERLKTYAHLFDDKVMKQLKRRRYTGWGRLSRKLINGIRDKQSGKTILDFLKSDGFANRNFMQLIHDDSLTFKEDIQKAQVSGQGDSLHEHIANLAGSPAIKKGILQTVKVVDELVKVMGRHKPENIVIEMARENQTTQKGQKNSRERMKRIEEGIKELGSQILKEHPVENTQLQNEKLYLYYLQNGRDMYVDQELDINRLSDYDVDHIVPQSFLKDDSIDNKVLTRSDKARGKSDNVPSEEVVKKMKNYWRQLLNAKLITQRKFDNLTKAERGGLSELDKAGFIKRQLVETRQITKHVAQILDSRMNTKYDENDKLIREVKVITLKSKLVSDFRKDFQFYKVREINNYHHAHDAYLNAVVGTALIKKYPKLESEFVYGDYKVYDVRKMIAKSEQEIGKATAKYFFYSNIMNFFKTEITLANGEIRKRPLIETNGETGEIVWDKGRDFATVRKVLSMPQVNIVKKTEVQTGGFSKESILPKRNSDKLIARKKDWDPKKYGGFDSPTVAYSVLVVAKVEKGKSKKLKSVKELLGITIMERSSFEKNPIDFLEAKGYKEVKKDLIIKLPKYSLFELENGRKRMLASAGELQKGNELALPSKYVNFLYLASHYEKLKGSPEDNEQKQLFVEQHKHYLDEIIEQISEFSKRVILADANLDKVLSAYNKHRDKPIREQAENIIHLFTLTNLGAPAAFKYFDTTIDRKRYTSTKEVLDATLIHQSITGLYETRIDLSQLGGDGGGGGGSSGGSGGTLNLEDEYRLYETSAEPEVSPGSTWLSDFPQAWAETGGMGLAVRQAPLIIPLKATSTPVSIKQYPMSQEAKLGIKPHIQRLLDQGILVPCQSPWNTPLLPVKKPGTNDYRPVQDLREVNKRVEDIHPTVPNPYNLLSGLPPSHRWYTVLDLKDAFFCLRLHPTSQPLFAFEWRDPGMGISGQLTWTRLPQGFKNSPTLFNEALHRDLADFRIQHPDLILLQYVDDILLAATSELDCQQGTRALLLTLGNLGYRASAKKAQLCQKQVKYLGYLLKEGQRWLTEARKETVMGQPTPKTPRQLREFLGKAGFCRLFIPGFAEMAAPLYPLTKPGTLFNWGPDQQKAYQEIKQALLTAPALGLPDLTKPFELFVDEKQGYAKGVLTQKLGPWRRPVAYLSKKLDPVAAGWPPCLRMVAAIAVLRKDAGKLTMGQPLVILAPHAVEALVKQPPDRWLSNARMTHYQAMLLDTDRVQFGPVVALNPATLLPLPEEGAPHDCLEILAETHGTRPDLTDQPIPDADHTWYTDGSSFLQEGQRKAGAAVTTETEVIWARALPAGTSAQRAELIALTQALKMAEGKRLNVYTDSRYAFATAHIHGEIYRRRGWLTSEGREIKNKSEILALLKALFLPKRLSIIHCLGHQKGDSAEARGNRLADQAAREAAIKTPPDTSTLLAGKRTADGSEFEKRTADGSEFESPKKKAKVE

SEQ ID NO: 1885 - protein, 2090 aa, synthetic construct
MPAAKRVKLDGGDKKYSIGLDIGTNSVGWAVITDEYKVPSKKFKVLGNTDRHSIKKNLIGALLFDSGETAEATRLKRTARRRYTRRKNRICYLQEIFSNEMAKVDDSFFHRLEESFLVEEDKKHERHPIFGNIVDEVAYHEKYPTIYHLRKKLVDSTDKADLRLIYLALAHMIKFRGHFLIEGDLNPDNSDVDKLFIQLVQTYNQLFEENPINASGVDAKAILSARLSKSRRLENLIAQLPGEKKNGLFGNLIALSLGLTPNFKSNFDLAEDAKLQLSKDTYDDDLDNLLAQIGDQYADLFLAAKNLSDAILLSDILRVNTEITKAPLSASMIKRYDEHHQDLTLLKALVRQQLPEKYKEIFFDQSKNGYAGYIDGGASQEEFYKFIKPILEKMDGTEELLVKLNREDLLRKQRTFDNGSIPHQIHLGELHAILRRQEDFYPFLKDNREKIEKILTFRIPYYVGPLARGNSRFAWMTRKSEETITPWNFEEVVDKGASAQSFIERMTNFDKNLPNEKVLPKHSLLYEYFTVYNELTKVKYVTEGMRKPAFLSGEQKKAIVDLLFKTNRKVTVKQLKEDYFKKIECFDSVEISGVEDRFNASLGTYHDLLKIIKDKDFLDNEENEDILEDIVLTLTLFEDREMIEERLKTYAHLFDDKVMKQLKRRRYTGWGRLSRKLINGIRDKQSGKTILDFLKSDGFANRNFMQLIHDDSLTFKEDIQKAQVSGQGDSLHEHIANLAGSPAIKKGILQTVKVVDELVKVMGRHKPENIVIEMARENQTTQKGQKNSRERMKRIEEGIKELGSQILKEHPVENTQLQNEKLYLYYLQNGRDMYVDQELDINRLSDYDVDHIVPQSFLKDDSIDNKVLTRSDKARGKSDNVPSEEVVKKMKNYWRQLLNAKLITQRKFDNLTKAERGGLSELDKAGFIKRQLVETRQITKHVAQILDSRMNTKYDENDKLIREVKVITLKSKLVSDFRKDFQFYKVREINNYHHAHDAYLNAVVGTALIKKYPKLESEFVYGDYKVYDVRKMIAKSEQEIGKATAKYFFYSNIMNFFKTEITLANGEIRKRPLIETNGETGEIVWDKGRDFATVRKVLSMPQVNIVKKTEVQTGGFSKESILPKRNSDKLIARKKDWDPKKYGGFDSPTVAYSVLVVAKVEKGKSKKLKSVKELLGITIMERSSFEKNPIDFLEAKGYKEVKKDLIIKLPKYSLFELENGRKRMLASAGELQKGNELALPSKYVNFLYLASHYEKLKGSPEDNEQKQLFVEQHKHYLDEIIEQISEFSKRVILADANLDKVLSAYNKHRDKPIREQAENIIHLFTLTNLGAPAAFKYFDTTIDRKRYTSTKEVLDATLIHQSITGLYETRIDLSQLGGDGGGGGGSGGTLNLEDEYRLYETSAEPEVSPGSTWLSDFPQAWAETGGMGLAVRQAPLIIPLKATSTPVSIKQYPMSQEAKLGIKPHIQRLLDQGILVPCQSPWNTPLLPVKKPGTNDYRPVQDLREVNKRVEDIHPTVPNPYNLLSGLPPSHRWYTVLDLKDAFFCLRLHPTSQPLFAFEWRDPGMGISGQLTWTRLPQGFKNSPTLFNEALHRDLADFRIQHPDLILLQYVDDILLAATSELDCQQGTRALLLTLGNLGYRASAKKAQLCQKQVKYLGYLLKEGQRWLTEARKETVMGQPTPKTPRQLREFLGKAGFCRLFIPGFAEMAAPLYPLTKPGTLFNWGPDQQKAYQEIKQALLTAPALGLPDLTKPFELFVDEKQGYAKGVLTQKLGPWRRPVAYLSKKLDPVAAGWPPCLRMVAAIAVLRKDAGKLTMGQPLVILAPHAVEALVKQPPDRWLSNARMTHYQAMLLDTDRVQFGPVVALNPATLLPLPEEGAPHDCLEILAETHGTRPDLTDQPIPDADHTWYTDGSSFLQEGQRKAGAAVTTETEVIWARALPAGTSAQRAELIALTQALKMAEGKRLNVYTDSRYAFATAHIHGEIYRRRGWLTSEGREIKNKSEILALLKALFLPKRLSIIHCLGHQKGDSAEARGNRLADQAAREAAIKTPPDTSTLLAGKRTADGSEFEKRTADGSEFESPKKKAKVE

SEQ ID NO: 1886 - protein, 2096 aa, synthetic construct
MPAAKRVKLDGGDKKYSIGLDIGTNSVGWAVITDEYKVPSKKFKVLGNTDRHSIKKNLIGALLFDSGETAEATRLKRTARRRYTRRKNRICYLQEIFSNEMAKVDDSFFHRLEESFLVEEDKKHERHPIFGNIVDEVAYHEKYPTIYHLRKKLVDSTDKADLRLIYLALAHMIKFRGHFLIEGDLNPDNSDVDKLFIQLVQTYNQLFEENPINASGVDAKAILSARLSKSRRLENLIAQLPGEKKNGLFGNLIALSLGLTPNFKSNFDLAEDAKLQLSKDTYDDDLDNLLAQIGDQYADLFLAAKNLSDAILLSDILRVNTEITKAPLSASMIKRYDEHHQDLTLLKALVRQQLPEKYKEIFFDQSKNGYAGYIDGGASQEEFYKFIKPILEKMDGTEELLVKLNREDLLRKQRTFDNGSIPHQIHLGELHAILRRQEDFYPFLKDNREKIEKILTFRIPYYVGPLARGNSRFAWMTRKSEETITPWNFEEVVDKGASAQSFIERMTNFDKNLPNEKVLPKHSLLYEYFTVYNELTKVKYVTEGMRKPAFLSGEQKKAIVDLLFKTNRKVTVKQLKEDYFKKIECFDSVEISGVEDRFNASLGTYHDLLKIIKDKDFLDNEENEDILEDIVLTLTLFEDREMIEERLKTYAHLFDDKVMKQLKRRRYTGWGRLSRKLINGIRDKQSGKTILDFLKSDGFANRNFMQLIHDDSLTFKEDIQKAQVSGQGDSLHEHIANLAGSPAIKKGILQTVKVVDELVKVMGRHKPENIVIEMARENQTTQKGQKNSRERMKRIEEGIKELGSQILKEHPVENTQLQNEKLYLYYLQNGRDMYVDQELDINRLSDYDVDHIVPQSFLKDDSIDNKVLTRSDKARGKSDNVPSEEVVKKMKNYWRQLLNAKLITQRKFDNLTKAERGGLSELDKAGFIKRQLVETRQITKHVAQILDSRMNTKYDENDKLIREVKVITLKSKLVSDFRKDFQFYKVREINNYHHAHDAYLNAVVGTALIKKYPKLESEFVYGDYKVYDVRKMIAKSEQEIGKATAKYFFYSNIMNFFKTEITLANGEIRKRPLIETNGETGEIVWDKGRDFATVRKVLSMPQVNIVKKTEVQTGGFSKESILPKRNSDKLIARKKDWDPKKYGGFDSPTVAYSVLVVAKVEKGKSKKLKSVKELLGITIMERSSFEKNPIDFLEAKGYKEVKKDLIIKLPKYSLFELENGRKRMLASAGELQKGNELALPSKYVNFLYLASHYEKLKGSPEDNEQKQLFVEQHKHYLDEIIEQISEFSKRVILADANLDKVLSAYNKHRDKPIREQAENIIHLFTLTNLGAPAAFKYFDTTIDRKRYTSTKEVLDATLIHQSITGLYETRIDLSQLGGDGGGGGEAAAKPAPGGTLNLEDEYRLYETSAEPEVSPGSTWLSDFPQAWAETGGMGLAVRQAPLIIPLKATSTPVSIKQYPMSQEAKLGIKPHIQRLLDQGILVPCQSPWNTPLLPVKKPGTNDYRPVQDLREVNKRVEDIHPTVPNPYNLLSGLPPSHRWYTVLDLKDAFFCLRLHPTSQPLFAFEWRDPGMGISGQLTWTRLPQGFKNSPTLFNEALHRDLADFRIQHPDLILLQYVDDILLAATSELDCQQGTRALLLTLGNLGYRASAKKAQLCQKQVKYLGYLLKEGQRWLTEARKETVMGQPTPKTPRQLREFLGKAGFCRLFIPGFAEMAAPLYPLTKPGTLFNWGPDQQKAYQEIKQALLTAPALGLPDLTKPFELFVDEKQGYAKGVLTQKLGPWRRPVAYLSKKLDPVAAGWPPCLRMVAAIAVLRKDAGKLTMGQPLVILAPHAVEALVKQPPDRWLSNARMTHYQAMLLDTDRVQFGPVVALNPATLLPLPEEGAPHDCLEILAETHGTRPDLTDQPIPDADHTWYTDGSSFLQEGQRKAGAAVTTETEVIWARALPAGTSAQRAELIALTQALKMAEGKRLNVYTDSRYAFATAHIHGEIYRRRGWLTSEGREIKNKSEILALLKALFLPKRLSIIHCLGHQKGDSAEARGNRLADQAAREAAIKTPPDTSTLLAGKRTADGSEFEKRTADGSEFESPKKKAKVE

SEQ ID NO: 1887 - protein, 2091 aa, synthetic construct
MPAAKRVKLDGGDKKYSIGLDIGTNSVGWAVITDEYKVPSKKFKVLGNTDRHSIKKNLIGALLFDSGETAEATRLKRTARRRYTRRKNRICYLQEIFSNEMAKVDDSFFHRLEESFLVEEDKKHERHPIFGNIVDEVAYHEKYPTIYHLRKKLVDSTDKADLRLIYLALAHMIKFRGHFLIEGDLNPDNSDVDKLFIQLVQTYNQLFEENPINASGVDAKAILSARLSKSRRLENLIAQLPGEKKNGLFGNLIALSLGLTPNFKSNFDLAEDAKLQLSKDTYDDDLDNLLAQIGDQYADLFLAAKNLSDAILLSDILRVNTEITKAPLSASMIKRYDEHHQDLTLLKALVRQQLPEKYKEIFFDQSKNGYAGYIDGGASQEEFYKFIKPILEKMDGTEELLVKLNREDLLRKQRTFDNGSIPHQIHLGELHAILRRQEDFYPFLKDNREKIEKILTFRIPYYVGPLARGNSRFAWMTRKSEETITPWNFEEVVDKGASAQSFIERMTNFDKNLPNEKVLPKHSLLYEYFTVYNELTKVKYVTEGMRKPAFLSGEQKKAIVDLLFKTNRKVTVKQLKEDYFKKIECFDSVEISGVEDRFNASLGTYHDLLKIIKDKDFLDNEENEDILEDIVLTLTLFEDREMIEERLKTYAHLFDDKVMKQLKRRRYTGWGRLSRKLINGIRDKQSGKTILDFLKSDGFANRNFMQLIHDDSLTFKEDIQKAQVSGQGDSLHEHIANLAGSPAIKKGILQTVKVVDELVKVMGRHKPENIVIEMARENQTTQKGQKNSRERMKRIEEGIKELGSQILKEHPVENTQLQNEKLYLYYLQNGRDMYVDQELDINRLSDYDVDHIVPQSFLKDDSIDNKVLTRSDKARGKSDNVPSEEVVKKMKNYWRQLLNAKLITQRKFDNLTKAERGGLSELDKAGFIKRQLVETRQITKHVAQILDSRMNTKYDENDKLIREVKVITLKSKLVSDFRKDFQFYKVREINNYHHAHDAYLNAVVGTALIKKYPKLESEFVYGDYKVYDVRKMIAKSEQEIGKATAKYFFYSNIMNFFKTEITLANGEIRKRPLIETNGETGEIVWDKGRDFATVRKVLSMPQVNIVKKTEVQTGGFSKESILPKRNSDKLIARKKDWDPKKYGGFDSPTVAYSVLVVAKVEKGKSKKLKSVKELLGITIMERSSFEKNPIDFLEAKGYKEVKKDLIIKLPKYSLFELENGRKRMLASAGELQKGNELALPSKYVNFLYLASHYEKLKGSPEDNEQKQLFVEQHKHYLDEIIEQISEFSKRVILADANLDKVLSAYNKHRDKPIREQAENIIHLFTLTNLGAPAAFKYFDTTIDRKRYTSTKEVLDATLIHQSITGLYETRIDLSQLGGDGGGSSPAPGGTLNLEDEYRLYETSAEPEVSPGSTWLSDFPQAWAETGGMGLAVRQAPLIIPLKATSTPVSIKQYPMSQEAKLGIKPHIQRLLDQGILVPCQSPWNTPLLPVKKPGTNDYRPVQDLREVNKRVEDIHPTVPNPYNLLSGLPPSHRWYTVLDLKDAFFCLRLHPTSQPLFAFEWRDPGMGISGQLTWTRLPQGFKNSPTLFNEALHRDLADFRIQHPDLILLQYVDDILLAATSELDCQQGTRALLLTLGNLGYRASAKKAQLCQKQVKYLGYLLKEGQRWLTEARKETVMGQPTPKTPRQLREFLGKAGFCRLFIPGFAEMAAPLYPLTKPGTLFNWGPDQQKAYQEIKQALLTAPALGLPDLTKPFELFVDEKQGYAKGVLTQKLGPWRRPVAYLSKKLDPVAAGWPPCLRMVAAIAVLRKDAGKLTMGQPLVILAPHAVEALVKQPPDRWLSNARMTHYQAMLLDTDRVQFGPVVALNPATLLPLPEEGAPHDCLEILAETHGTRPDLTDQPIPDADHTWYTDGSSFLQEGQRKAGAAVTTETEVIWARALPAGTSAQRAELIALTQALKMAEGKRLNVYTDSRYAFATAHIHGEIYRRRGWLTSEGREIKNKSEILALLKALFLPKRLSIIHCLGHQKGDSAEARGNRLADQAAREAAIKTPPDTSTLLAGKRTADGSEFEKRTADGSEFESPKKKAKVE

SEQ ID NO: 1888 - protein, 2093 aa, synthetic construct
MPAAKRVKLDGGDKKYSIGLDIGTNSVGWAVITDEYKVPSKKFKVLGNTDRHSIKKNLIGALLFDSGETAEATRLKRTARRRYTRRKNRICYLQEIFSNEMAKVDDSFFHRLEESFLVEEDKKHERHPIFGNIVDEVAYHEKYPTIYHLRKKLVDSTDKADLRLIYLALAHMIKFRGHFLIEGDLNPDNSDVDKLFIQLVQTYNQLFEENPINASGVDAKAILSARLSKSRRLENLIAQLPGEKKNGLFGNLIALSLGLTPNFKSNFDLAEDAKLQLSKDTYDDDLDNLLAQIGDQYADLFLAAKNLSDAILLSDILRVNTEITKAPLSASMIKRYDEHHQDLTLLKALVRQQLPEKYKEIFFDQSKNGYAGYIDGGASQEEFYKFIKPILEKMDGTEELLVKLNREDLLRKQRTFDNGSIPHQIHLGELHAILRRQEDFYPFLKDNREKIEKILTFRIPYYVGPLARGNSRFAWMTRKSEETITPWNFEEVVDKGASAQSFIERMTNFDKNLPNEKVLPKHSLLYEYFTVYNELTKVKYVTEGMRKPAFLSGEQKKAIVDLLFKTNRKVTVKQLKEDYFKKIECFDSVEISGVEDRFNASLGTYHDLLKIIKDKDFLDNEENEDILEDIVLTLTLFEDREMIEERLKTYAHLFDDKVMKQLKRRRYTGWGRLSRKLINGIRDKQSGKTILDFLKSDGFANRNFMQLIHDDSLTFKEDIQKAQVSGQGDSLHEHIANLAGSPAIKKGILQTVKVVDELVKVMGRHKPENIVIEMARENQTTQKGQKNSRERMKRIEEGIKELGSQILKEHPVENTQLQNEKLYLYYLQNGRDMYVDQELDINRLSDYDVDHIVPQSFLKDDSIDNKVLTRSDKARGKSDNVPSEEVVKKMKNYWRQLLNAKLITQRKFDNLTKAERGGLSELDKAGFIKRQLVETRQITKHVAQILDSRMNTKYDENDKLIREVKVITLKSKLVSDFRKDFQFYKVREINNYHHAHDAYLNAVVGTALIKKYPKLESEFVYGDYKVYDVRKMIAKSEQEIGKATAKYFFYSNIMNFFKTEITLANGEIRKRPLIETNGETGEIVWDKGRDFATVRKVLSMPQVNIVKKTEVQTGGFSKESILPKRNSDKLIARKKDWDPKKYGGFDSPTVAYSVLVVAKVEKGKSKKLKSVKELLGITIMERSSFEKNPIDFLEAKGYKEVKKDLIIKLPKYSLFELENGRKRMLASAGELQKGNELALPSKYVNFLYLASHYEKLKGSPEDNEQKQLFVEQHKHYLDEIIEQISEFSKRVILADANLDKVLSAYNKHRDKPIREQAENIIHLFTLTNLGAPAAFKYFDTTIDRKRYTSTKEVLDATLIHQSITGLYETRIDLSQLGGDGGEAAAKGGGGGTLNLEDEYRLYETSAEPEVSPGSTWLSDFPQAWAETGGMGLAVRQAPLIIPLKATSTPVSIKQYPMSQEAKLGIKPHIQRLLDQGILVPCQSPWNTPLLPVKKPGTNDYRPVQDLREVNKRVEDIHPTVPNPYNLLSGLPPSHRWYTVLDLKDAFFCLRLHPTSQPLFAFEWRDPGMGISGQLTWTRLPQGFKNSPTLFNEALHRDLADFRIQHPDLILLQYVDDILLAATSELDCQQGTRALLLTLGNLGYRASAKKAQLCQKQVKYLGYLLKEGQRWLTEARKETVMGQPTPKTPRQLREFLGKAGFCRLFIPGFAEMAAPLYPLTKPGTLFNWGPDQQKAYQEIKQALLTAPALGLPDLTKPFELFVDEKQGYAKGVLTQKLGPWRRPVAYLSKKLDPVAAGWPPCLRMVAAIAVLRKDAGKLTMGQPLVILAPHAVEALVKQPPDRWLSNARMTHYQAMLLDTDRVQFGPVVALNPATLLPLPEEGAPHDCLEILAETHGTRPDLTDQPIPDADHTWYTDGSSFLQEGQRKAGAAVTTETEVIWARALPAGTSAQRAELIALTQALKMAEGKRLNVYTDSRYAFATAHIHGEIYRRRGWLTSEGREIKNKSEILALLKALFLPKRLSIIHCLGHQKGDSAEARGNRLADQAAREAAIKTPPDTSTLLAGKRTADGSEFEKRTADGSEFESPKKKAKVE

SEQ ID NO: 1889 - protein, 2096 aa, synthetic construct
MPAAKRVKLDGGDKKYSIGLDIGTNSVGWAVITDEYKVPSKKFKVLGNTDRHSIKKNLIGALLFDSGETAEATRLKRTARRRYTRRKNRICYLQEIFSNEMAKVDDSFFHRLEESFLVEEDKKHERHPIFGNIVDEVAYHEKYPTIYHLRKKLVDSTDKADLRLIYLALAHMIKFRGHFLIEGDLNPDNSDVDKLFIQLVQTYNQLFEENPINASGVDAKAILSARLSKSRRLENLIAQLPGEKKNGLFGNLIALSLGLTPNFKSNFDLAEDAKLQLSKDTYDDDLDNLLAQIGDQYADLFLAAKNLSDAILLSDILRVNTEITKAPLSASMIKRYDEHHQDLTLLKALVRQQLPEKYKEIFFDQSKNGYAGYIDGGASQEEFYKFIKPILEKMDGTEELLVKLNREDLLRKQRTFDNGSIPHQIHLGELHAILRRQEDFYPFLKDNREKIEKILTFRIPYYVGPLARGNSRFAWMTRKSEETITPWNFEEVVDKGASAQSFIERMTNFDKNLPNEKVLPKHSLLYEYFTVYNELTKVKYVTEGMRKPAFLSGEQKKAIVDLLFKTNRKVTVKQLKEDYFKKIECFDSVEISGVEDRFNASLGTYHDLLKIIKDKDFLDNEENEDILEDIVLTLTLFEDREMIEERLKTYAHLFDDKVMKQLKRRRYTGWGRLSRKLINGIRDKQSGKTILDFLKSDGFANRNFMQLIHDDSLTFKEDIQKAQVSGQGDSLHEHIANLAGSPAIKKGILQTVKVVDELVKVMGRHKPENIVIEMARENQTTQKGQKNSRERMKRIEEGIKELGSQILKEHPVENTQLQNEKLYLYYLQNGRDMYVDQELDINRLSDYDVDHIVPQSFLKDDSIDNKVLTRSDKARGKSDNVPSEEVVKKMKNYWRQLLNAKLITQRKFDNLTKAERGGLSELDKAGFIKRQLVETRQITKHVAQILDSRMNTKYDENDKLIREVKVITLKSKLVSDFRKDFQFYKVREINNYHHAHDAYLNAVVGTALIKKYPKLESEFVYGDYKVYDVRKMIAKSEQEIGKATAKYFFYSNIMNFFKTEITLANGEIRKRPLIETNGETGEIVWDKGRDFATVRKVLSMPQVNIVKKTEVQTGGFSKESILPKRNSDKLIARKKDWDPKKYGGFDSPTVAYSVLVVAKVEKGKSKKLKSVKELLGITIMERSSFEKNPIDFLEAKGYKEVKKDLIIKLPKYSLFELENGRKRMLASAGELQKGNELALPSKYVNFLYLASHYEKLKGSPEDNEQKQLFVEQHKHYLDEIIEQISEFSKRVILADANLDKVLSAYNKHRDKPIREQAENIIHLFTLTNLGAPAAFKYFDTTIDRKRYTSTKEVLDATLIHQSITGLYETRIDLSQLGGDGGGGSGSSEAAAKGGTLNLEDEYRLYETSAEPEVSPGSTWLSDFPQAWAETGGMGLAVRQAPLIIPLKATSTPVSIKQYPMSQEAKLGIKPHIQRLLDQGILVPCQSPWNTPLLPVKKPGTNDYRPVQDLREVNKRVEDIHPTVPNPYNLLSGLPPSHRWYTVLDLKDAFFCLRLHPTSQPLFAFEWRDPGMGISGQLTWTRLPQGFKNSPTLFNEALHRDLADFRIQHPDLILLQYVDDILLAATSELDCQQGTRALLLTLGNLGYRASAKKAQLCQKQVKYLGYLLKEGQRWLTEARKETVMGQPTPKTPRQLREFLGKAGFCRLFIPGFAEMAAPLYPLTKPGTLFNWGPDQQKAYQEIKQALLTAPALGLPDLTKPFELFVDEKQGYAKGVLTQKLGPWRRPVAYLSKKLDPVAAGWPPCLRMVAAIAVLRKDAGKLTMGQPLVILAPHAVEALVKQPPDRWLSNARMTHYQAMLLDTDRVQFGPVVALNPATLLPLPEEGAPHDCLEILAETHGTRPDLTDQPIPDADHTWYTDGSSFLQEGQRKAGAAVTTETEVIWARALPAGTSAQRAELIALTQALKMAEGKRLNVYTDSRYAFATAHIHGEIYRRRGWLTSEGREIKNKSEILALLKALFLPKRLSIIHCLGHQKGDSAEARGNRLADQAAREAAIKTPPDTSTLLAGKRTADGSEFEKRTADGSEFESPKKKAKVE

SEQ ID NO: 1890 - protein, 2096 aa, synthetic construct
MPAAKRVKLDGGDKKYSIGLDIGTNSVGWAVITDEYKVPSKKFKVLGNTDRHSIKKNLIGALLFDSGETAEATRLKRTARRRYTRRKNRICYLQEIFSNEMAKVDDSFFHRLEESFLVEEDKKHERHPIFGNIVDEVAYHEKYPTIYHLRKKLVDSTDKADLRLIYLALAHMIKFRGHFLIEGDLNPDNSDVDKLFIQLVQTYNQLFEENPINASGVDAKAILSARLSKSRRLENLIAQLPGEKKNGLFGNLIALSLGLTPNFKSNFDLAEDAKLQLSKDTYDDDLDNLLAQIGDQYADLFLAAKNLSDAILLSDILRVNTEITKAPLSASMIKRYDEHHQDLTLLKALVRQQLPEKYKEIFFDQSKNGYAGYIDGGASQEEFYKFIKPILEKMDGTEELLVKLNREDLLRKQRTFDNGSIPHQIHLGELHAILRRQEDFYPFLKDNREKIEKILTFRIPYYVGPLARGNSRFAWMTRKSEETITPWNFEEVVDKGASAQSFIERMTNFDKNLPNEKVLPKHSLLYEYFTVYNELTKVKYVTEGMRKPAFLSGEQKKAIVDLLFKTNRKVTVKQLKEDYFKKIECFDSVEISGVEDRFNASLGTYHDLLKIIKDKDFLDNEENEDILEDIVLTLTLFEDREMIEERLKTYAHLFDDKVMKQLKRRRYTGWGRLSRKLINGIRDKQSGKTILDFLKSDGFANRNFMQLIHDDSLTFKEDIQKAQVSGQGDSLHEHIANLAGSPAIKKGILQTVKVVDELVKVMGRHKPENIVIEMARENQTTQKGQKNSRERMKRIEEGIKELGSQILKEHPVENTQLQNEKLYLYYLQNGRDMYVDQELDINRLSDYDVDHIVPQSFLKDDSIDNKVLTRSDKARGKSDNVPSEEVVKKMKNYWRQLLNAKLITQRKFDNLTKAERGGLSELDKAGFIKRQLVETRQITKHVAQILDSRMNTKYDENDKLIREVKVITLKSKLVSDFRKDFQFYKVREINNYHHAHDAYLNAVVGTALIKKYPKLESEFVYGDYKVYDVRKMIAKSEQEIGKATAKYFFYSNIMNFFKTEITLANGEIRKRPLIETNGETGEIVWDKGRDFATVRKVLSMPQVNIVKKTEVQTGGFSKESILPKRNSDKLIARKKDWDPKKYGGFDSPTVAYSVLVVAKVEKGKSKKLKSVKELLGITIMERSSFEKNPIDFLEAKGYKEVKKDLIIKLPKYSLFELENGRKRMLASAGELQKGNELALPSKYVNFLYLASHYEKLKGSPEDNEQKQLFVEQHKHYLDEIIEQISEFSKRVILADANLDKVLSAYNKHRDKPIREQAENIIHLFTLTNLGAPAAFKYFDTTIDRKRYTSTKEVLDATLIHQSITGLYETRIDLSQLGGDGGGSSPAPEAAAKGGTLNLEDEYRLYETSAEPEVSPGSTWLSDFPQAWAETGGMGLAVRQAPLIIPLKATSTPVSIKQYPMSQEAKLGIKPHIQRLLDQGILVPCQSPWNTPLLPVKKPGTNDYRPVQDLREVNKRVEDIHPTVPNPYNLLSGLPPSHRWYTVLDLKDAFFCLRLHPTSQPLFAFEWRDPGMGISGQLTWTRLPQGFKNSPTLFNEALHRDLADFRIQHPDLILLQYVDDILLAATSELDCQQGTRALLLTLGNLGYRASAKKAQLCQKQVKYLGYLLKEGQRWLTEARKETVMGQPTPKTPRQLREFLGKAGFCRLFIPGFAEMAAPLYPLTKPGTLFNWGPDQQKAYQEIKQALLTAPALGLPDLTKPFELFVDEKQGYAKGVLTQKLGPWRRPVAYLSKKLDPVAAGWPPCLRMVAAIAVLRKDAGKLTMGQPLVILAPHAVEALVKQPPDRWLSNARMTHYQAMLLDTDRVQFGPVVALNPATLLPLPEEGAPHDCLEILAETHGTRPDLTDQPIPDADHTWYTDGSSFLQEGQRKAGAAVTTETEVIWARALPAGTSAQRAELIALTQALKMAEGKRLNVYTDSRYAFATAHIHGEIYRRRGWLTSEGREIKNKSEILALLKALFLPKRLSIIHCLGHQKGDSAEARGNRLADQAAREAAIKTPPDTSTLLAGKRTADGSEFEKRTADGSEFESPKKKAKVE

SEQ ID NO: 1891 - protein, 2093 aa, synthetic construct
MPAAKRVKLDGGDKKYSIGLDIGTNSVGWAVITDEYKVPSKKFKVLGNTDRHSIKKNLIGALLFDSGETAEATRLKRTARRRYTRRKNRICYLQEIFSNEMAKVDDSFFHRLEESFLVEEDKKHERHPIFGNIVDEVAYHEKYPTIYHLRKKLVDSTDKADLRLIYLALAHMIKFRGHFLIEGDLNPDNSDVDKLFIQLVQTYNQLFEENPINASGVDAKAILSARLSKSRRLENLIAQLPGEKKNGLFGNLIALSLGLTPNFKSNFDLAEDAKLQLSKDTYDDDLDNLLAQIGDQYADLFLAAKNLSDAILLSDILRVNTEITKAPLSASMIKRYDEHHQDLTLLKALVRQQLPEKYKEIFFDQSKNGYAGYIDGGASQEEFYKFIKPILEKMDGTEELLVKLNREDLLRKQRTFDNGSIPHQIHLGELHAILRRQEDFYPFLKDNREKIEKILTFRIPYYVGPLARGNSRFAWMTRKSEETITPWNFEEVVDKGASAQSFIERMTNFDKNLPNEKVLPKHSLLYEYFTVYNELTKVKYVTEGMRKPAFLSGEQKKAIVDLLFKTNRKVTVKQLKEDYFKKIECFDSVEISGVEDRFNASLGTYHDLLKIIKDKDFLDNEENEDILEDIVLTLTLFEDREMIEERLKTYAHLFDDKVMKQLKRRRYTGWGRLSRKLINGIRDKQSGKTILDFLKSDGFANRNFMQLIHDDSLTFKEDIQKAQVSGQGDSLHEHIANLAGSPAIKKGILQTVKVVDELVKVMGRHKPENIVIEMARENQTTQKGQKNSRERMKRIEEGIKELGSQILKEHPVENTQLQNEKLYLYYLQNGRDMYVDQELDINRLSDYDVDHIVPQSFLKDDSIDNKVLTRSDKARGKSDNVPSEEVVKKMKNYWRQLLNAKLITQRKFDNLTKAERGGLSELDKAGFIKRQLVETRQITKHVAQILDSRMNTKYDENDKLIREVKVITLKSKLVSDFRKDFQFYKVREINNYHHAHDAYLNAVVGTALIKKYPKLESEFVYGDYKVYDVRKMIAKSEQEIGKATAKYFFYSNIMNFFKTEITLANGEIRKRPLIETNGETGEIVWDKGRDFATVRKVLSMPQVNIVKKTEVQTGGFSKESILPKRNSDKLIARKKDWDPKKYGGFDSPTVAYSVLVVAKVEKGKSKKLKSVKELLGITIMERSSFEKNPIDFLEAKGYKEVKKDLIIKLPKYSLFELENGRKRMLASAGELQKGNELALPSKYVNFLYLASHYEKLKGSPEDNEQKQLFVEQHKHYLDEIIEQISEFSKRVILADANLDKVLSAYNKHRDKPIREQAENIIHLFTLTNLGAPAAFKYFDTTIDRKRYTSTKEVLDATLIHQSITGLYETRIDLSQLGGDGGGSSEAAAKGGTLNLEDEYRLYETSAEPEVSPGSTWLSDFPQAWAETGGMGLAVRQAPLIIPLKATSTPVSIKQYPMSQEAKLGIKPHIQRLLDQGILVPCQSPWNTPLLPVKKPGTNDYRPVQDLREVNKRVEDIHPTVPNPYNLLSGLPPSHRWYTVLDLKDAFFCLRLHPTSQPLFAFEWRDPGMGISGQLTWTRLPQGFKNSPTLFNEALHRDLADFRIQHPDLILLQYVDDILLAATSELDCQQGTRALLLTLGNLGYRASAKKAQLCQKQVKYLGYLLKEGQRWLTEARKETVMGQPTPKTPRQLREFLGKAGFCRLFIPGFAEMAAPLYPLTKPGTLFNWGPDQQKAYQEIKQALLTAPALGLPDLTKPFELFVDEKQGYAKGVLTQKLGPWRRPVAYLSKKLDPVAAGWPPCLRMVAAIAVLRKDAGKLTMGQPLVILAPHAVEALVKQPPDRWLSNARMTHYQAMLLDTDRVQFGPVVALNPATLLPLPEEGAPHDCLEILAETHGTRPDLTDQPIPDADHTWYTDGSSFLQEGQRKAGAAVTTETEVIWARALPAGTSAQRAELIALTQALKMAEGKRLNVYTDSRYAFATAHIHGEIYRRRGWLTSEGREIKNKSEILALLKALFLPKRLSIIHCLGHQKGDSAEARGNRLADQAAREAAIKTPPDTSTLLAGKRTADGSEFEKRTADGSEFESPKKKAKVE

SEQ ID NO: 1892 - protein, 2094 aa, synthetic construct
MPAAKRVKLDGGDKKYSIGLDIGTNSVGWAVITDEYKVPSKKFKVLGNTDRHSIKKNLIGALLFDSGETAEATRLKRTARRRYTRRKNRICYLQEIFSNEMAKVDDSFFHRLEESFLVEEDKKHERHPIFGNIVDEVAYHEKYPTIYHLRKKLVDSTDKADLRLIYLALAHMIKFRGHFLIEGDLNPDNSDVDKLFIQLVQTYNQLFEENPINASGVDAKAILSARLSKSRRLENLIAQLPGEKKNGLFGNLIALSLGLTPNFKSNFDLAEDAKLQLSKDTYDDDLDNLLAQIGDQYADLFLAAKNLSDAILLSDILRVNTEITKAPLSASMIKRYDEHHQDLTLLKALVRQQLPEKYKEIFFDQSKNGYAGYIDGGASQEEFYKFIKPILEKMDGTEELLVKLNREDLLRKQRTFDNGSIPHQIHLGELHAILRRQEDFYPFLKDNREKIEKILTFRIPYYVGPLARGNSRFAWMTRKSEETITPWNFEEVVDKGASAQSFIERMTNFDKNLPNEKVLPKHSLLYEYFTVYNELTKVKYVTEGMRKPAFLSGEQKKAIVDLLFKTNRKVTVKQLKEDYFKKIECFDSVEISGVEDRFNASLGTYHDLLKIIKDKDFLDNEENEDILEDIVLTLTLFEDREMIEERLKTYAHLFDDKVMKQLKRRRYTGWGRLSRKLINGIRDKQSGKTILDFLKSDGFANRNFMQLIHDDSLTFKEDIQKAQVSGQGDSLHEHIANLAGSPAIKKGILQTVKVVDELVKVMGRHKPENIVIEMARENQTTQKGQKNSRERMKRIEEGIKELGSQILKEHPVENTQLQNEKLYLYYLQNGRDMYVDQELDINRLSDYDVDHIVPQSFLKDDSIDNKVLTRSDKARGKSDNVPSEEVVKKMKNYWRQLLNAKLITQRKFDNLTKAERGGLSELDKAGFIKRQLVETRQITKHVAQILDSRMNTKYDENDKLIREVKVITLKSKLVSDFRKDFQFYKVREINNYHHAHDAYLNAVVGTALIKKYPKLESEFVYGDYKVYDVRKMIAKSEQEIGKATAKYFFYSNIMNFFKTEITLANGEIRKRPLIETNGETGEIVWDKGRDFATVRKVLSMPQVNIVKKTEVQTGGFSKESILPKRNSDKLIARKKDWDPKKYGGFDSPTVAYSVLVVAKVEKGKSKKLKSVKELLGITIMERSSFEKNPIDFLEAKGYKEVKKDLIIKLPKYSLFELENGRKRMLASAGELQKGNELALPSKYVNFLYLASHYEKLKGSPEDNEQKQLFVEQHKHYLDEIIEQISEFSKRVILADANLDKVLSAYNKHRDKPIREQAENIIHLFTLTNLGAPAAFKYFDTTIDRKRYTSTKEVLDATLIHQSITGLYETRIDLSQLGGDGGGGGPAPGGSGGTLNLEDEYRLYETSAEPEVSPGSTWLSDFPQAWAETGGMGLAVRQAPLIIPLKATSTPVSIKQYPMSQEAKLGIKPHIQRLLDQGILVPCQSPWNTPLLPVKKPGTNDYRPVQDLREVNKRVEDIHPTVPNPYNLLSGLPPSHRWYTVLDLKDAFFCLRLHPTSQPLFAFEWRDPGMGISGQLTWTRLPQGFKNSPTLFNEALHRDLADFRIQHPDLILLQYVDDILLAATSELDCQQGTRALLLTLGNLGYRASAKKAQLCQKQVKYLGYLLKEGQRWLTEARKETVMGQPTPKTPRQLREFLGKAGFCRLFIPGFAEMAAPLYPLTKPGTLFNWGPDQQKAYQEIKQALLTAPALGLPDLTKPFELFVDEKQGYAKGVLTQKLGPWRRPVAYLSKKLDPVAAGWPPCLRMVAAIAVLRKDAGKLTMGQPLVILAPHAVEALVKQPPDRWLSNARMTHYQAMLLDTDRVQFGPVVALNPATLLPLPEEGAPHDCLEILAETHGTRPDLTDQPIPDADHTWYTDGSSFLQEGQRKAGAAVTTETEVIWARALPAGTSAQRAELIALTQALKMAEGKRLNVYTDSRYAFATAHIHGEIYRRRGWLTSEGREIKNKSEILALLKALFLPKRLSIIHCLGHQKGDSAEARGNRLADQAAREAAIKTPPDTSTLLAGKRTADGSEFEKRTADGSEFESPKKKAKVE

SEQ ID NO: 1893 - protein, 2094 aa, synthetic construct
MPAAKRVKLDGGDKKYSIGLDIGTNSVGWAVITDEYKVPSKKFKVLGNTDRHSIKKNLIGALLFDSGETAEATRLKRTARRRYTRRKNRICYLQEIFSNEMAKVDDSFFHRLEESFLVEEDKKHERHPIFGNIVDEVAYHEKYPTIYHLRKKLVDSTDKADLRLIYLALAHMIKFRGHFLIEGDLNPDNSDVDKLFIQLVQTYNQLFEENPINASGVDAKAILSARLSKSRRLENLIAQLPGEKKNGLFGNLIALSLGLTPNFKSNFDLAEDAKLQLSKDTYDDDLDNLLAQIGDQYADLFLAAKNLSDAILLSDILRVNTEITKAPLSASMIKRYDEHHQDLTLLKALVRQQLPEKYKEIFFDQSKNGYAGYIDGGASQEEFYKFIKPILEKMDGTEELLVKLNREDLLRKQRTFDNGSIPHQIHLGELHAILRRQEDFYPFLKDNREKIEKILTFRIPYYVGPLARGNSRFAWMTRKSEETITPWNFEEVVDKGASAQSFIERMTNFDKNLPNEKVLPKHSLLYEYFTVYNELTKVKYVTEGMRKPAFLSGEQKKAIVDLLFKTNRKVTVKQLKEDYFKKIECFDSVEISGVEDRFNASLGTYHDLLKIIKDKDFLDNEENEDILEDIVLTLTLFEDREMIEERLKTYAHLFDDKVMKQLKRRRYTGWGRLSRKLINGIRDKQSGKTILDFLKSDGFANRNFMQLIHDDSLTFKEDIQKAQVSGQGDSLHEHIANLAGSPAIKKGILQTVKVVDELVKVMGRHKPENIVIEMARENQTTQKGQKNSRERMKRIEEGIKELGSQILKEHPVENTQLQNEKLYLYYLQNGRDMYVDQELDINRLSDYDVDHIVPQSFLKDDSIDNKVLTRSDKARGKSDNVPSEEVVKKMKNYWRQLLNAKLITQRKFDNLTKAERGGLSELDKAGFIKRQLVETRQITKHVAQILDSRMNTKYDENDKLIREVKVITLKSKLVSDFRKDFQFYKVREINNYHHAHDAYLNAVVGTALIKKYPKLESEFVYGDYKVYDVRKMIAKSEQEIGKATAKYFFYSNIMNFFKTEITLANGEIRKRPLIETNGETGEIVWDKGRDFATVRKVLSMPQVNIVKKTEVQTGGFSKESILPKRNSDKLIARKKDWDPKKYGGFDSPTVAYSVLVVAKVEKGKSKKLKSVKELLGITIMERSSFEKNPIDFLEAKGYKEVKKDLIIKLPKYSLFELENGRKRMLASAGELQKGNELALPSKYVNFLYLASHYEKLKGSPEDNEQKQLFVEQHKHYLDEIIEQISEFSKRVILADANLDKVLSAYNKHRDKPIREQAENIIHLFTLTNLGAPAAFKYFDTTIDRKRYTSTKEVLDATLIHQSITGLYETRIDLSQLGGDGGPAPGGGGSSGGTLNLEDEYRLYETSAEPEVSPGSTWLSDFPQAWAETGGMGLAVRQAPLIIPLKATSTPVSIKQYPMSQEAKLGIKPHIQRLLDQGILVPCQSPWNTPLLPVKKPGTNDYRPVQDLREVNKRVEDIHPTVPNPYNLLSGLPPSHRWYTVLDLKDAFFCLRLHPTSQPLFAFEWRDPGMGISGQLTWTRLPQGFKNSPTLFNEALHRDLADFRIQHPDLILLQYVDDILLAATSELDCQQGTRALLLTLGNLGYRASAKKAQLCQKQVKYLGYLLKEGQRWLTEARKETVMGQPTPKTPRQLREFLGKAGFCRLFIPGFAEMAAPLYPLTKPGTLFNWGPDQQKAYQEIKQALLTAPALGLPDLTKPFELFVDEKQGYAKGVLTQKLGPWRRPVAYLSKKLDPVAAGWPPCLRMVAAIAVLRKDAGKLTMGQPLVILAPHAVEALVKQPPDRWLSNARMTHYQAMLLDTDRVQFGPVVALNPATLLPLPEEGAPHDCLEILAETHGTRPDLTDQPIPDADHTWYTDGSSFLQEGQRKAGAAVTTETEVIWARALPAGTSAQRAELIALTQALKMAEGKRLNVYTDSRYAFATAHIHGEIYRRRGWLTSEGREIKNKSEILALLKALFLPKRLSIIHCLGHQKGDSAEARGNRLADQAAREAAIKTPPDTSTLLAGKRTADGSEFEKRTADGSEFESPKKKAKVE

SEQ ID NO: 1894 - protein, 2094 aa, synthetic construct
MPAAKRVKLDGGDKKYSIGLDIGTNSVGWAVITDEYKVPSKKFKVLGNTDRHSIKKNLIGALLFDSGETAEATRLKRTARRRYTRRKNRICYLQEIFSNEMAKVDDSFFHRLEESFLVEEDKKHERHPIFGNIVDEVAYHEKYPTIYHLRKKLVDSTDKADLRLIYLALAHMIKFRGHFLIEGDLNPDNSDVDKLFIQLVQTYNQLFEENPINASGVDAKAILSARLSKSRRLENLIAQLPGEKKNGLFGNLIALSLGLTPNFKSNFDLAEDAKLQLSKDTYDDDLDNLLAQIGDQYADLFLAAKNLSDAILLSDILRVNTEITKAPLSASMIKRYDEHHQDLTLLKALVRQQLPEKYKEIFFDQSKNGYAGYIDGGASQEEFYKFIKPILEKMDGTEELLVKLNREDLLRKQRTFDNGSIPHQIHLGELHAILRRQEDFYPFLKDNREKIEKILTFRIPYYVGPLARGNSRFAWMTRKSEETITPWNFEEVVDKGASAQSFIERMTNFDKNLPNEKVLPKHSLLYEYFTVYNELTKVKYVTEGMRKPAFLSGEQKKAIVDLLFKTNRKVTVKQLKEDYFKKIECFDSVEISGVEDRFNASLGTYHDLLKIIKDKDFLDNEENEDILEDIVLTLTLFEDREMIEERLKTYAHLFDDKVMKQLKRRRYTGWGRLSRKLINGIRDKQSGKTILDFLKSDGFANRNFMQLIHDDSLTFKEDIQKAQVSGQGDSLHEHIANLAGSPAIKKGILQTVKVVDELVKVMGRHKPENIVIEMARENQTTQKGQKNSRERMKRIEEGIKELGSQILKEHPVENTQLQNEKLYLYYLQNGRDMYVDQELDINRLSDYDVDHIVPQSFLKDDSIDNKVLTRSDKARGKSDNVPSEEVVKKMKNYWRQLLNAKLITQRKFDNLTKAERGGLSELDKAGFIKRQLVETRQITKHVAQILDSRMNTKYDENDKLIREVKVITLKSKLVSDFRKDFQFYKVREINNYHHAHDAYLNAVVGTALIKKYPKLESEFVYGDYKVYDVRKMIAKSEQEIGKATAKYFFYSNIMNFFKTEITLANGEIRKRPLIETNGETGEIVWDKGRDFATVRKVLSMPQVNIVKKTEVQTGGFSKESILPKRNSDKLIARKKDWDPKKYGGFDSPTVAYSVLVVAKVEKGKSKKLKSVKELLGITIMERSSFEKNPIDFLEAKGYKEVKKDLIIKLPKYSLFELENGRKRMLASAGELQKGNELALPSKYVNFLYLASHYEKLKGSPEDNEQKQLFVEQHKHYLDEIIEQISEFSKRVILADANLDKVLSAYNKHRDKPIREQAENIIHLFTLTNLGAPAAFKYFDTTIDRKRYTSTKEVLDATLIHQSITGLYETRIDLSQLGGDGGGGGGGSGSSGGTLNLEDEYRLYETSAEPEVSPGSTWLSDFPQAWAETGGMGLAVRQAPLIIPLKATSTPVSIKQYPMSQEAKLGIKPHIQRLLDQGILVPCQSPWNTPLLPVKKPGTNDYRPVQDLREVNKRVEDIHPTVPNPYNLLSGLPPSHRWYTVLDLKDAFFCLRLHPTSQPLFAFEWRDPGMGISGQLTWTRLPQGFKNSPTLFNEALHRDLADFRIQHPDLILLQYVDDILLAATSELDCQQGTRALLLTLGNLGYRASAKKAQLCQKQVKYLGYLLKEGQRWLTEARKETVMGQPTPKTPRQLREFLGKAGFCRLFIPGFAEMAAPLYPLTKPGTLFNWGPDQQKAYQEIKQALLTAPALGLPDLTKPFELFVDEKQGYAKGVLTQKLGPWRRPVAYLSKKLDPVAAGWPPCLRMVAAIAVLRKDAGKLTMGQPLVILAPHAVEALVKQPPDRWLSNARMTHYQAMLLDTDRVQFGPVVALNPATLLPLPEEGAPHDCLEILAETHGTRPDLTDQPIPDADHTWYTDGSSFLQEGQRKAGAAVTTETEVIWARALPAGTSAQRAELIALTQALKMAEGKRLNVYTDSRYAFATAHIHGEIYRRRGWLTSEGREIKNKSEILALLKALFLPKRLSIIHCLGHQKGDSAEARGNRLADQAAREAAIKTPPDTSTLLAGKRTADGSEFEKRTADGSEFESPKKKAKVE

SEQ ID NO: 1895 - protein, 2091 aa, synthetic construct
MPAAKRVKLDGGDKKYSIGLDIGTNSVGWAVITDEYKVPSKKFKVLGNTDRHSIKKNLIGALLFDSGETAEATRLKRTARRRYTRRKNRICYLQEIFSNEMAKVDDSFFHRLEESFLVEEDKKHERHPIFGNIVDEVAYHEKYPTIYHLRKKLVDSTDKADLRLIYLALAHMIKFRGHFLIEGDLNPDNSDVDKLFIQLVQTYNQLFEENPINASGVDAKAILSARLSKSRRLENLIAQLPGEKKNGLFGNLIALSLGLTPNFKSNFDLAEDAKLQLSKDTYDDDLDNLLAQIGDQYADLFLAAKNLSDAILLSDILRVNTEITKAPLSASMIKRYDEHHQDLTLLKALVRQQLPEKYKEIFFDQSKNGYAGYIDGGASQEEFYKFIKPILEKMDGTEELLVKLNREDLLRKQRTFDNGSIPHQIHLGELHAILRRQEDFYPFLKDNREKIEKILTFRIPYYVGPLARGNSRFAWMTRKSEETITPWNFEEVVDKGASAQSFIERMTNFDKNLPNEKVLPKHSLLYEYFTVYNELTKVKYVTEGMRKPAFLSGEQKKAIVDLLFKTNRKVTVKQLKEDYFKKIECFDSVEISGVEDRFNASLGTYHDLLKIIKDKDFLDNEENEDILEDIVLTLTLFEDREMIEERLKTYAHLFDDKVMKQLKRRRYTGWGRLSRKLINGIRDKQSGKTILDFLKSDGFANRNFMQLIHDDSLTFKEDIQKAQVSGQGDSLHEHIANLAGSPAIKKGILQTVKVVDELVKVMGRHKPENIVIEMARENQTTQKGQKNSRERMKRIEEGIKELGSQILKEHPVENTQLQNEKLYLYYLQNGRDMYVDQELDINRLSDYDVDHIVPQSFLKDDSIDNKVLTRSDKARGKSDNVPSEEVVKKMKNYWRQLLNAKLITQRKFDNLTKAERGGLSELDKAGFIKRQLVETRQITKHVAQILDSRMNTKYDENDKLIREVKVITLKSKLVSDFRKDFQFYKVREINNYHHAHDAYLNAVVGTALIKKYPKLESEFVYGDYKVYDVRKMIAKSEQEIGKATAKYFFYSNIMNFFKTEITLANGEIRKRPLIETNGETGEIVWDKGRDFATVRKVLSMPQVNIVKKTEVQTGGFSKESILPKRNSDKLIARKKDWDPKKYGGFDSPTVAYSVLVVAKVEKGKSKKLKSVKELLGITIMERSSFEKNPIDFLEAKGYKEVKKDLIIKLPKYSLFELENGRKRMLASAGELQKGNELALPSKYVNFLYLASHYEKLKGSPEDNEQKQLFVEQHKHYLDEIIEQISEFSKRVILADANLDKVLSAYNKHRDKPIREQAENIIHLFTLTNLGAPAAFKYFDTTIDRKRYTSTKEVLDATLIHQSITGLYETRIDLSQLGGDGGPAPGGGGGTLNLEDEYRLYETSAEPEVSPGSTWLSDFPQAWAETGGMGLAVRQAPLIIPLKATSTPVSIKQYPMSQEAKLGIKPHIQRLLDQGILVPCQSPWNTPLLPVKKPGTNDYRPVQDLREVNKRVEDIHPTVPNPYNLLSGLPPSHRWYTVLDLKDAFFCLRLHPTSQPLFAFEWRDPGMGISGQLTWTRLPQGFKNSPTLFNEALHRDLADFRIQHPDLILLQYVDDILLAATSELDCQQGTRALLLTLGNLGYRASAKKAQLCQKQVKYLGYLLKEGQRWLTEARKETVMGQPTPKTPRQLREFLGKAGFCRLFIPGFAEMAAPLYPLTKPGTLFNWGPDQQKAYQEIKQALLTAPALGLPDLTKPFELFVDEKQGYAKGVLTQKLGPWRRPVAYLSKKLDPVAAGWPPCLRMVAAIAVLRKDAGKLTMGQPLVILAPHAVEALVKQPPDRWLSNARMTHYQAMLLDTDRVQFGPVVALNPATLLPLPEEGAPHDCLEILAETHGTRPDLTDQPIPDADHTWYTDGSSFLQEGQRKAGAAVTTETEVIWARALPAGTSAQRAELIALTQALKMAEGKRLNVYTDSRYAFATAHIHGEIYRRRGWLTSEGREIKNKSEILALLKALFLPKRLSIIHCLGHQKGDSAEARGNRLADQAAREAAIKTPPDTSTLLAGKRTADGSEFEKRTADGSEFESPKKKAKVE

SEQ ID NO: 1896 - protein, 2115 aa, synthetic construct
MPAAKRVKLDGGDKKYSIGLDIGTNSVGWAVITDEYKVPSKKFKVLGNTDRHSIKKNLIGALLFDSGETAEATRLKRTARRRYTRRKNRICYLQEIFSNEMAKVDDSFFHRLEESFLVEEDKKHERHPIFGNIVDEVAYHEKYPTIYHLRKKLVDSTDKADLRLIYLALAHMIKFRGHFLIEGDLNPDNSDVDKLFIQLVQTYNQLFEENPINASGVDAKAILSARLSKSRRLENLIAQLPGEKKNGLFGNLIALSLGLTPNFKSNFDLAEDAKLQLSKDTYDDDLDNLLAQIGDQYADLFLAAKNLSDAILLSDILRVNTEITKAPLSASMIKRYDEHHQDLTLLKALVRQQLPEKYKEIFFDQSKNGYAGYIDGGASQEEFYKFIKPILEKMDGTEELLVKLNREDLLRKQRTFDNGSIPHQIHLGELHAILRRQEDFYPFLKDNREKIEKILTFRIPYYVGPLARGNSRFAWMTRKSEETITPWNFEEVVDKGASAQSFIERMTNFDKNLPNEKVLPKHSLLYEYFTVYNELTKVKYVTEGMRKPAFLSGEQKKAIVDLLFKTNRKVTVKQLKEDYFKKIECFDSVEISGVEDRFNASLGTYHDLLKIIKDKDFLDNEENEDILEDIVLTLTLFEDREMIEERLKTYAHLFDDKVMKQLKRRRYTGWGRLSRKLINGIRDKQSGKTILDFLKSDGFANRNFMQLIHDDSLTFKEDIQKAQVSGQGDSLHEHIANLAGSPAIKKGILQTVKVVDELVKVMGRHKPENIVIEMARENQTTQKGQKNSRERMKRIEEGIKELGSQILKEHPVENTQLQNEKLYLYYLQNGRDMYVDQELDINRLSDYDVDHIVPQSFLKDDSIDNKVLTRSDKARGKSDNVPSEEVVKKMKNYWRQLLNAKLITQRKFDNLTKAERGGLSELDKAGFIKRQLVETRQITKHVAQILDSRMNTKYDENDKLIREVKVITLKSKLVSDFRKDFQFYKVREINNYHHAHDAYLNAVVGTALIKKYPKLESEFVYGDYKVYDVRKMIAKSEQEIGKATAKYFFYSNIMNFFKTEITLANGEIRKRPLIETNGETGEIVWDKGRDFATVRKVLSMPQVNIVKKTEVQTGGFSKESILPKRNSDKLIARKKDWDPKKYGGFDSPTVAYSVLVVAKVEKGKSKKLKSVKELLGITIMERSSFEKNPIDFLEAKGYKEVKKDLIIKLPKYSLFELENGRKRMLASAGELQKGNELALPSKYVNFLYLASHYEKLKGSPEDNEQKQLFVEQHKHYLDEIIEQISEFSKRVILADANLDKVLSAYNKHRDKPIREQAENIIHLFTLTNLGAPAAFKYFDTTIDRKRYTSTKEVLDATLIHQSITGLYETRIDLSQLGGDGGEAAAKEAAAKEAAAKEAAAKEAAAKEAAAKGGTLNLEDEYRLYETSAEPEVSPGSTWLSDFPQAWAETGGMGLAVRQAPLIIPLKATSTPVSIKQYPMSQEAKLGIKPHIQRLLDQGILVPCQSPWNTPLLPVKKPGTNDYRPVQDLREVNKRVEDIHPTVPNPYNLLSGLPPSHRWYTVLDLKDAFFCLRLHPTSQPLFAFEWRDPGMGISGQLTWTRLPQGFKNSPTLFNEALHRDLADFRIQHPDLILLQYVDDILLAATSELDCQQGTRALLLTLGNLGYRASAKKAQLCQKQVKYLGYLLKEGQRWLTEARKETVMGQPTPKTPRQLREFLGKAGFCRLFIPGFAEMAAPLYPLTKPGTLFNWGPDQQKAYQEIKQALLTAPALGLPDLTKPFELFVDEKQGYAKGVLTQKLGPWRRPVAYLSKKLDPVAAGWPPCLRMVAAIAVLRKDAGKLTMGQPLVILAPHAVEALVKQPPDRWLSNARMTHYQAMLLDTDRVQFGPVVALNPATLLPLPEEGAPHDCLEILAETHGTRPDLTDQPIPDADHTWYTDGSSFLQEGQRKAGAAVTTETEVIWARALPAGTSAQRAELIALTQALKMAEGKRLNVYTDSRYAFATAHIHGEIYRRRGWLTSEGREIKNKSEILALLKALFLPKRLSIIHCLGHQKGDSAEARGNRLADQAAREAAIKTPPDTSTLLAGKRTADGSEFEKRTADGSEFESPKKKAKVE

SEQ ID NO: 1897 - protein, 2091 aa, synthetic construct
MPAAKRVKLDGGDKKYSIGLDIGTNSVGWAVITDEYKVPSKKFKVLGNTDRHSIKKNLIGALLFDSGETAEATRLKRTARRRYTRRKNRICYLQEIFSNEMAKVDDSFFHRLEESFLVEEDKKHERHPIFGNIVDEVAYHEKYPTIYHLRKKLVDSTDKADLRLIYLALAHMIKFRGHFLIEGDLNPDNSDVDKLFIQLVQTYNQLFEENPINASGVDAKAILSARLSKSRRLENLIAQLPGEKKNGLFGNLIALSLGLTPNFKSNFDLAEDAKLQLSKDTYDDDLDNLLAQIGDQYADLFLAAKNLSDAILLSDILRVNTEITKAPLSASMIKRYDEHHQDLTLLKALVRQQLPEKYKEIFFDQSKNGYAGYIDGGASQEEFYKFIKPILEKMDGTEELLVKLNREDLLRKQRTFDNGSIPHQIHLGELHAILRRQEDFYPFLKDNREKIEKILTFRIPYYVGPLARGNSRFAWMTRKSEETITPWNFEEVVDKGASAQSFIERMTNFDKNLPNEKVLPKHSLLYEYFTVYNELTKVKYVTEGMRKPAFLSGEQKKAIVDLLFKTNRKVTVKQLKEDYFKKIECFDSVEISGVEDRFNASLGTYHDLLKIIKDKDFLDNEENEDILEDIVLTLTLFEDREMIEERLKTYAHLFDDKVMKQLKRRRYTGWGRLSRKLINGIRDKQSGKTILDFLKSDGFANRNFMQLIHDDSLTFKEDIQKAQVSGQGDSLHEHIANLAGSPAIKKGILQTVKVVDELVKVMGRHKPENIVIEMARENQTTQKGQKNSRERMKRIEEGIKELGSQILKEHPVENTQLQNEKLYLYYLQNGRDMYVDQELDINRLSDYDVDHIVPQSFLKDDSIDNKVLTRSDKARGKSDNVPSEEVVKKMKNYWRQLLNAKLITQRKFDNLTKAERGGLSELDKAGFIKRQLVETRQITKHVAQILDSRMNTKYDENDKLIREVKVITLKSKLVSDFRKDFQFYKVREINNYHHAHDAYLNAVVGTALIKKYPKLESEFVYGDYKVYDVRKMIAKSEQEIGKATAKYFFYSNIMNFFKTEITLANGEIRKRPLIETNGETGEIVWDKGRDFATVRKVLSMPQVNIVKKTEVQTGGFSKESILPKRNSDKLIARKKDWDPKKYGGFDSPTVAYSVLVVAKVEKGKSKKLKSVKELLGITIMERSSFEKNPIDFLEAKGYKEVKKDLIIKLPKYSLFELENGRKRMLASAGELQKGNELALPSKYVNFLYLASHYEKLKGSPEDNEQKQLFVEQHKHYLDEIIEQISEFSKRVILADANLDKVLSAYNKHRDKPIREQAENIIHLFTLTNLGAPAAFKYFDTTIDRKRYTSTKEVLDATLIHQSITGLYETRIDLSQLGGDGGGGSGGSGGTLNLEDEYRLYETSAEPEVSPGSTWLSDFPQAWAETGGMGLAVRQAPLIIPLKATSTPVSIKQYPMSQEAKLGIKPHIQRLLDQGILVPCQSPWNTPLLPVKKPGTNDYRPVQDLREVNKRVEDIHPTVPNPYNLLSGLPPSHRWYTVLDLKDAFFCLRLHPTSQPLFAFEWRDPGMGISGQLTWTRLPQGFKNSPTLFNEALHRDLADFRIQHPDLILLQYVDDILLAATSELDCQQGTRALLLTLGNLGYRASAKKAQLCQKQVKYLGYLLKEGQRWLTEARKETVMGQPTPKTPRQLREFLGKAGFCRLFIPGFAEMAAPLYPLTKPGTLFNWGPDQQKAYQEIKQALLTAPALGLPDLTKPFELFVDEKQGYAKGVLTQKLGPWRRPVAYLSKKLDPVAAGWPPCLRMVAAIAVLRKDAGKLTMGQPLVILAPHAVEALVKQPPDRWLSNARMTHYQAMLLDTDRVQFGPVVALNPATLLPLPEEGAPHDCLEILAETHGTRPDLTDQPIPDADHTWYTDGSSFLQEGQRKAGAAVTTETEVIWARALPAGTSAQRAELIALTQALKMAEGKRLNVYTDSRYAFATAHIHGEIYRRRGWLTSEGREIKNKSEILALLKALFLPKRLSIIHCLGHQKGDSAEARGNRLADQAAREAAIKTPPDTSTLLAGKRTADGSEFEKRTADGSEFESPKKKAKVE

SEQ ID NO: 1898 - protein, 2093 aa, synthetic construct
MPAAKRVKLDGGDKKYSIGLDIGTNSVGWAVITDEYKVPSKKFKVLGNTDRHSIKKNLIGALLFDSGETAEATRLKRTARRRYTRRKNRICYLQEIFSNEMAKVDDSFFHRLEESFLVEEDKKHERHPIFGNIVDEVAYHEKYPTIYHLRKKLVDSTDKADLRLIYLALAHMIKFRGHFLIEGDLNPDNSDVDKLFIQLVQTYNQLFEENPINASGVDAKAILSARLSKSRRLENLIAQLPGEKKNGLFGNLIALSLGLTPNFKSNFDLAEDAKLQLSKDTYDDDLDNLLAQIGDQYADLFLAAKNLSDAILLSDILRVNTEITKAPLSASMIKRYDEHHQDLTLLKALVRQQLPEKYKEIFFDQSKNGYAGYIDGGASQEEFYKFIKPILEKMDGTEELLVKLNREDLLRKQRTFDNGSIPHQIHLGELHAILRRQEDFYPFLKDNREKIEKILTFRIPYYVGPLARGNSRFAWMTRKSEETITPWNFEEVVDKGASAQSFIERMTNFDKNLPNEKVLPKHSLLYEYFTVYNELTKVKYVTEGMRKPAFLSGEQKKAIVDLLFKTNRKVTVKQLKEDYFKKIECFDSVEISGVEDRFNASLGTYHDLLKIIKDKDFLDNEENEDILEDIVLTLTLFEDREMIEERLKTYAHLFDDKVMKQLKRRRYTGWGRLSRKLINGIRDKQSGKTILDFLKSDGFANRNFMQLIHDDSLTFKEDIQKAQVSGQGDSLHEHIANLAGSPAIKKGILQTVKVVDELVKVMGRHKPENIVIEMARENQTTQKGQKNSRERMKRIEEGIKELGSQILKEHPVENTQLQNEKLYLYYLQNGRDMYVDQELDINRLSDYDVDHIVPQSFLKDDSIDNKVLTRSDKARGKSDNVPSEEVVKKMKNYWRQLLNAKLITQRKFDNLTKAERGGLSELDKAGFIKRQLVETRQITKHVAQILDSRMNTKYDENDKLIREVKVITLKSKLVSDFRKDFQFYKVREINNYHHAHDAYLNAVVGTALIKKYPKLESEFVYGDYKVYDVRKMIAKSEQEIGKATAKYFFYSNIMNFFKTEITLANGEIRKRPLIETNGETGEIVWDKGRDFATVRKVLSMPQVNIVKKTEVQTGGFSKESILPKRNSDKLIARKKDWDPKKYGGFDSPTVAYSVLVVAKVEKGKSKKLKSVKELLGITIMERSSFEKNPIDFLEAKGYKEVKKDLIIKLPKYSLFELENGRKRMLASAGELQKGNELALPSKYVNFLYLASHYEKLKGSPEDNEQKQLFVEQHKHYLDEIIEQISEFSKRVILADANLDKVLSAYNKHRDKPIREQAENIIHLFTLTNLGAPAAFKYFDTTIDRKRYTSTKEVLDATLIHQSITGLYETRIDLSQLGGDGGEAAAKGSSGGTLNLEDEYRLYETSAEPEVSPGSTWLSDFPQAWAETGGMGLAVRQAPLIIPLKATSTPVSIKQYPMSQEAKLGIKPHIQRLLDQGILVPCQSPWNTPLLPVKKPGTNDYRPVQDLREVNKRVEDIHPTVPNPYNLLSGLPPSHRWYTVLDLKDAFFCLRLHPTSQPLFAFEWRDPGMGISGQLTWTRLPQGFKNSPTLFNEALHRDLADFRIQHPDLILLQYVDDILLAATSELDCQQGTRALLLTLGNLGYRASAKKAQLCQKQVKYLGYLLKEGQRWLTEARKETVMGQPTPKTPRQLREFLGKAGFCRLFIPGFAEMAAPLYPLTKPGTLFNWGPDQQKAYQEIKQALLTAPALGLPDLTKPFELFVDEKQGYAKGVLTQKLGPWRRPVAYLSKKLDPVAAGWPPCLRMVAAIAVLRKDAGKLTMGQPLVILAPHAVEALVKQPPDRWLSNARMTHYQAMLLDTDRVQFGPVVALNPATLLPLPEEGAPHDCLEILAETHGTRPDLTDQPIPDADHTWYTDGSSFLQEGQRKAGAAVTTETEVIWARALPAGTSAQRAELIALTQALKMAEGKRLNVYTDSRYAFATAHIHGEIYRRRGWLTSEGREIKNKSEILALLKALFLPKRLSIIHCLGHQKGDSAEARGNRLADQAAREAAIKTPPDTSTLLAGKRTADGSEFEKRTADGSEFESPKKKAKVE

SEQ ID NO: 1899 - protein, 2094 aa, synthetic construct
MPAAKRVKLDGGDKKYSIGLDIGTNSVGWAVITDEYKVPSKKFKVLGNTDRHSIKKNLIGALLFDSGETAEATRLKRTARRRYTRRKNRICYLQEIFSNEMAKVDDSFFHRLEESFLVEEDKKHERHPIFGNIVDEVAYHEKYPTIYHLRKKLVDSTDKADLRLIYLALAHMIKFRGHFLIEGDLNPDNSDVDKLFIQLVQTYNQLFEENPINASGVDAKAILSARLSKSRRLENLIAQLPGEKKNGLFGNLIALSLGLTPNFKSNFDLAEDAKLQLSKDTYDDDLDNLLAQIGDQYADLFLAAKNLSDAILLSDILRVNTEITKAPLSASMIKRYDEHHQDLTLLKALVRQQLPEKYKEIFFDQSKNGYAGYIDGGASQEEFYKFIKPILEKMDGTEELLVKLNREDLLRKQRTFDNGSIPHQIHLGELHAILRRQEDFYPFLKDNREKIEKILTFRIPYYVGPLARGNSRFAWMTRKSEETITPWNFEEVVDKGASAQSFIERMTNFDKNLPNEKVLPKHSLLYEYFTVYNELTKVKYVTEGMRKPAFLSGEQKKAIVDLLFKTNRKVTVKQLKEDYFKKIECFDSVEISGVEDRFNASLGTYHDLLKIIKDKDFLDNEENEDILEDIVLTLTLFEDREMIEERLKTYAHLFDDKVMKQLKRRRYTGWGRLSRKLINGIRDKQSGKTILDFLKSDGFANRNFMQLIHDDSLTFKEDIQKAQVSGQGDSLHEHIANLAGSPAIKKGILQTVKVVDELVKVMGRHKPENIVIEMARENQTTQKGQKNSRERMKRIEEGIKELGSQILKEHPVENTQLQNEKLYLYYLQNGRDMYVDQELDINRLSDYDVDHIVPQSFLKDDSIDNKVLTRSDKARGKSDNVPSEEVVKKMKNYWRQLLNAKLITQRKFDNLTKAERGGLSELDKAGFIKRQLVETRQITKHVAQILDSRMNTKYDENDKLIREVKVITLKSKLVSDFRKDFQFYKVREINNYHHAHDAYLNAVVGTALIKKYPKLESEFVYGDYKVYDVRKMIAKSEQEIGKATAKYFFYSNIMNFFKTEITLANGEIRKRPLIETNGETGEIVWDKGRDFATVRKVLSMPQVNIVKKTEVQTGGFSKESILPKRNSDKLIARKKDWDPKKYGGFDSPTVAYSVLVVAKVEKGKSKKLKSVKELLGITIMERSSFEKNPIDFLEAKGYKEVKKDLIIKLPKYSLFELENGRKRMLASAGELQKGNELALPSKYVNFLYLASHYEKLKGSPEDNEQKQLFVEQHKHYLDEIIEQISEFSKRVILADANLDKVLSAYNKHRDKPIREQAENIIHLFTLTNLGAPAAFKYFDTTIDRKRYTSTKEVLDATLIHQSITGLYETRIDLSQLGGDGGGGSPAPGGGGGTLNLEDEYRLYETSAEPEVSPGSTWLSDFPQAWAETGGMGLAVRQAPLIIPLKATSTPVSIKQYPMSQEAKLGIKPHIQRLLDQGILVPCQSPWNTPLLPVKKPGTNDYRPVQDLREVNKRVEDIHPTVPNPYNLLSGLPPSHRWYTVLDLKDAFFCLRLHPTSQPLFAFEWRDPGMGISGQLTWTRLPQGFKNSPTLFNEALHRDLADFRIQHPDLILLQYVDDILLAATSELDCQQGTRALLLTLGNLGYRASAKKAQLCQKQVKYLGYLLKEGQRWLTEARKETVMGQPTPKTPRQLREFLGKAGFCRLFIPGFAEMAAPLYPLTKPGTLFNWGPDQQKAYQEIKQALLTAPALGLPDLTKPFELFVDEKQGYAKGVLTQKLGPWRRPVAYLSKKLDPVAAGWPPCLRMVAAIAVLRKDAGKLTMGQPLVILAPHAVEALVKQPPDRWLSNARMTHYQAMLLDTDRVQFGPVVALNPATLLPLPEEGAPHDCLEILAETHGTRPDLTDQPIPDADHTWYTDGSSFLQEGQRKAGAAVTTETEVIWARALPAGTSAQRAELIALTQALKMAEGKRLNVYTDSRYAFATAHIHGEIYRRRGWLTSEGREIKNKSEILALLKALFLPKRLSIIHCLGHQKGDSAEARGNRLADQAAREAAIKTPPDTSTLLAGKRTADGSEFEKRTADGSEFESPKKKAKVE

SEQ ID NO: 1900 - protein, 2091 aa, synthetic construct
MPAAKRVKLDGGDKKYSIGLDIGTNSVGWAVITDEYKVPSKKFKVLGNTDRHSIKKNLIGALLFDSGETAEATRLKRTARRRYTRRKNRICYLQEIFSNEMAKVDDSFFHRLEESFLVEEDKKHERHPIFGNIVDEVAYHEKYPTIYHLRKKLVDSTDKADLRLIYLALAHMIKFRGHFLIEGDLNPDNSDVDKLFIQLVQTYNQLFEENPINASGVDAKAILSARLSKSRRLENLIAQLPGEKKNGLFGNLIALSLGLTPNFKSNFDLAEDAKLQLSKDTYDDDLDNLLAQIGDQYADLFLAAKNLSDAILLSDILRVNTEITKAPLSASMIKRYDEHHQDLTLLKALVRQQLPEKYKEIFFDQSKNGYAGYIDGGASQEEFYKFIKPILEKMDGTEELLVKLNREDLLRKQRTFDNGSIPHQIHLGELHAILRRQEDFYPFLKDNREKIEKILTFRIPYYVGPLARGNSRFAWMTRKSEETITPWNFEEVVDKGASAQSFIERMTNFDKNLPNEKVLPKHSLLYEYFTVYNELTKVKYVTEGMRKPAFLSGEQKKAIVDLLFKTNRKVTVKQLKEDYFKKIECFDSVEISGVEDRFNASLGTYHDLLKIIKDKDFLDNEENEDILEDIVLTLTLFEDREMIEERLKTYAHLFDDKVMKQLKRRRYTGWGRLSRKLINGIRDKQSGKTILDFLKSDGFANRNFMQLIHDDSLTFKEDIQKAQVSGQGDSLHEHIANLAGSPAIKKGILQTVKVVDELVKVMGRHKPENIVIEMARENQTTQKGQKNSRERMKRIEEGIKELGSQILKEHPVENTQLQNEKLYLYYLQNGRDMYVDQELDINRLSDYDVDHIVPQSFLKDDSIDNKVLTRSDKARGKSDNVPSEEVVKKMKNYWRQLLNAKLITQRKFDNLTKAERGGLSELDKAGFIKRQLVETRQITKHVAQILDSRMNTKYDENDKLIREVKVITLKSKLVSDFRKDFQFYKVREINNYHHAHDAYLNAVVGTALIKKYPKLESEFVYGDYKVYDVRKMIAKSEQEIGKATAKYFFYSNIMNFFKTEITLANGEIRKRPLIETNGETGEIVWDKGRDFATVRKVLSMPQVNIVKKTEVQTGGFSKESILPKRNSDKLIARKKDWDPKKYGGFDSPTVAYSVLVVAKVEKGKSKKLKSVKELLGITIMERSSFEKNPIDFLEAKGYKEVKKDLIIKLPKYSLFELENGRKRMLASAGELQKGNELALPSKYVNFLYLASHYEKLKGSPEDNEQKQLFVEQHKHYLDEIIEQISEFSKRVILADANLDKVLSAYNKHRDKPIREQAENIIHLFTLTNLGAPAAFKYFDTTIDRKRYTSTKEVLDATLIHQSITGLYETRIDLSQLGGDGGPAPGSSGGTLNLEDEYRLYETSAEPEVSPGSTWLSDFPQAWAETGGMGLAVRQAPLIIPLKATSTPVSIKQYPMSQEAKLGIKPHIQRLLDQGILVPCQSPWNTPLLPVKKPGTNDYRPVQDLREVNKRVEDIHPTVPNPYNLLSGLPPSHRWYTVLDLKDAFFCLRLHPTSQPLFAFEWRDPGMGISGQLTWTRLPQGFKNSPTLFNEALHRDLADFRIQHPDLILLQYVDDILLAATSELDCQQGTRALLLTLGNLGYRASAKKAQLCQKQVKYLGYLLKEGQRWLTEARKETVMGQPTPKTPRQLREFLGKAGFCRLFIPGFAEMAAPLYPLTKPGTLFNWGPDQQKAYQEIKQALLTAPALGLPDLTKPFELFVDEKQGYAKGVLTQKLGPWRRPVAYLSKKLDPVAAGWPPCLRMVAAIAVLRKDAGKLTMGQPLVILAPHAVEALVKQPPDRWLSNARMTHYQAMLLDTDRVQFGPVVALNPATLLPLPEEGAPHDCLEILAETHGTRPDLTDQPIPDADHTWYTDGSSFLQEGQRKAGAAVTTETEVIWARALPAGTSAQRAELIALTQALKMAEGKRLNVYTDSRYAFATAHIHGEIYRRRGWLTSEGREIKNKSEILALLKALFLPKRLSIIHCLGHQKGDSAEARGNRLADQAAREAAIKTPPDTSTLLAGKRTADGSEFEKRTADGSEFESPKKKAKVE

SEQ ID NO: 1901 - protein, 2096 aa, synthetic construct
MPAAKRVKLDGGDKKYSIGLDIGTNSVGWAVITDEYKVPSKKFKVLGNTDRHSIKKNLIGALLFDSGETAEATRLKRTARRRYTRRKNRICYLQEIFSNEMAKVDDSFFHRLEESFLVEEDKKHERHPIFGNIVDEVAYHEKYPTIYHLRKKLVDSTDKADLRLIYLALAHMIKFRGHFLIEGDLNPDNSDVDKLFIQLVQTYNQLFEENPINASGVDAKAILSARLSKSRRLENLIAQLPGEKKNGLFGNLIALSLGLTPNFKSNFDLAEDAKLQLSKDTYDDDLDNLLAQIGDQYADLFLAAKNLSDAILLSDILRVNTEITKAPLSASMIKRYDEHHQDLTLLKALVRQQLPEKYKEIFFDQSKNGYAGYIDGGASQEEFYKFIKPILEKMDGTEELLVKLNREDLLRKQRTFDNGSIPHQIHLGELHAILRRQEDFYPFLKDNREKIEKILTFRIPYYVGPLARGNSRFAWMTRKSEETITPWNFEEVVDKGASAQSFIERMTNFDKNLPNEKVLPKHSLLYEYFTVYNELTKVKYVTEGMRKPAFLSGEQKKAIVDLLFKTNRKVTVKQLKEDYFKKIECFDSVEISGVEDRFNASLGTYHDLLKIIKDKDFLDNEENEDILEDIVLTLTLFEDREMIEERLKTYAHLFDDKVMKQLKRRRYTGWGRLSRKLINGIRDKQSGKTILDFLKSDGFANRNFMQLIHDDSLTFKEDIQKAQVSGQGDSLHEHIANLAGSPAIKKGILQTVKVVDELVKVMGRHKPENIVIEMARENQTTQKGQKNSRERMKRIEEGIKELGSQILKEHPVENTQLQNEKLYLYYLQNGRDMYVDQELDINRLSDYDVDHIVPQSFLKDDSIDNKVLTRSDKARGKSDNVPSEEVVKKMKNYWRQLLNAKLITQRKFDNLTKAERGGLSELDKAGFIKRQLVETRQITKHVAQILDSRMNTKYDENDKLIREVKVITLKSKLVSDFRKDFQFYKVREINNYHHAHDAYLNAVVGTALIKKYPKLESEFVYGDYKVYDVRKMIAKSEQEIGKATAKYFFYSNIMNFFKTEITLANGEIRKRPLIETNGETGEIVWDKGRDFATVRKVLSMPQVNIVKKTEVQTGGFSKESILPKRNSDKLIARKKDWDPKKYGGFDSPTVAYSVLVVAKVEKGKSKKLKSVKELLGITIMERSSFEKNPIDFLEAKGYKEVKKDLIIKLPKYSLFELENGRKRMLASAGELQKGNELALPSKYVNFLYLASHYEKLKGSPEDNEQKQLFVEQHKHYLDEIIEQISEFSKRVILADANLDKVLSAYNKHRDKPIREQAENIIHLFTLTNLGAPAAFKYFDTTIDRKRYTSTKEVLDATLIHQSITGLYETRIDLSQLGGDGGGSSGGSEAAAKGGTLNLEDEYRLYETSAEPEVSPGSTWLSDFPQAWAETGGMGLAVRQAPLIIPLKATSTPVSIKQYPMSQEAKLGIKPHIQRLLDQGILVPCQSPWNTPLLPVKKPGTNDYRPVQDLREVNKRVEDIHPTVPNPYNLLSGLPPSHRWYTVLDLKDAFFCLRLHPTSQPLFAFEWRDPGMGISGQLTWTRLPQGFKNSPTLFNEALHRDLADFRIQHPDLILLQYVDDILLAATSELDCQQGTRALLLTLGNLGYRASAKKAQLCQKQVKYLGYLLKEGQRWLTEARKETVMGQPTPKTPRQLREFLGKAGFCRLFIPGFAEMAAPLYPLTKPGTLFNWGPDQQKAYQEIKQALLTAPALGLPDLTKPFELFVDEKQGYAKGVLTQKLGPWRRPVAYLSKKLDPVAAGWPPCLRMVAAIAVLRKDAGKLTMGQPLVILAPHAVEALVKQPPDRWLSNARMTHYQAMLLDTDRVQFGPVVALNPATLLPLPEEGAPHDCLEILAETHGTRPDLTDQPIPDADHTWYTDGSSFLQEGQRKAGAAVTTETEVIWARALPAGTSAQRAELIALTQALKMAEGKRLNVYTDSRYAFATAHIHGEIYRRRGWLTSEGREIKNKSEILALLKALFLPKRLSIIHCLGHQKGDSAEARGNRLADQAAREAAIKTPPDTSTLLAGKRTADGSEFEKRTADGSEFESPKKKAKVE

SEQ ID NO: 1902 - protein, 2094 aa, synthetic construct
MPAAKRVKLDGGDKKYSIGLDIGTNSVGWAVITDEYKVPSKKFKVLGNTDRHSIKKNLIGALLFDSGETAEATRLKRTARRRYTRRKNRICYLQEIFSNEMAKVDDSFFHRLEESFLVEEDKKHERHPIFGNIVDEVAYHEKYPTIYHLRKKLVDSTDKADLRLIYLALAHMIKFRGHFLIEGDLNPDNSDVDKLFIQLVQTYNQLFEENPINASGVDAKAILSARLSKSRRLENLIAQLPGEKKNGLFGNLIALSLGLTPNFKSNFDLAEDAKLQLSKDTYDDDLDNLLAQIGDQYADLFLAAKNLSDAILLSDILRVNTEITKAPLSASMIKRYDEHHQDLTLLKALVRQQLPEKYKEIFFDQSKNGYAGYIDGGASQEEFYKFIKPILEKMDGTEELLVKLNREDLLRKQRTFDNGSIPHQIHLGELHAILRRQEDFYPFLKDNREKIEKILTFRIPYYVGPLARGNSRFAWMTRKSEETITPWNFEEVVDKGASAQSFIERMTNFDKNLPNEKVLPKHSLLYEYFTVYNELTKVKYVTEGMRKPAFLSGEQKKAIVDLLFKTNRKVTVKQLKEDYFKKIECFDSVEISGVEDRFNASLGTYHDLLKIIKDKDFLDNEENEDILEDIVLTLTLFEDREMIEERLKTYAHLFDDKVMKQLKRRRYTGWGRLSRKLINGIRDKQSGKTILDFLKSDGFANRNFMQLIHDDSLTFKEDIQKAQVSGQGDSLHEHIANLAGSPAIKKGILQTVKVVDELVKVMGRHKPENIVIEMARENQTTQKGQKNSRERMKRIEEGIKELGSQILKEHPVENTQLQNEKLYLYYLQNGRDMYVDQELDINRLSDYDVDHIVPQSFLKDDSIDNKVLTRSDKARGKSDNVPSEEVVKKMKNYWRQLLNAKLITQRKFDNLTKAERGGLSELDKAGFIKRQLVETRQITKHVAQILDSRMNTKYDENDKLIREVKVITLKSKLVSDFRKDFQFYKVREINNYHHAHDAYLNAVVGTALIKKYPKLESEFVYGDYKVYDVRKMIAKSEQEIGKATAKYFFYSNIMNFFKTEITLANGEIRKRPLIETNGETGEIVWDKGRDFATVRKVLSMPQVNIVKKTEVQTGGFSKESILPKRNSDKLIARKKDWDPKKYGGFDSPTVAYSVLVVAKVEKGKSKKLKSVKELLGITIMERSSFEKNPIDFLEAKGYKEVKKDLIIKLPKYSLFELENGRKRMLASAGELQKGNELALPSKYVNFLYLASHYEKLKGSPEDNEQKQLFVEQHKHYLDEIIEQISEFSKRVILADANLDKVLSAYNKHRDKPIREQAENIIHLFTLTNLGAPAAFKYFDTTIDRKRYTSTKEVLDATLIHQSITGLYETRIDLSQLGGDGGPAPGGSGSSGGTLNLEDEYRLYETSAEPEVSPGSTWLSDFPQAWAETGGMGLAVRQAPLIIPLKATSTPVSIKQYPMSQEAKLGIKPHIQRLLDQGILVPCQSPWNTPLLPVKKPGTNDYRPVQDLREVNKRVEDIHPTVPNPYNLLSGLPPSHRWYTVLDLKDAFFCLRLHPTSQPLFAFEWRDPGMGISGQLTWTRLPQGFKNSPTLFNEALHRDLADFRIQHPDLILLQYVDDILLAATSELDCQQGTRALLLTLGNLGYRASAKKAQLCQKQVKYLGYLLKEGQRWLTEARKETVMGQPTPKTPRQLREFLGKAGFCRLFIPGFAEMAAPLYPLTKPGTLFNWGPDQQKAYQEIKQALLTAPALGLPDLTKPFELFVDEKQGYAKGVLTQKLGPWRRPVAYLSKKLDPVAAGWPPCLRMVAAIAVLRKDAGKLTMGQPLVILAPHAVEALVKQPPDRWLSNARMTHYQAMLLDTDRVQFGPVVALNPATLLPLPEEGAPHDCLEILAETHGTRPDLTDQPIPDADHTWYTDGSSFLQEGQRKAGAAVTTETEVIWARALPAGTSAQRAELIALTQALKMAEGKRLNVYTDSRYAFATAHIHGEIYRRRGWLTSEGREIKNKSEILALLKALFLPKRLSIIHCLGHQKGDSAEARGNRLADQAAREAAIKTPPDTSTLLAGKRTADGSEFEKRTADGSEFESPKKKAKVE

SEQ ID NO: 1903 - protein, 2094 aa, synthetic construct
MPAAKRVKLDGGDKKYSIGLDIGTNSVGWAVITDEYKVPSKKFKVLGNTDRHSIKKNLIGALLFDSGETAEATRLKRTARRRYTRRKNRICYLQEIFSNEMAKVDDSFFHRLEESFLVEEDKKHERHPIFGNIVDEVAYHEKYPTIYHLRKKLVDSTDKADLRLIYLALAHMIKFRGHFLIEGDLNPDNSDVDKLFIQLVQTYNQLFEENPINASGVDAKAILSARLSKSRRLENLIAQLPGEKKNGLFGNLIALSLGLTPNFKSNFDLAEDAKLQLSKDTYDDDLDNLLAQIGDQYADLFLAAKNLSDAILLSDILRVNTEITKAPLSASMIKRYDEHHQDLTLLKALVRQQLPEKYKEIFFDQSKNGYAGYIDGGASQEEFYKFIKPILEKMDGTEELLVKLNREDLLRKQRTFDNGSIPHQIHLGELHAILRRQEDFYPFLKDNREKIEKILTFRIPYYVGPLARGNSRFAWMTRKSEETITPWNFEEVVDKGASAQSFIERMTNFDKNLPNEKVLPKHSLLYEYFTVYNELTKVKYVTEGMRKPAFLSGEQKKAIVDLLFKTNRKVTVKQLKEDYFKKIECFDSVEISGVEDRFNASLGTYHDLLKIIKDKDFLDNEENEDILEDIVLTLTLFEDREMIEERLKTYAHLFDDKVMKQLKRRRYTGWGRLSRKLINGIRDKQSGKTILDFLKSDGFANRNFMQLIHDDSLTFKEDIQKAQVSGQGDSLHEHIANLAGSPAIKKGILQTVKVVDELVKVMGRHKPENIVIEMARENQTTQKGQKNSRERMKRIEEGIKELGSQILKEHPVENTQLQNEKLYLYYLQNGRDMYVDQELDINRLSDYDVDHIVPQSFLKDDSIDNKVLTRSDKARGKSDNVPSEEVVKKMKNYWRQLLNAKLITQRKFDNLTKAERGGLSELDKAGFIKRQLVETRQITKHVAQILDSRMNTKYDENDKLIREVKVITLKSKLVSDFRKDFQFYKVREINNYHHAHDAYLNAVVGTALIKKYPKLESEFVYGDYKVYDVRKMIAKSEQEIGKATAKYFFYSNIMNFFKTEITLANGEIRKRPLIETNGETGEIVWDKGRDFATVRKVLSMPQVNIVKKTEVQTGGFSKESILPKRNSDKLIARKKDWDPKKYGGFDSPTVAYSVLVVAKVEKGKSKKLKSVKELLGITIMERSSFEKNPIDFLEAKGYKEVKKDLIIKLPKYSLFELENGRKRMLASAGELQKGNELALPSKYVNFLYLASHYEKLKGSPEDNEQKQLFVEQHKHYLDEIIEQISEFSKRVILADANLDKVLSAYNKHRDKPIREQAENIIHLFTLTNLGAPAAFKYFDTTIDRKRYTSTKEVLDATLIHQSITGLYETRIDLSQLGGDGGGGSPAPGSSGGTLNLEDEYRLYETSAEPEVSPGSTWLSDFPQAWAETGGMGLAVRQAPLIIPLKATSTPVSIKQYPMSQEAKLGIKPHIQRLLDQGILVPCQSPWNTPLLPVKKPGTNDYRPVQDLREVNKRVEDIHPTVPNPYNLLSGLPPSHRWYTVLDLKDAFFCLRLHPTSQPLFAFEWRDPGMGISGQLTWTRLPQGFKNSPTLFNEALHRDLADFRIQHPDLILLQYVDDILLAATSELDCQQGTRALLLTLGNLGYRASAKKAQLCQKQVKYLGYLLKEGQRWLTEARKETVMGQPTPKTPRQLREFLGKAGFCRLFIPGFAEMAAPLYPLTKPGTLFNWGPDQQKAYQEIKQALLTAPALGLPDLTKPFELFVDEKQGYAKGVLTQKLGPWRRPVAYLSKKLDPVAAGWPPCLRMVAAIAVLRKDAGKLTMGQPLVILAPHAVEALVKQPPDRWLSNARMTHYQAMLLDTDRVQFGPVVALNPATLLPLPEEGAPHDCLEILAETHGTRPDLTDQPIPDADHTWYTDGSSFLQEGQRKAGAAVTTETEVIWARALPAGTSAQRAELIALTQALKMAEGKRLNVYTDSRYAFATAHIHGEIYRRRGWLTSEGREIKNKSEILALLKALFLPKRLSIIHCLGHQKGDSAEARGNRLADQAAREAAIKTPPDTSTLLAGKRTADGSEFEKRTADGSEFESPKKKAKVE

SEQ ID NO: 1904 - protein, 2091 aa, synthetic construct
MPAAKRVKLDGGDKKYSIGLDIGTNSVGWAVITDEYKVPSKKFKVLGNTDRHSIKKNLIGALLFDSGETAEATRLKRTARRRYTRRKNRICYLQEIFSNEMAKVDDSFFHRLEESFLVEEDKKHERHPIFGNIVDEVAYHEKYPTIYHLRKKLVDSTDKADLRLIYLALAHMIKFRGHFLIEGDLNPDNSDVDKLFIQLVQTYNQLFEENPINASGVDAKAILSARLSKSRRLENLIAQLPGEKKNGLFGNLIALSLGLTPNFKSNFDLAEDAKLQLSKDTYDDDLDNLLAQIGDQYADLFLAAKNLSDAILLSDILRVNTEITKAPLSASMIKRYDEHHQDLTLLKALVRQQLPEKYKEIFFDQSKNGYAGYIDGGASQEEFYKFIKPILEKMDGTEELLVKLNREDLLRKQRTFDNGSIPHQIHLGELHAILRRQEDFYPFLKDNREKIEKILTFRIPYYVGPLARGNSRFAWMTRKSEETITPWNFEEVVDKGASAQSFIERMTNFDKNLPNEKVLPKHSLLYEYFTVYNELTKVKYVTEGMRKPAFLSGEQKKAIVDLLFKTNRKVTVKQLKEDYFKKIECFDSVEISGVEDRFNASLGTYHDLLKIIKDKDFLDNEENEDILEDIVLTLTLFEDREMIEERLKTYAHLFDDKVMKQLKRRRYTGWGRLSRKLINGIRDKQSGKTILDFLKSDGFANRNFMQLIHDDSLTFKEDIQKAQVSGQGDSLHEHIANLAGSPAIKKGILQTVKVVDELVKVMGRHKPENIVIEMARENQTTQKGQKNSRERMKRIEEGIKELGSQILKEHPVENTQLQNEKLYLYYLQNGRDMYVDQELDINRLSDYDVDHIVPQSFLKDDSIDNKVLTRSDKARGKSDNVPSEEVVKKMKNYWRQLLNAKLITQRKFDNLTKAERGGLSELDKAGFIKRQLVETRQITKHVAQILDSRMNTKYDENDKLIREVKVITLKSKLVSDFRKDFQFYKVREINNYHHAHDAYLNAVVGTALIKKYPKLESEFVYGDYKVYDVRKMIAKSEQEIGKATAKYFFYSNIMNFFKTEITLANGEIRKRPLIETNGETGEIVWDKGRDFATVRKVLSMPQVNIVKKTEVQTGGFSKESILPKRNSDKLIARKKDWDPKKYGGFDSPTVAYSVLVVAKVEKGKSKKLKSVKELLGITIMERSSFEKNPIDFLEAKGYKEVKKDLIIKLPKYSLFELENGRKRMLASAGELQKGNELALPSKYVNFLYLASHYEKLKGSPEDNEQKQLFVEQHKHYLDEIIEQISEFSKRVILADANLDKVLSAYNKHRDKPIREQAENIIHLFTLTNLGAPAAFKYFDTTIDRKRYTSTKEVLDATLIHQSITGLYETRIDLSQLGGDGGGSSGGGGGTLNLEDEYRLYETSAEPEVSPGSTWLSDFPQAWAETGGMGLAVRQAPLIIPLKATSTPVSIKQYPMSQEAKLGIKPHIQRLLDQGILVPCQSPWNTPLLPVKKPGTNDYRPVQDLREVNKRVEDIHPTVPNPYNLLSGLPPSHRWYTVLDLKDAFFCLRLHPTSQPLFAFEWRDPGMGISGQLTWTRLPQGFKNSPTLFNEALHRDLADFRIQHPDLILLQYVDDILLAATSELDCQQGTRALLLTLGNLGYRASAKKAQLCQKQVKYLGYLLKEGQRWLTEARKETVMGQPTPKTPRQLREFLGKAGFCRLFIPGFAEMAAPLYPLTKPGTLFNWGPDQQKAYQEIKQALLTAPALGLPDLTKPFELFVDEKQGYAKGVLTQKLGPWRRPVAYLSKKLDPVAAGWPPCLRMVAAIAVLRKDAGKLTMGQPLVILAPHAVEALVKQPPDRWLSNARMTHYQAMLLDTDRVQFGPVVALNPATLLPLPEEGAPHDCLEILAETHGTRPDLTDQPIPDADHTWYTDGSSFLQEGQRKAGAAVTTETEVIWARALPAGTSAQRAELIALTQALKMAEGKRLNVYTDSRYAFATAHIHGEIYRRRGWLTSEGREIKNKSEILALLKALFLPKRLSIIHCLGHQKGDSAEARGNRLADQAAREAAIKTPPDTSTLLAGKRTADGSEFEKRTADGSEFESPKKKAKVE

SEQ ID NO: 1905 - protein, 2094 aa, synthetic construct
MPAAKRVKLDGGDKKYSIGLDIGTNSVGWAVITDEYKVPSKKFKVLGNTDRHSIKKNLIGALLFDSGETAEATRLKRTARRRYTRRKNRICYLQEIFSNEMAKVDDSFFHRLEESFLVEEDKKHERHPIFGNIVDEVAYHEKYPTIYHLRKKLVDSTDKADLRLIYLALAHMIKFRGHFLIEGDLNPDNSDVDKLFIQLVQTYNQLFEENPINASGVDAKAILSARLSKSRRLENLIAQLPGEKKNGLFGNLIALSLGLTPNFKSNFDLAEDAKLQLSKDTYDDDLDNLLAQIGDQYADLFLAAKNLSDAILLSDILRVNTEITKAPLSASMIKRYDEHHQDLTLLKALVRQQLPEKYKEIFFDQSKNGYAGYIDGGASQEEFYKFIKPILEKMDGTEELLVKLNREDLLRKQRTFDNGSIPHQIHLGELHAILRRQEDFYPFLKDNREKIEKILTFRIPYYVGPLARGNSRFAWMTRKSEETITPWNFEEVVDKGASAQSFIERMTNFDKNLPNEKVLPKHSLLYEYFTVYNELTKVKYVTEGMRKPAFLSGEQKKAIVDLLFKTNRKVTVKQLKEDYFKKIECFDSVEISGVEDRFNASLGTYHDLLKIIKDKDFLDNEENEDILEDIVLTLTLFEDREMIEERLKTYAHLFDDKVMKQLKRRRYTGWGRLSRKLINGIRDKQSGKTILDFLKSDGFANRNFMQLIHDDSLTFKEDIQKAQVSGQGDSLHEHIANLAGSPAIKKGILQTVKVVDELVKVMGRHKPENIVIEMARENQTTQKGQKNSRERMKRIEEGIKELGSQILKEHPVENTQLQNEKLYLYYLQNGRDMYVDQELDINRLSDYDVDHIVPQSFLKDDSIDNKVLTRSDKARGKSDNVPSEEVVKKMKNYWRQLLNAKLITQRKFDNLTKAERGGLSELDKAGFIKRQLVETRQITKHVAQILDSRMNTKYDENDKLIREVKVITLKSKLVSDFRKDFQFYKVREINNYHHAHDAYLNAVVGTALIKKYPKLESEFVYGDYKVYDVRKMIAKSEQEIGKATAKYFFYSNIMNFFKTEITLANGEIRKRPLIETNGETGEIVWDKGRDFATVRKVLSMPQVNIVKKTEVQTGGFSKESILPKRNSDKLIARKKDWDPKKYGGFDSPTVAYSVLVVAKVEKGKSKKLKSVKELLGITIMERSSFEKNPIDFLEAKGYKEVKKDLIIKLPKYSLFELENGRKRMLASAGELQKGNELALPSKYVNFLYLASHYEKLKGSPEDNEQKQLFVEQHKHYLDEIIEQISEFSKRVILADANLDKVLSAYNKHRDKPIREQAENIIHLFTLTNLGAPAAFKYFDTTIDRKRYTSTKEVLDATLIHQSITGLYETRIDLSQLGGDGGGGGGSSPAPGGTLNLEDEYRLYETSAEPEVSPGSTWLSDFPQAWAETGGMGLAVRQAPLIIPLKATSTPVSIKQYPMSQEAKLGIKPHIQRLLDQGILVPCQSPWNTPLLPVKKPGTNDYRPVQDLREVNKRVEDIHPTVPNPYNLLSGLPPSHRWYTVLDLKDAFFCLRLHPTSQPLFAFEWRDPGMGISGQLTWTRLPQGFKNSPTLFNEALHRDLADFRIQHPDLILLQYVDDILLAATSELDCQQGTRALLLTLGNLGYRASAKKAQLCQKQVKYLGYLLKEGQRWLTEARKETVMGQPTPKTPRQLREFLGKAGFCRLFIPGFAEMAAPLYPLTKPGTLFNWGPDQQKAYQEIKQALLTAPALGLPDLTKPFELFVDEKQGYAKGVLTQKLGPWRRPVAYLSKKLDPVAAGWPPCLRMVAAIAVLRKDAGKLTMGQPLVILAPHAVEALVKQPPDRWLSNARMTHYQAMLLDTDRVQFGPVVALNPATLLPLPEEGAPHDCLEILAETHGTRPDLTDQPIPDADHTWYTDGSSFLQEGQRKAGAAVTTETEVIWARALPAGTSAQRAELIALTQALKMAEGKRLNVYTDSRYAFATAHIHGEIYRRRGWLTSEGREIKNKSEILALLKALFLPKRLSIIHCLGHQKGDSAEARGNRLADQAAREAAIKTPPDTSTLLAGKRTADGSEFEKRTADGSEFESPKKKAKVE

SEQ ID NO: 1906 - protein, 2096 aa, synthetic construct
MPAAKRVKLDGGDKKYSIGLDIGTNSVGWAVITDEYKVPSKKFKVLGNTDRHSIKKNLIGALLFDSGETAEATRLKRTARRRYTRRKNRICYLQEIFSNEMAKVDDSFFHRLEESFLVEEDKKHERHPIFGNIVDEVAYHEKYPTIYHLRKKLVDSTDKADLRLIYLALAHMIKFRGHFLIEGDLNPDNSDVDKLFIQLVQTYNQLFEENPINASGVDAKAILSARLSKSRRLENLIAQLPGEKKNGLFGNLIALSLGLTPNFKSNFDLAEDAKLQLSKDTYDDDLDNLLAQIGDQYADLFLAAKNLSDAILLSDILRVNTEITKAPLSASMIKRYDEHHQDLTLLKALVRQQLPEKYKEIFFDQSKNGYAGYIDGGASQEEFYKFIKPILEKMDGTEELLVKLNREDLLRKQRTFDNGSIPHQIHLGELHAILRRQEDFYPFLKDNREKIEKILTFRIPYYVGPLARGNSRFAWMTRKSEETITPWNFEEVVDKGASAQSFIERMTNFDKNLPNEKVLPKHSLLYEYFTVYNELTKVKYVTEGMRKPAFLSGEQKKAIVDLLFKTNRKVTVKQLKEDYFKKIECFDSVEISGVEDRFNASLGTYHDLLKIIKDKDFLDNEENEDILEDIVLTLTLFEDREMIEERLKTYAHLFDDKVMKQLKRRRYTGWGRLSRKLINGIRDKQSGKTILDFLKSDGFANRNFMQLIHDDSLTFKEDIQKAQVSGQGDSLHEHIANLAGSPAIKKGILQTVKVVDELVKVMGRHKPENIVIEMARENQTTQKGQKNSRERMKRIEEGIKELGSQILKEHPVENTQLQNEKLYLYYLQNGRDMYVDQELDINRLSDYDVDHIVPQSFLKDDSIDNKVLTRSDKARGKSDNVPSEEVVKKMKNYWRQLLNAKLITQRKFDNLTKAERGGLSELDKAGFIKRQLVETRQITKHVAQILDSRMNTKYDENDKLIREVKVITLKSKLVSDFRKDFQFYKVREINNYHHAHDAYLNAVVGTALIKKYPKLESEFVYGDYKVYDVRKMIAKSEQEIGKATAKYFFYSNIMNFFKTEITLANGEIRKRPLIETNGETGEIVWDKGRDFATVRKVLSMPQVNIVKKTEVQTGGFSKESILPKRNSDKLIARKKDWDPKKYGGFDSPTVAYSVLVVAKVEKGKSKKLKSVKELLGITIMERSSFEKNPIDFLEAKGYKEVKKDLIIKLPKYSLFELENGRKRMLASAGELQKGNELALPSKYVNFLYLASHYEKLKGSPEDNEQKQLFVEQHKHYLDEIIEQISEFSKRVILADANLDKVLSAYNKHRDKPIREQAENIIHLFTLTNLGAPAAFKYFDTTIDRKRYTSTKEVLDATLIHQSITGLYETRIDLSQLGGDGGGGGGGSEAAAKGGTLNLEDEYRLYETSAEPEVSPGSTWLSDFPQAWAETGGMGLAVRQAPLIIPLKATSTPVSIKQYPMSQEAKLGIKPHIQRLLDQGILVPCQSPWNTPLLPVKKPGTNDYRPVQDLREVNKRVEDIHPTVPNPYNLLSGLPPSHRWYTVLDLKDAFFCLRLHPTSQPLFAFEWRDPGMGISGQLTWTRLPQGFKNSPTLFNEALHRDLADFRIQHPDLILLQYVDDILLAATSELDCQQGTRALLLTLGNLGYRASAKKAQLCQKQVKYLGYLLKEGQRWLTEARKETVMGQPTPKTPRQLREFLGKAGFCRLFIPGFAEMAAPLYPLTKPGTLFNWGPDQQKAYQEIKQALLTAPALGLPDLTKPFELFVDEKQGYAKGVLTQKLGPWRRPVAYLSKKLDPVAAGWPPCLRMVAAIAVLRKDAGKLTMGQPLVILAPHAVEALVKQPPDRWLSNARMTHYQAMLLDTDRVQFGPVVALNPATLLPLPEEGAPHDCLEILAETHGTRPDLTDQPIPDADHTWYTDGSSFLQEGQRKAGAAVTTETEVIWARALPAGTSAQRAELIALTQALKMAEGKRLNVYTDSRYAFATAHIHGEIYRRRGWLTSEGREIKNKSEILALLKALFLPKRLSIIHCLGHQKGDSAEARGNRLADQAAREAAIKTPPDTSTLLAGKRTADGSEFEKRTADGSEFESPKKKAKVE

SEQ ID NO: 1907 - protein, 2096 aa, synthetic construct
MPAAKRVKLDGGDKKYSIGLDIGTNSVGWAVITDEYKVPSKKFKVLGNTDRHSIKKNLIGALLFDSGETAEATRLKRTARRRYTRRKNRICYLQEIFSNEMAKVDDSFFHRLEESFLVEEDKKHERHPIFGNIVDEVAYHEKYPTIYHLRKKLVDSTDKADLRLIYLALAHMIKFRGHFLIEGDLNPDNSDVDKLFIQLVQTYNQLFEENPINASGVDAKAILSARLSKSRRLENLIAQLPGEKKNGLFGNLIALSLGLTPNFKSNFDLAEDAKLQLSKDTYDDDLDNLLAQIGDQYADLFLAAKNLSDAILLSDILRVNTEITKAPLSASMIKRYDEHHQDLTLLKALVRQQLPEKYKEIFFDQSKNGYAGYIDGGASQEEFYKFIKPILEKMDGTEELLVKLNREDLLRKQRTFDNGSIPHQIHLGELHAILRRQEDFYPFLKDNREKIEKILTFRIPYYVGPLARGNSRFAWMTRKSEETITPWNFEEVVDKGASAQSFIERMTNFDKNLPNEKVLPKHSLLYEYFTVYNELTKVKYVTEGMRKPAFLSGEQKKAIVDLLFKTNRKVTVKQLKEDYFKKIECFDSVEISGVEDRFNASLGTYHDLLKIIKDKDFLDNEENEDILEDIVLTLTLFEDREMIEERLKTYAHLFDDKVMKQLKRRRYTGWGRLSRKLINGIRDKQSGKTILDFLKSDGFANRNFMQLIHDDSLTFKEDIQKAQVSGQGDSLHEHIANLAGSPAIKKGILQTVKVVDELVKVMGRHKPENIVIEMARENQTTQKGQKNSRERMKRIEEGIKELGSQILKEHPVENTQLQNEKLYLYYLQNGRDMYVDQELDINRLSDYDVDHIVPQSFLKDDSIDNKVLTRSDKARGKSDNVPSEEVVKKMKNYWRQLLNAKLITQRKFDNLTKAERGGLSELDKAGFIKRQLVETRQITKHVAQILDSRMNTKYDENDKLIREVKVITLKSKLVSDFRKDFQFYKVREINNYHHAHDAYLNAVVGTALIKKYPKLESEFVYGDYKVYDVRKMIAKSEQEIGKATAKYFFYSNIMNFFKTEITLANGEIRKRPLIETNGETGEIVWDKGRDFATVRKVLSMPQVNIVKKTEVQTGGFSKESILPKRNSDKLIARKKDWDPKKYGGFDSPTVAYSVLVVAKVEKGKSKKLKSVKELLGITIMERSSFEKNPIDFLEAKGYKEVKKDLIIKLPKYSLFELENGRKRMLASAGELQKGNELALPSKYVNFLYLASHYEKLKGSPEDNEQKQLFVEQHKHYLDEIIEQISEFSKRVILADANLDKVLSAYNKHRDKPIREQAENIIHLFTLTNLGAPAAFKYFDTTIDRKRYTSTKEVLDATLIHQSITGLYETRIDLSQLGGDGGEAAAKGGSGGGGGTLNLEDEYRLYETSAEPEVSPGSTWLSDFPQAWAETGGMGLAVRQAPLIIPLKATSTPVSIKQYPMSQEAKLGIKPHIQRLLDQGILVPCQSPWNTPLLPVKKPGTNDYRPVQDLREVNKRVEDIHPTVPNPYNLLSGLPPSHRWYTVLDLKDAFFCLRLHPTSQPLFAFEWRDPGMGISGQLTWTRLPQGFKNSPTLFNEALHRDLADFRIQHPDLILLQYVDDILLAATSELDCQQGTRALLLTLGNLGYRASAKKAQLCQKQVKYLGYLLKEGQRWLTEARKETVMGQPTPKTPRQLREFLGKAGFCRLFIPGFAEMAAPLYPLTKPGTLFNWGPDQQKAYQEIKQALLTAPALGLPDLTKPFELFVDEKQGYAKGVLTQKLGPWRRPVAYLSKKLDPVAAGWPPCLRMVAAIAVLRKDAGKLTMGQPLVILAPHAVEALVKQPPDRWLSNARMTHYQAMLLDTDRVQFGPVVALNPATLLPLPEEGAPHDCLEILAETHGTRPDLTDQPIPDADHTWYTDGSSFLQEGQRKAGAAVTTETEVIWARALPAGTSAQRAELIALTQALKMAEGKRLNVYTDSRYAFATAHIHGEIYRRRGWLTSEGREIKNKSEILALLKALFLPKRLSIIHCLGHQKGDSAEARGNRLADQAAREAAIKTPPDTSTLLAGKRTADGSEFEKRTADGSEFESPKKKAKVE

SEQ ID NO: 1908 - protein, 2096 aa, synthetic construct
MPAAKRVKLDGGDKKYSIGLDIGTNSVGWAVITDEYKVPSKKFKVLGNTDRHSIKKNLIGALLFDSGETAEATRLKRTARRRYTRRKNRICYLQEIFSNEMAKVDDSFFHRLEESFLVEEDKKHERHPIFGNIVDEVAYHEKYPTIYHLRKKLVDSTDKADLRLIYLALAHMIKFRGHFLIEGDLNPDNSDVDKLFIQLVQTYNQLFEENPINASGVDAKAILSARLSKSRRLENLIAQLPGEKKNGLFGNLIALSLGLTPNFKSNFDLAEDAKLQLSKDTYDDDLDNLLAQIGDQYADLFLAAKNLSDAILLSDILRVNTEITKAPLSASMIKRYDEHHQDLTLLKALVRQQLPEKYKEIFFDQSKNGYAGYIDGGASQEEFYKFIKPILEKMDGTEELLVKLNREDLLRKQRTFDNGSIPHQIHLGELHAILRRQEDFYPFLKDNREKIEKILTFRIPYYVGPLARGNSRFAWMTRKSEETITPWNFEEVVDKGASAQSFIERMTNFDKNLPNEKVLPKHSLLYEYFTVYNELTKVKYVTEGMRKPAFLSGEQKKAIVDLLFKTNRKVTVKQLKEDYFKKIECFDSVEISGVEDRFNASLGTYHDLLKIIKDKDFLDNEENEDILEDIVLTLTLFEDREMIEERLKTYAHLFDDKVMKQLKRRRYTGWGRLSRKLINGIRDKQSGKTILDFLKSDGFANRNFMQLIHDDSLTFKEDIQKAQVSGQGDSLHEHIANLAGSPAIKKGILQTVKVVDELVKVMGRHKPENIVIEMARENQTTQKGQKNSRERMKRIEEGIKELGSQILKEHPVENTQLQNEKLYLYYLQNGRDMYVDQELDINRLSDYDVDHIVPQSFLKDDSIDNKVLTRSDKARGKSDNVPSEEVVKKMKNYWRQLLNAKLITQRKFDNLTKAERGGLSELDKAGFIKRQLVETRQITKHVAQILDSRMNTKYDENDKLIREVKVITLKSKLVSDFRKDFQFYKVREINNYHHAHDAYLNAVVGTALIKKYPKLESEFVYGDYKVYDVRKMIAKSEQEIGKATAKYFFYSNIMNFFKTEITLANGEIRKRPLIETNGETGEIVWDKGRDFATVRKVLSMPQVNIVKKTEVQTGGFSKESILPKRNSDKLIARKKDWDPKKYGGFDSPTVAYSVLVVAKVEKGKSKKLKSVKELLGITIMERSSFEKNPIDFLEAKGYKEVKKDLIIKLPKYSLFELENGRKRMLASAGELQKGNELALPSKYVNFLYLASHYEKLKGSPEDNEQKQLFVEQHKHYLDEIIEQISEFSKRVILADANLDKVLSAYNKHRDKPIREQAENIIHLFTLTNLGAPAAFKYFDTTIDRKRYTSTKEVLDATLIHQSITGLYETRIDLSQLGGDGGGGSPAPEAAAKGGTLNLEDEYRLYETSAEPEVSPGSTWLSDFPQAWAETGGMGLAVRQAPLIIPLKATSTPVSIKQYPMSQEAKLGIKPHIQRLLDQGILVPCQSPWNTPLLPVKKPGTNDYRPVQDLREVNKRVEDIHPTVPNPYNLLSGLPPSHRWYTVLDLKDAFFCLRLHPTSQPLFAFEWRDPGMGISGQLTWTRLPQGFKNSPTLFNEALHRDLADFRIQHPDLILLQYVDDILLAATSELDCQQGTRALLLTLGNLGYRASAKKAQLCQKQVKYLGYLLKEGQRWLTEARKETVMGQPTPKTPRQLREFLGKAGFCRLFIPGFAEMAAPLYPLTKPGTLFNWGPDQQKAYQEIKQALLTAPALGLPDLTKPFELFVDEKQGYAKGVLTQKLGPWRRPVAYLSKKLDPVAAGWPPCLRMVAAIAVLRKDAGKLTMGQPLVILAPHAVEALVKQPPDRWLSNARMTHYQAMLLDTDRVQFGPVVALNPATLLPLPEEGAPHDCLEILAETHGTRPDLTDQPIPDADHTWYTDGSSFLQEGQRKAGAAVTTETEVIWARALPAGTSAQRAELIALTQALKMAEGKRLNVYTDSRYAFATAHIHGEIYRRRGWLTSEGREIKNKSEILALLKALFLPKRLSIIHCLGHQKGDSAEARGNRLADQAAREAAIKTPPDTSTLLAGKRTADGSEFEKRTADGSEFESPKKKAKVE

SEQ ID NO: 1909 - protein, 2094 aa, synthetic construct
MPAAKRVKLDGGDKKYSIGLDIGTNSVGWAVITDEYKVPSKKFKVLGNTDRHSIKKNLIGALLFDSGETAEATRLKRTARRRYTRRKNRICYLQEIFSNEMAKVDDSFFHRLEESFLVEEDKKHERHPIFGNIVDEVAYHEKYPTIYHLRKKLVDSTDKADLRLIYLALAHMIKFRGHFLIEGDLNPDNSDVDKLFIQLVQTYNQLFEENPINASGVDAKAILSARLSKSRRLENLIAQLPGEKKNGLFGNLIALSLGLTPNFKSNFDLAEDAKLQLSKDTYDDDLDNLLAQIGDQYADLFLAAKNLSDAILLSDILRVNTEITKAPLSASMIKRYDEHHQDLTLLKALVRQQLPEKYKEIFFDQSKNGYAGYIDGGASQEEFYKFIKPILEKMDGTEELLVKLNREDLLRKQRTFDNGSIPHQIHLGELHAILRRQEDFYPFLKDNREKIEKILTFRIPYYVGPLARGNSRFAWMTRKSEETITPWNFEEVVDKGASAQSFIERMTNFDKNLPNEKVLPKHSLLYEYFTVYNELTKVKYVTEGMRKPAFLSGEQKKAIVDLLFKTNRKVTVKQLKEDYFKKIECFDSVEISGVEDRFNASLGTYHDLLKIIKDKDFLDNEENEDILEDIVLTLTLFEDREMIEERLKTYAHLFDDKVMKQLKRRRYTGWGRLSRKLINGIRDKQSGKTILDFLKSDGFANRNFMQLIHDDSLTFKEDIQKAQVSGQGDSLHEHIANLAGSPAIKKGILQTVKVVDELVKVMGRHKPENIVIEMARENQTTQKGQKNSRERMKRIEEGIKELGSQILKEHPVENTQLQNEKLYLYYLQNGRDMYVDQELDINRLSDYDVDHIVPQSFLKDDSIDNKVLTRSDKARGKSDNVPSEEVVKKMKNYWRQLLNAKLITQRKFDNLTKAERGGLSELDKAGFIKRQLVETRQITKHVAQILDSRMNTKYDENDKLIREVKVITLKSKLVSDFRKDFQFYKVREINNYHHAHDAYLNAVVGTALIKKYPKLESEFVYGDYKVYDVRKMIAKSEQEIGKATAKYFFYSNIMNFFKTEITLANGEIRKRPLIETNGETGEIVWDKGRDFATVRKVLSMPQVNIVKKTEVQTGGFSKESILPKRNSDKLIARKKDWDPKKYGGFDSPTVAYSVLVVAKVEKGKSKKLKSVKELLGITIMERSSFEKNPIDFLEAKGYKEVKKDLIIKLPKYSLFELENGRKRMLASAGELQKGNELALPSKYVNFLYLASHYEKLKGSPEDNEQKQLFVEQHKHYLDEIIEQISEFSKRVILADANLDKVLSAYNKHRDKPIREQAENIIHLFTLTNLGAPAAFKYFDTTIDRKRYTSTKEVLDATLIHQSITGLYETRIDLSQLGGDGGGSSGGGGGSGGTLNLEDEYRLYETSAEPEVSPGSTWLSDFPQAWAETGGMGLAVRQAPLIIPLKATSTPVSIKQYPMSQEAKLGIKPHIQRLLDQGILVPCQSPWNTPLLPVKKPGTNDYRPVQDLREVNKRVEDIHPTVPNPYNLLSGLPPSHRWYTVLDLKDAFFCLRLHPTSQPLFAFEWRDPGMGISGQLTWTRLPQGFKNSPTLFNEALHRDLADFRIQHPDLILLQYVDDILLAATSELDCQQGTRALLLTLGNLGYRASAKKAQLCQKQVKYLGYLLKEGQRWLTEARKETVMGQPTPKTPRQLREFLGKAGFCRLFIPGFAEMAAPLYPLTKPGTLFNWGPDQQKAYQEIKQALLTAPALGLPDLTKPFELFVDEKQGYAKGVLTQKLGPWRRPVAYLSKKLDPVAAGWPPCLRMVAAIAVLRKDAGKLTMGQPLVILAPHAVEALVKQPPDRWLSNARMTHYQAMLLDTDRVQFGPVVALNPATLLPLPEEGAPHDCLEILAETHGTRPDLTDQPIPDADHTWYTDGSSFLQEGQRKAGAAVTTETEVIWARALPAGTSAQRAELIALTQALKMAEGKRLNVYTDSRYAFATAHIHGEIYRRRGWLTSEGREIKNKSEILALLKALFLPKRLSIIHCLGHQKGDSAEARGNRLADQAAREAAIKTPPDTSTLLAGKRTADGSEFEKRTADGSEFESPKKKAKVE

SEQ ID NO: 1910 - protein, 2096 aa, synthetic construct
MPAAKRVKLDGGDKKYSIGLDIGTNSVGWAVITDEYKVPSKKFKVLGNTDRHSIKKNLIGALLFDSGETAEATRLKRTARRRYTRRKNRICYLQEIFSNEMAKVDDSFFHRLEESFLVEEDKKHERHPIFGNIVDEVAYHEKYPTIYHLRKKLVDSTDKADLRLIYLALAHMIKFRGHFLIEGDLNPDNSDVDKLFIQLVQTYNQLFEENPINASGVDAKAILSARLSKSRRLENLIAQLPGEKKNGLFGNLIALSLGLTPNFKSNFDLAEDAKLQLSKDTYDDDLDNLLAQIGDQYADLFLAAKNLSDAILLSDILRVNTEITKAPLSASMIKRYDEHHQDLTLLKALVRQQLPEKYKEIFFDQSKNGYAGYIDGGASQEEFYKFIKPILEKMDGTEELLVKLNREDLLRKQRTFDNGSIPHQIHLGELHAILRRQEDFYPFLKDNREKIEKILTFRIPYYVGPLARGNSRFAWMTRKSEETITPWNFEEVVDKGASAQSFIERMTNFDKNLPNEKVLPKHSLLYEYFTVYNELTKVKYVTEGMRKPAFLSGEQKKAIVDLLFKTNRKVTVKQLKEDYFKKIECFDSVEISGVEDRFNASLGTYHDLLKIIKDKDFLDNEENEDILEDIVLTLTLFEDREMIEERLKTYAHLFDDKVMKQLKRRRYTGWGRLSRKLINGIRDKQSGKTILDFLKSDGFANRNFMQLIHDDSLTFKEDIQKAQVSGQGDSLHEHIANLAGSPAIKKGILQTVKVVDELVKVMGRHKPENIVIEMARENQTTQKGQKNSRERMKRIEEGIKELGSQILKEHPVENTQLQNEKLYLYYLQNGRDMYVDQELDINRLSDYDVDHIVPQSFLKDDSIDNKVLTRSDKARGKSDNVPSEEVVKKMKNYWRQLLNAKLITQRKFDNLTKAERGGLSELDKAGFIKRQLVETRQITKHVAQILDSRMNTKYDENDKLIREVKVITLKSKLVSDFRKDFQFYKVREINNYHHAHDAYLNAVVGTALIKKYPKLESEFVYGDYKVYDVRKMIAKSEQEIGKATAKYFFYSNIMNFFKTEITLANGEIRKRPLIETNGETGEIVWDKGRDFATVRKVLSMPQVNIVKKTEVQTGGFSKESILPKRNSDKLIARKKDWDPKKYGGFDSPTVAYSVLVVAKVEKGKSKKLKSVKELLGITIMERSSFEKNPIDFLEAKGYKEVKKDLIIKLPKYSLFELENGRKRMLASAGELQKGNELALPSKYVNFLYLASHYEKLKGSPEDNEQKQLFVEQHKHYLDEIIEQISEFSKRVILADANLDKVLSAYNKHRDKPIREQAENIIHLFTLTNLGAPAAFKYFDTTIDRKRYTSTKEVLDATLIHQSITGLYETRIDLSQLGGDGGGSSEAAAKGGSGGTLNLEDEYRLYETSAEPEVSPGSTWLSDFPQAWAETGGMGLAVRQAPLIIPLKATSTPVSIKQYPMSQEAKLGIKPHIQRLLDQGILVPCQSPWNTPLLPVKKPGTNDYRPVQDLREVNKRVEDIHPTVPNPYNLLSGLPPSHRWYTVLDLKDAFFCLRLHPTSQPLFAFEWRDPGMGISGQLTWTRLPQGFKNSPTLFNEALHRDLADFRIQHPDLILLQYVDDILLAATSELDCQQGTRALLLTLGNLGYRASAKKAQLCQKQVKYLGYLLKEGQRWLTEARKETVMGQPTPKTPRQLREFLGKAGFCRLFIPGFAEMAAPLYPLTKPGTLFNWGPDQQKAYQEIKQALLTAPALGLPDLTKPFELFVDEKQGYAKGVLTQKLGPWRRPVAYLSKKLDPVAAGWPPCLRMVAAIAVLRKDAGKLTMGQPLVILAPHAVEALVKQPPDRWLSNARMTHYQAMLLDTDRVQFGPVVALNPATLLPLPEEGAPHDCLEILAETHGTRPDLTDQPIPDADHTWYTDGSSFLQEGQRKAGAAVTTETEVIWARALPAGTSAQRAELIALTQALKMAEGKRLNVYTDSRYAFATAHIHGEIYRRRGWLTSEGREIKNKSEILALLKALFLPKRLSIIHCLGHQKGDSAEARGNRLADQAAREAAIKTPPDTSTLLAGKRTADGSEFEKRTADGSEFESPKKKAKVE

SEQ ID NO: 1911 - protein, 2091 aa, synthetic construct
MPAAKRVKLDGGDKKYSIGLDIGTNSVGWAVITDEYKVPSKKFKVLGNTDRHSIKKNLIGALLFDSGETAEATRLKRTARRRYTRRKNRICYLQEIFSNEMAKVDDSFFHRLEESFLVEEDKKHERHPIFGNIVDEVAYHEKYPTIYHLRKKLVDSTDKADLRLIYLALAHMIKFRGHFLIEGDLNPDNSDVDKLFIQLVQTYNQLFEENPINASGVDAKAILSARLSKSRRLENLIAQLPGEKKNGLFGNLIALSLGLTPNFKSNFDLAEDAKLQLSKDTYDDDLDNLLAQIGDQYADLFLAAKNLSDAILLSDILRVNTEITKAPLSASMIKRYDEHHQDLTLLKALVRQQLPEKYKEIFFDQSKNGYAGYIDGGASQEEFYKFIKPILEKMDGTEELLVKLNREDLLRKQRTFDNGSIPHQIHLGELHAILRRQEDFYPFLKDNREKIEKILTFRIPYYVGPLARGNSRFAWMTRKSEETITPWNFEEVVDKGASAQSFIERMTNFDKNLPNEKVLPKHSLLYEYFTVYNELTKVKYVTEGMRKPAFLSGEQKKAIVDLLFKTNRKVTVKQLKEDYFKKIECFDSVEISGVEDRFNASLGTYHDLLKIIKDKDFLDNEENEDILEDIVLTLTLFEDREMIEERLKTYAHLFDDKVMKQLKRRRYTGWGRLSRKLINGIRDKQSGKTILDFLKSDGFANRNFMQLIHDDSLTFKEDIQKAQVSGQGDSLHEHIANLAGSPAIKKGILQTVKVVDELVKVMGRHKPENIVIEMARENQTTQKGQKNSRERMKRIEEGIKELGSQILKEHPVENTQLQNEKLYLYYLQNGRDMYVDQELDINRLSDYDVDHIVPQSFLKDDSIDNKVLTRSDKARGKSDNVPSEEVVKKMKNYWRQLLNAKLITQRKFDNLTKAERGGLSELDKAGFIKRQLVETRQITKHVAQILDSRMNTKYDENDKLIREVKVITLKSKLVSDFRKDFQFYKVREINNYHHAHDAYLNAVVGTALIKKYPKLESEFVYGDYKVYDVRKMIAKSEQEIGKATAKYFFYSNIMNFFKTEITLANGEIRKRPLIETNGETGEIVWDKGRDFATVRKVLSMPQVNIVKKTEVQTGGFSKESILPKRNSDKLIARKKDWDPKKYGGFDSPTVAYSVLVVAKVEKGKSKKLKSVKELLGITIMERSSFEKNPIDFLEAKGYKEVKKDLIIKLPKYSLFELENGRKRMLASAGELQKGNELALPSKYVNFLYLASHYEKLKGSPEDNEQKQLFVEQHKHYLDEIIEQISEFSKRVILADANLDKVLSAYNKHRDKPIREQAENIIHLFTLTNLGAPAAFKYFDTTIDRKRYTSTKEVLDATLIHQSITGLYETRIDLSQLGGDGGGGSGSSGGTLNLEDEYRLYETSAEPEVSPGSTWLSDFPQAWAETGGMGLAVRQAPLIIPLKATSTPVSIKQYPMSQEAKLGIKPHIQRLLDQGILVPCQSPWNTPLLPVKKPGTNDYRPVQDLREVNKRVEDIHPTVPNPYNLLSGLPPSHRWYTVLDLKDAFFCLRLHPTSQPLFAFEWRDPGMGISGQLTWTRLPQGFKNSPTLFNEALHRDLADFRIQHPDLILLQYVDDILLAATSELDCQQGTRALLLTLGNLGYRASAKKAQLCQKQVKYLGYLLKEGQRWLTEARKETVMGQPTPKTPRQLREFLGKAGFCRLFIPGFAEMAAPLYPLTKPGTLFNWGPDQQKAYQEIKQALLTAPALGLPDLTKPFELFVDEKQGYAKGVLTQKLGPWRRPVAYLSKKLDPVAAGWPPCLRMVAAIAVLRKDAGKLTMGQPLVILAPHAVEALVKQPPDRWLSNARMTHYQAMLLDTDRVQFGPVVALNPATLLPLPEEGAPHDCLEILAETHGTRPDLTDQPIPDADHTWYTDGSSFLQEGQRKAGAAVTTETEVIWARALPAGTSAQRAELIALTQALKMAEGKRLNVYTDSRYAFATAHIHGEIYRRRGWLTSEGREIKNKSEILALLKALFLPKRLSIIHCLGHQKGDSAEARGNRLADQAAREAAIKTPPDTSTLLAGKRTADGSEFEKRTADGSEFESPKKKAKVE

SEQ ID NO: 1912 - protein, 2096 aa, synthetic construct
MPAAKRVKLDGGDKKYSIGLDIGTNSVGWAVITDEYKVPSKKFKVLGNTDRHSIKKNLIGALLFDSGETAEATRLKRTARRRYTRRKNRICYLQEIFSNEMAKVDDSFFHRLEESFLVEEDKKHERHPIFGNIVDEVAYHEKYPTIYHLRKKLVDSTDKADLRLIYLALAHMIKFRGHFLIEGDLNPDNSDVDKLFIQLVQTYNQLFEENPINASGVDAKAILSARLSKSRRLENLIAQLPGEKKNGLFGNLIALSLGLTPNFKSNFDLAEDAKLQLSKDTYDDDLDNLLAQIGDQYADLFLAAKNLSDAILLSDILRVNTEITKAPLSASMIKRYDEHHQDLTLLKALVRQQLPEKYKEIFFDQSKNGYAGYIDGGASQEEFYKFIKPILEKMDGTEELLVKLNREDLLRKQRTFDNGSIPHQIHLGELHAILRRQEDFYPFLKDNREKIEKILTFRIPYYVGPLARGNSRFAWMTRKSEETITPWNFEEVVDKGASAQSFIERMTNFDKNLPNEKVLPKHSLLYEYFTVYNELTKVKYVTEGMRKPAFLSGEQKKAIVDLLFKTNRKVTVKQLKEDYFKKIECFDSVEISGVEDRFNASLGTYHDLLKIIKDKDFLDNEENEDILEDIVLTLTLFEDREMIEERLKTYAHLFDDKVMKQLKRRRYTGWGRLSRKLINGIRDKQSGKTILDFLKSDGFANRNFMQLIHDDSLTFKEDIQKAQVSGQGDSLHEHIANLAGSPAIKKGILQTVKVVDELVKVMGRHKPENIVIEMARENQTTQKGQKNSRERMKRIEEGIKELGSQILKEHPVENTQLQNEKLYLYYLQNGRDMYVDQELDINRLSDYDVDHIVPQSFLKDDSIDNKVLTRSDKARGKSDNVPSEEVVKKMKNYWRQLLNAKLITQRKFDNLTKAERGGLSELDKAGFIKRQLVETRQITKHVAQILDSRMNTKYDENDKLIREVKVITLKSKLVSDFRKDFQFYKVREINNYHHAHDAYLNAVVGTALIKKYPKLESEFVYGDYKVYDVRKMIAKSEQEIGKATAKYFFYSNIMNFFKTEITLANGEIRKRPLIETNGETGEIVWDKGRDFATVRKVLSMPQVNIVKKTEVQTGGFSKESILPKRNSDKLIARKKDWDPKKYGGFDSPTVAYSVLVVAKVEKGKSKKLKSVKELLGITIMERSSFEKNPIDFLEAKGYKEVKKDLIIKLPKYSLFELENGRKRMLASAGELQKGNELALPSKYVNFLYLASHYEKLKGSPEDNEQKQLFVEQHKHYLDEIIEQISEFSKRVILADANLDKVLSAYNKHRDKPIREQAENIIHLFTLTNLGAPAAFKYFDTTIDRKRYTSTKEVLDATLIHQSITGLYETRIDLSQLGGDGGPAPGSSEAAAKGGTLNLEDEYRLYETSAEPEVSPGSTWLSDFPQAWAETGGMGLAVRQAPLIIPLKATSTPVSIKQYPMSQEAKLGIKPHIQRLLDQGILVPCQSPWNTPLLPVKKPGTNDYRPVQDLREVNKRVEDIHPTVPNPYNLLSGLPPSHRWYTVLDLKDAFFCLRLHPTSQPLFAFEWRDPGMGISGQLTWTRLPQGFKNSPTLFNEALHRDLADFRIQHPDLILLQYVDDILLAATSELDCQQGTRALLLTLGNLGYRASAKKAQLCQKQVKYLGYLLKEGQRWLTEARKETVMGQPTPKTPRQLREFLGKAGFCRLFIPGFAEMAAPLYPLTKPGTLFNWGPDQQKAYQEIKQALLTAPALGLPDLTKPFELFVDEKQGYAKGVLTQKLGPWRRPVAYLSKKLDPVAAGWPPCLRMVAAIAVLRKDAGKLTMGQPLVILAPHAVEALVKQPPDRWLSNARMTHYQAMLLDTDRVQFGPVVALNPATLLPLPEEGAPHDCLEILAETHGTRPDLTDQPIPDADHTWYTDGSSFLQEGQRKAGAAVTTETEVIWARALPAGTSAQRAELIALTQALKMAEGKRLNVYTDSRYAFATAHIHGEIYRRRGWLTSEGREIKNKSEILALLKALFLPKRLSIIHCLGHQKGDSAEARGNRLADQAAREAAIKTPPDTSTLLAGKRTADGSEFEKRTADGSEFESPKKKAKVE

SEQ ID NO: 1913 - protein, 2096 aa, synthetic construct
MPAAKRVKLDGGDKKYSIGLDIGTNSVGWAVITDEYKVPSKKFKVLGNTDRHSIKKNLIGALLFDSGETAEATRLKRTARRRYTRRKNRICYLQEIFSNEMAKVDDSFFHRLEESFLVEEDKKHERHPIFGNIVDEVAYHEKYPTIYHLRKKLVDSTDKADLRLIYLALAHMIKFRGHFLIEGDLNPDNSDVDKLFIQLVQTYNQLFEENPINASGVDAKAILSARLSKSRRLENLIAQLPGEKKNGLFGNLIALSLGLTPNFKSNFDLAEDAKLQLSKDTYDDDLDNLLAQIGDQYADLFLAAKNLSDAILLSDILRVNTEITKAPLSASMIKRYDEHHQDLTLLKALVRQQLPEKYKEIFFDQSKNGYAGYIDGGASQEEFYKFIKPILEKMDGTEELLVKLNREDLLRKQRTFDNGSIPHQIHLGELHAILRRQEDFYPFLKDNREKIEKILTFRIPYYVGPLARGNSRFAWMTRKSEETITPWNFEEVVDKGASAQSFIERMTNFDKNLPNEKVLPKHSLLYEYFTVYNELTKVKYVTEGMRKPAFLSGEQKKAIVDLLFKTNRKVTVKQLKEDYFKKIECFDSVEISGVEDRFNASLGTYHDLLKIIKDKDFLDNEENEDILEDIVLTLTLFEDREMIEERLKTYAHLFDDKVMKQLKRRRYTGWGRLSRKLINGIRDKQSGKTILDFLKSDGFANRNFMQLIHDDSLTFKEDIQKAQVSGQGDSLHEHIANLAGSPAIKKGILQTVKVVDELVKVMGRHKPENIVIEMARENQTTQKGQKNSRERMKRIEEGIKELGSQILKEHPVENTQLQNEKLYLYYLQNGRDMYVDQELDINRLSDYDVDHIVPQSFLKDDSIDNKVLTRSDKARGKSDNVPSEEVVKKMKNYWRQLLNAKLITQRKFDNLTKAERGGLSELDKAGFIKRQLVETRQITKHVAQILDSRMNTKYDENDKLIREVKVITLKSKLVSDFRKDFQFYKVREINNYHHAHDAYLNAVVGTALIKKYPKLESEFVYGDYKVYDVRKMIAKSEQEIGKATAKYFFYSNIMNFFKTEITLANGEIRKRPLIETNGETGEIVWDKGRDFATVRKVLSMPQVNIVKKTEVQTGGFSKESILPKRNSDKLIARKKDWDPKKYGGFDSPTVAYSVLVVAKVEKGKSKKLKSVKELLGITIMERSSFEKNPIDFLEAKGYKEVKKDLIIKLPKYSLFELENGRKRMLASAGELQKGNELALPSKYVNFLYLASHYEKLKGSPEDNEQKQLFVEQHKHYLDEIIEQISEFSKRVILADANLDKVLSAYNKHRDKPIREQAENIIHLFTLTNLGAPAAFKYFDTTIDRKRYTSTKEVLDATLIHQSITGLYETRIDLSQLGGDGGEAAAKGSSGGSGGTLNLEDEYRLYETSAEPEVSPGSTWLSDFPQAWAETGGMGLAVRQAPLIIPLKATSTPVSIKQYPMSQEAKLGIKPHIQRLLDQGILVPCQSPWNTPLLPVKKPGTNDYRPVQDLREVNKRVEDIHPTVPNPYNLLSGLPPSHRWYTVLDLKDAFFCLRLHPTSQPLFAFEWRDPGMGISGQLTWTRLPQGFKNSPTLFNEALHRDLADFRIQHPDLILLQYVDDILLAATSELDCQQGTRALLLTLGNLGYRASAKKAQLCQKQVKYLGYLLKEGQRWLTEARKETVMGQPTPKTPRQLREFLGKAGFCRLFIPGFAEMAAPLYPLTKPGTLFNWGPDQQKAYQEIKQALLTAPALGLPDLTKPFELFVDEKQGYAKGVLTQKLGPWRRPVAYLSKKLDPVAAGWPPCLRMVAAIAVLRKDAGKLTMGQPLVILAPHAVEALVKQPPDRWLSNARMTHYQAMLLDTDRVQFGPVVALNPATLLPLPEEGAPHDCLEILAETHGTRPDLTDQPIPDADHTWYTDGSSFLQEGQRKAGAAVTTETEVIWARALPAGTSAQRAELIALTQALKMAEGKRLNVYTDSRYAFATAHIHGEIYRRRGWLTSEGREIKNKSEILALLKALFLPKRLSIIHCLGHQKGDSAEARGNRLADQAAREAAIKTPPDTSTLLAGKRTADGSEFEKRTADGSEFESPKKKAKVE

SEQ ID NO: 1914 - protein, 2091 aa, synthetic construct
MPAAKRVKLDGGDKKYSIGLDIGTNSVGWAVITDEYKVPSKKFKVLGNTDRHSIKKNLIGALLFDSGETAEATRLKRTARRRYTRRKNRICYLQEIFSNEMAKVDDSFFHRLEESFLVEEDKKHERHPIFGNIVDEVAYHEKYPTIYHLRKKLVDSTDKADLRLIYLALAHMIKFRGHFLIEGDLNPDNSDVDKLFIQLVQTYNQLFEENPINASGVDAKAILSARLSKSRRLENLIAQLPGEKKNGLFGNLIALSLGLTPNFKSNFDLAEDAKLQLSKDTYDDDLDNLLAQIGDQYADLFLAAKNLSDAILLSDILRVNTEITKAPLSASMIKRYDEHHQDLTLLKALVRQQLPEKYKEIFFDQSKNGYAGYIDGGASQEEFYKFIKPILEKMDGTEELLVKLNREDLLRKQRTFDNGSIPHQIHLGELHAILRRQEDFYPFLKDNREKIEKILTFRIPYYVGPLARGNSRFAWMTRKSEETITPWNFEEVVDKGASAQSFIERMTNFDKNLPNEKVLPKHSLLYEYFTVYNELTKVKYVTEGMRKPAFLSGEQKKAIVDLLFKTNRKVTVKQLKEDYFKKIECFDSVEISGVEDRFNASLGTYHDLLKIIKDKDFLDNEENEDILEDIVLTLTLFEDREMIEERLKTYAHLFDDKVMKQLKRRRYTGWGRLSRKLINGIRDKQSGKTILDFLKSDGFANRNFMQLIHDDSLTFKEDIQKAQVSGQGDSLHEHIANLAGSPAIKKGILQTVKVVDELVKVMGRHKPENIVIEMARENQTTQKGQKNSRERMKRIEEGIKELGSQILKEHPVENTQLQNEKLYLYYLQNGRDMYVDQELDINRLSDYDVDHIVPQSFLKDDSIDNKVLTRSDKARGKSDNVPSEEVVKKMKNYWRQLLNAKLITQRKFDNLTKAERGGLSELDKAGFIKRQLVETRQITKHVAQILDSRMNTKYDENDKLIREVKVITLKSKLVSDFRKDFQFYKVREINNYHHAHDAYLNAVVGTALIKKYPKLESEFVYGDYKVYDVRKMIAKSEQEIGKATAKYFFYSNIMNFFKTEITLANGEIRKRPLIETNGETGEIVWDKGRDFATVRKVLSMPQVNIVKKTEVQTGGFSKESILPKRNSDKLIARKKDWDPKKYGGFDSPTVAYSVLVVAKVEKGKSKKLKSVKELLGITIMERSSFEKNPIDFLEAKGYKEVKKDLIIKLPKYSLFELENGRKRMLASAGELQKGNELALPSKYVNFLYLASHYEKLKGSPEDNEQKQLFVEQHKHYLDEIIEQISEFSKRVILADANLDKVLSAYNKHRDKPIREQAENIIHLFTLTNLGAPAAFKYFDTTIDRKRYTSTKEVLDATLIHQSITGLYETRIDLSQLGGDGGGGSPAPGGTLNLEDEYRLYETSAEPEVSPGSTWLSDFPQAWAETGGMGLAVRQAPLIIPLKATSTPVSIKQYPMSQEAKLGIKPHIQRLLDQGILVPCQSPWNTPLLPVKKPGTNDYRPVQDLREVNKRVEDIHPTVPNPYNLLSGLPPSHRWYTVLDLKDAFFCLRLHPTSQPLFAFEWRDPGMGISGQLTWTRLPQGFKNSPTLFNEALHRDLADFRIQHPDLILLQYVDDILLAATSELDCQQGTRALLLTLGNLGYRASAKKAQLCQKQVKYLGYLLKEGQRWLTEARKETVMGQPTPKTPRQLREFLGKAGFCRLFIPGFAEMAAPLYPLTKPGTLFNWGPDQQKAYQEIKQALLTAPALGLPDLTKPFELFVDEKQGYAKGVLTQKLGPWRRPVAYLSKKLDPVAAGWPPCLRMVAAIAVLRKDAGKLTMGQPLVILAPHAVEALVKQPPDRWLSNARMTHYQAMLLDTDRVQFGPVVALNPATLLPLPEEGAPHDCLEILAETHGTRPDLTDQPIPDADHTWYTDGSSFLQEGQRKAGAAVTTETEVIWARALPAGTSAQRAELIALTQALKMAEGKRLNVYTDSRYAFATAHIHGEIYRRRGWLTSEGREIKNKSEILALLKALFLPKRLSIIHCLGHQKGDSAEARGNRLADQAAREAAIKTPPDTSTLLAGKRTADGSEFEKRTADGSEFESPKKKAKVE

SEQ ID NO: 1915 - protein, 2096 aa, synthetic construct
MPAAKRVKLDGGDKKYSIGLDIGTNSVGWAVITDEYKVPSKKFKVLGNTDRHSIKKNLIGALLFDSGETAEATRLKRTARRRYTRRKNRICYLQEIFSNEMAKVDDSFFHRLEESFLVEEDKKHERHPIFGNIVDEVAYHEKYPTIYHLRKKLVDSTDKADLRLIYLALAHMIKFRGHFLIEGDLNPDNSDVDKLFIQLVQTYNQLFEENPINASGVDAKAILSARLSKSRRLENLIAQLPGEKKNGLFGNLIALSLGLTPNFKSNFDLAEDAKLQLSKDTYDDDLDNLLAQIGDQYADLFLAAKNLSDAILLSDILRVNTEITKAPLSASMIKRYDEHHQDLTLLKALVRQQLPEKYKEIFFDQSKNGYAGYIDGGASQEEFYKFIKPILEKMDGTEELLVKLNREDLLRKQRTFDNGSIPHQIHLGELHAILRRQEDFYPFLKDNREKIEKILTFRIPYYVGPLARGNSRFAWMTRKSEETITPWNFEEVVDKGASAQSFIERMTNFDKNLPNEKVLPKHSLLYEYFTVYNELTKVKYVTEGMRKPAFLSGEQKKAIVDLLFKTNRKVTVKQLKEDYFKKIECFDSVEISGVEDRFNASLGTYHDLLKIIKDKDFLDNEENEDILEDIVLTLTLFEDREMIEERLKTYAHLFDDKVMKQLKRRRYTGWGRLSRKLINGIRDKQSGKTILDFLKSDGFANRNFMQLIHDDSLTFKEDIQKAQVSGQGDSLHEHIANLAGSPAIKKGILQTVKVVDELVKVMGRHKPENIVIEMARENQTTQKGQKNSRERMKRIEEGIKELGSQILKEHPVENTQLQNEKLYLYYLQNGRDMYVDQELDINRLSDYDVDHIVPQSFLKDDSIDNKVLTRSDKARGKSDNVPSEEVVKKMKNYWRQLLNAKLITQRKFDNLTKAERGGLSELDKAGFIKRQLVETRQITKHVAQILDSRMNTKYDENDKLIREVKVITLKSKLVSDFRKDFQFYKVREINNYHHAHDAYLNAVVGTALIKKYPKLESEFVYGDYKVYDVRKMIAKSEQEIGKATAKYFFYSNIMNFFKTEITLANGEIRKRPLIETNGETGEIVWDKGRDFATVRKVLSMPQVNIVKKTEVQTGGFSKESILPKRNSDKLIARKKDWDPKKYGGFDSPTVAYSVLVVAKVEKGKSKKLKSVKELLGITIMERSSFEKNPIDFLEAKGYKEVKKDLIIKLPKYSLFELENGRKRMLASAGELQKGNELALPSKYVNFLYLASHYEKLKGSPEDNEQKQLFVEQHKHYLDEIIEQISEFSKRVILADANLDKVLSAYNKHRDKPIREQAENIIHLFTLTNLGAPAAFKYFDTTIDRKRYTSTKEVLDATLIHQSITGLYETRIDLSQLGGDGGGGSEAAAKGGGGGTLNLEDEYRLYETSAEPEVSPGSTWLSDFPQAWAETGGMGLAVRQAPLIIPLKATSTPVSIKQYPMSQEAKLGIKPHIQRLLDQGILVPCQSPWNTPLLPVKKPGTNDYRPVQDLREVNKRVEDIHPTVPNPYNLLSGLPPSHRWYTVLDLKDAFFCLRLHPTSQPLFAFEWRDPGMGISGQLTWTRLPQGFKNSPTLFNEALHRDLADFRIQHPDLILLQYVDDILLAATSELDCQQGTRALLLTLGNLGYRASAKKAQLCQKQVKYLGYLLKEGQRWLTEARKETVMGQPTPKTPRQLREFLGKAGFCRLFIPGFAEMAAPLYPLTKPGTLFNWGPDQQKAYQEIKQALLTAPALGLPDLTKPFELFVDEKQGYAKGVLTQKLGPWRRPVAYLSKKLDPVAAGWPPCLRMVAAIAVLRKDAGKLTMGQPLVILAPHAVEALVKQPPDRWLSNARMTHYQAMLLDTDRVQFGPVVALNPATLLPLPEEGAPHDCLEILAETHGTRPDLTDQPIPDADHTWYTDGSSFLQEGQRKAGAAVTTETEVIWARALPAGTSAQRAELIALTQALKMAEGKRLNVYTDSRYAFATAHIHGEIYRRRGWLTSEGREIKNKSEILALLKALFLPKRLSIIHCLGHQKGDSAEARGNRLADQAAREAAIKTPPDTSTLLAGKRTADGSEFEKRTADGSEFESPKKKAKVE

SEQ ID NO: 1916 - protein, 2097 aa, synthetic construct
MPAAKRVKLDGGDKKYSIGLDIGTNSVGWAVITDEYKVPSKKFKVLGNTDRHSIKKNLIGALLFDSGETAEATRLKRTARRRYTRRKNRICYLQEIFSNEMAKVDDSFFHRLEESFLVEEDKKHERHPIFGNIVDEVAYHEKYPTIYHLRKKLVDSTDKADLRLIYLALAHMIKFRGHFLIEGDLNPDNSDVDKLFIQLVQTYNQLFEENPINASGVDAKAILSARLSKSRRLENLIAQLPGEKKNGLFGNLIALSLGLTPNFKSNFDLAEDAKLQLSKDTYDDDLDNLLAQIGDQYADLFLAAKNLSDAILLSDILRVNTEITKAPLSASMIKRYDEHHQDLTLLKALVRQQLPEKYKEIFFDQSKNGYAGYIDGGASQEEFYKFIKPILEKMDGTEELLVKLNREDLLRKQRTFDNGSIPHQIHLGELHAILRRQEDFYPFLKDNREKIEKILTFRIPYYVGPLARGNSRFAWMTRKSEETITPWNFEEVVDKGASAQSFIERMTNFDKNLPNEKVLPKHSLLYEYFTVYNELTKVKYVTEGMRKPAFLSGEQKKAIVDLLFKTNRKVTVKQLKEDYFKKIECFDSVEISGVEDRFNASLGTYHDLLKIIKDKDFLDNEENEDILEDIVLTLTLFEDREMIEERLKTYAHLFDDKVMKQLKRRRYTGWGRLSRKLINGIRDKQSGKTILDFLKSDGFANRNFMQLIHDDSLTFKEDIQKAQVSGQGDSLHEHIANLAGSPAIKKGILQTVKVVDELVKVMGRHKPENIVIEMARENQTTQKGQKNSRERMKRIEEGIKELGSQILKEHPVENTQLQNEKLYLYYLQNGRDMYVDQELDINRLSDYDVDHIVPQSFLKDDSIDNKVLTRSDKARGKSDNVPSEEVVKKMKNYWRQLLNAKLITQRKFDNLTKAERGGLSELDKAGFIKRQLVETRQITKHVAQILDSRMNTKYDENDKLIREVKVITLKSKLVSDFRKDFQFYKVREINNYHHAHDAYLNAVVGTALIKKYPKLESEFVYGDYKVYDVRKMIAKSEQEIGKATAKYFFYSNIMNFFKTEITLANGEIRKRPLIETNGETGEIVWDKGRDFATVRKVLSMPQVNIVKKTEVQTGGFSKESILPKRNSDKLIARKKDWDPKKYGGFDSPTVAYSVLVVAKVEKGKSKKLKSVKELLGITIMERSSFEKNPIDFLEAKGYKEVKKDLIIKLPKYSLFELENGRKRMLASAGELQKGNELALPSKYVNFLYLASHYEKLKGSPEDNEQKQLFVEQHKHYLDEIIEQISEFSKRVILADANLDKVLSAYNKHRDKPIREQAENIIHLFTLTNLGAPAAFKYFDTTIDRKRYTSTKEVLDATLIHQSITGLYETRIDLSQLGGDGGGGSGGSGGSGGSGGTLNLEDEYRLYETSAEPEVSPGSTWLSDFPQAWAETGGMGLAVRQAPLIIPLKATSTPVSIKQYPMSQEAKLGIKPHIQRLLDQGILVPCQSPWNTPLLPVKKPGTNDYRPVQDLREVNKRVEDIHPTVPNPYNLLSGLPPSHRWYTVLDLKDAFFCLRLHPTSQPLFAFEWRDPGMGISGQLTWTRLPQGFKNSPTLFNEALHRDLADFRIQHPDLILLQYVDDILLAATSELDCQQGTRALLLTLGNLGYRASAKKAQLCQKQVKYLGYLLKEGQRWLTEARKETVMGQPTPKTPRQLREFLGKAGFCRLFIPGFAEMAAPLYPLTKPGTLFNWGPDQQKAYQEIKQALLTAPALGLPDLTKPFELFVDEKQGYAKGVLTQKLGPWRRPVAYLSKKLDPVAAGWPPCLRMVAAIAVLRKDAGKLTMGQPLVILAPHAVEALVKQPPDRWLSNARMTHYQAMLLDTDRVQFGPVVALNPATLLPLPEEGAPHDCLEILAETHGTRPDLTDQPIPDADHTWYTDGSSFLQEGQRKAGAAVTTETEVIWARALPAGTSAQRAELIALTQALKMAEGKRLNVYTDSRYAFATAHIHGEIYRRRGWLTSEGREIKNKSEILALLKALFLPKRLSIIHCLGHQKGDSAEARGNRLADQAAREAAIKTPPDTSTLLAGKRTADGSEFEKRTADGSEFESPKKKAKVE

SEQ ID NO: 1917 - protein, 2090 aa, synthetic construct
MPAAKRVKLDGGDKKYSIGLDIGTNSVGWAVITDEYKVPSKKFKVLGNTDRHSIKKNLIGALLFDSGETAEATRLKRTARRRYTRRKNRICYLQEIFSNEMAKVDDSFFHRLEESFLVEEDKKHERHPIFGNIVDEVAYHEKYPTIYHLRKKLVDSTDKADLRLIYLALAHMIKFRGHFLIEGDLNPDNSDVDKLFIQLVQTYNQLFEENPINASGVDAKAILSARLSKSRRLENLIAQLPGEKKNGLFGNLIALSLGLTPNFKSNFDLAEDAKLQLSKDTYDDDLDNLLAQIGDQYADLFLAAKNLSDAILLSDILRVNTEITKAPLSASMIKRYDEHHQDLTLLKALVRQQLPEKYKEIFFDQSKNGYAGYIDGGASQEEFYKFIKPILEKMDGTEELLVKLNREDLLRKQRTFDNGSIPHQIHLGELHAILRRQEDFYPFLKDNREKIEKILTFRIPYYVGPLARGNSRFAWMTRKSEETITPWNFEEVVDKGASAQSFIERMTNFDKNLPNEKVLPKHSLLYEYFTVYNELTKVKYVTEGMRKPAFLSGEQKKAIVDLLFKTNRKVTVKQLKEDYFKKIECFDSVEISGVEDRFNASLGTYHDLLKIIKDKDFLDNEENEDILEDIVLTLTLFEDREMIEERLKTYAHLFDDKVMKQLKRRRYTGWGRLSRKLINGIRDKQSGKTILDFLKSDGFANRNFMQLIHDDSLTFKEDIQKAQVSGQGDSLHEHIANLAGSPAIKKGILQTVKVVDELVKVMGRHKPENIVIEMARENQTTQKGQKNSRERMKRIEEGIKELGSQILKEHPVENTQLQNEKLYLYYLQNGRDMYVDQELDINRLSDYDVDHIVPQSFLKDDSIDNKVLTRSDKARGKSDNVPSEEVVKKMKNYWRQLLNAKLITQRKFDNLTKAERGGLSELDKAGFIKRQLVETRQITKHVAQILDSRMNTKYDENDKLIREVKVITLKSKLVSDFRKDFQFYKVREINNYHHAHDAYLNAVVGTALIKKYPKLESEFVYGDYKVYDVRKMIAKSEQEIGKATAKYFFYSNIMNFFKTEITLANGEIRKRPLIETNGETGEIVWDKGRDFATVRKVLSMPQVNIVKKTEVQTGGFSKESILPKRNSDKLIARKKDWDPKKYGGFDSPTVAYSVLVVAKVEKGKSKKLKSVKELLGITIMERSSFEKNPIDFLEAKGYKEVKKDLIIKLPKYSLFELENGRKRMLASAGELQKGNELALPSKYVNFLYLASHYEKLKGSPEDNEQKQLFVEQHKHYLDEIIEQISEFSKRVILADANLDKVLSAYNKHRDKPIREQAENIIHLFTLTNLGAPAAFKYFDTTIDRKRYTSTKEVLDATLIHQSITGLYETRIDLSQLGGDGGGGGGGGGTLNLEDEYRLYETSAEPEVSPGSTWLSDFPQAWAETGGMGLAVRQAPLIIPLKATSTPVSIKQYPMSQEAKLGIKPHIQRLLDQGILVPCQSPWNTPLLPVKKPGTNDYRPVQDLREVNKRVEDIHPTVPNPYNLLSGLPPSHRWYTVLDLKDAFFCLRLHPTSQPLFAFEWRDPGMGISGQLTWTRLPQGFKNSPTLFNEALHRDLADFRIQHPDLILLQYVDDILLAATSELDCQQGTRALLLTLGNLGYRASAKKAQLCQKQVKYLGYLLKEGQRWLTEARKETVMGQPTPKTPRQLREFLGKAGFCRLFIPGFAEMAAPLYPLTKPGTLFNWGPDQQKAYQEIKQALLTAPALGLPDLTKPFELFVDEKQGYAKGVLTQKLGPWRRPVAYLSKKLDPVAAGWPPCLRMVAAIAVLRKDAGKLTMGQPLVILAPHAVEALVKQPPDRWLSNARMTHYQAMLLDTDRVQFGPVVALNPATLLPLPEEGAPHDCLEILAETHGTRPDLTDQPIPDADHTWYTDGSSFLQEGQRKAGAAVTTETEVIWARALPAGTSAQRAELIALTQALKMAEGKRLNVYTDSRYAFATAHIHGEIYRRRGWLTSEGREIKNKSEILALLKALFLPKRLSIIHCLGHQKGDSAEARGNRLADQAAREAAIKTPPDTSTLLAGKRTADGSEFEKRTADGSEFESPKKKAKVE

SEQ ID NO: 1918 - protein, 2131 aa, synthetic construct
MPAAKRVKLDGGDKKYSIGLDIGTNSVGWAVITDEYKVPSKKFKVLGNTDRHSIKKNLIGALLFDSGETAEATRLKRTARRRYTRRKNRICYLQEIFSNEMAKVDDSFFHRLEESFLVEEDKKHERHPIFGNIVDEVAYHEKYPTIYHLRKKLVDSTDKADLRLIYLALAHMIKFRGHFLIEGDLNPDNSDVDKLFIQLVQTYNQLFEENPINASGVDAKAILSARLSKSRRLENLIAQLPGEKKNGLFGNLIALSLGLTPNFKSNFDLAEDAKLQLSKDTYDDDLDNLLAQIGDQYADLFLAAKNLSDAILLSDILRVNTEITKAPLSASMIKRYDEHHQDLTLLKALVRQQLPEKYKEIFFDQSKNGYAGYIDGGASQEEFYKFIKPILEKMDGTEELLVKLNREDLLRKQRTFDNGSIPHQIHLGELHAILRRQEDFYPFLKDNREKIEKILTFRIPYYVGPLARGNSRFAWMTRKSEETITPWNFEEVVDKGASAQSFIERMTNFDKNLPNEKVLPKHSLLYEYFTVYNELTKVKYVTEGMRKPAFLSGEQKKAIVDLLFKTNRKVTVKQLKEDYFKKIECFDSVEISGVEDRFNASLGTYHDLLKIIKDKDFLDNEENEDILEDIVLTLTLFEDREMIEERLKTYAHLFDDKVMKQLKRRRYTGWGRLSRKLINGIRDKQSGKTILDFLKSDGFANRNFMQLIHDDSLTFKEDIQKAQVSGQGDSLHEHIANLAGSPAIKKGILQTVKVVDELVKVMGRHKPENIVIEMARENQTTQKGQKNSRERMKRIEEGIKELGSQILKEHPVENTQLQNEKLYLYYLQNGRDMYVDQELDINRLSDYDVDHIVPQSFLKDDSIDNKVLTRSDKARGKSDNVPSEEVVKKMKNYWRQLLNAKLITQRKFDNLTKAERGGLSELDKAGFIKRQLVETRQITKHVAQILDSRMNTKYDENDKLIREVKVITLKSKLVSDFRKDFQFYKVREINNYHHAHDAYLNAVVGTALIKKYPKLESEFVYGDYKVYDVRKMIAKSEQEIGKATAKYFFYSNIMNFFKTEITLANGEIRKRPLIETNGETGEIVWDKGRDFATVRKVLSMPQVNIVKKTEVQTGGFSKESILPKRNSDKLIARKKDWDPKKYGGFDSPTVAYSVLVVAKVEKGKSKKLKSVKELLGITIMERSSFEKNPIDFLEAKGYKEVKKDLIIKLPKYSLFELENGRKRMLASAGELQKGNELALPSKYVNFLYLASHYEKLKGSPEDNEQKQLFVEQHKHYLDEIIEQISEFSKRVILADANLDKVLSAYNKHRDKPIREQAENIIHLFTLTNLGAPAAFKYFDTTIDRKRYTSTKEVLDATLIHQSITGLYETRIDLSQLGGDGGAEAAAKEAAAKEAAAKEAAAKALEAEAAAKEAAAKEAAAKEAAAKAGGTLNLEDEYRLYETSAEPEVSPGSTWLSDFPQAWAETGGMGLAVRQAPLIIPLKATSTPVSIKQYPMSQEAKLGIKPHIQRLLDQGILVPCQSPWNTPLLPVKKPGTNDYRPVQDLREVNKRVEDIHPTVPNPYNLLSGLPPSHRWYTVLDLKDAFFCLRLHPTSQPLFAFEWRDPGMGISGQLTWTRLPQGFKNSPTLFNEALHRDLADFRIQHPDLILLQYVDDILLAATSELDCQQGTRALLLTLGNLGYRASAKKAQLCQKQVKYLGYLLKEGQRWLTEARKETVMGQPTPKTPRQLREFLGKAGFCRLFIPGFAEMAAPLYPLTKPGTLFNWGPDQQKAYQEIKQALLTAPALGLPDLTKPFELFVDEKQGYAKGVLTQKLGPWRRPVAYLSKKLDPVAAGWPPCLRMVAAIAVLRKDAGKLTMGQPLVILAPHAVEALVKQPPDRWLSNARMTHYQAMLLDTDRVQFGPVVALNPATLLPLPEEGAPHDCLEILAETHGTRPDLTDQPIPDADHTWYTDGSSFLQEGQRKAGAAVTTETEVIWARALPAGTSAQRAELIALTQALKMAEGKRLNVYTDSRYAFATAHIHGEIYRRRGWLTSEGREIKNKSEILALLKALFLPKRLSIIHCLGHQKGDSAEARGNRLADQAAREAAIKTPPDTSTLLAGKRTADGSEFEKRTADGSEFESPKKKAKVE

SEQ ID NO: 1919 - protein, 2096 aa, synthetic construct
MPAAKRVKLDGGDKKYSIGLDIGTNSVGWAVITDEYKVPSKKFKVLGNTDRHSIKKNLIGALLFDSGETAEATRLKRTARRRYTRRKNRICYLQEIFSNEMAKVDDSFFHRLEESFLVEEDKKHERHPIFGNIVDEVAYHEKYPTIYHLRKKLVDSTDKADLRLIYLALAHMIKFRGHFLIEGDLNPDNSDVDKLFIQLVQTYNQLFEENPINASGVDAKAILSARLSKSRRLENLIAQLPGEKKNGLFGNLIALSLGLTPNFKSNFDLAEDAKLQLSKDTYDDDLDNLLAQIGDQYADLFLAAKNLSDAILLSDILRVNTEITKAPLSASMIKRYDEHHQDLTLLKALVRQQLPEKYKEIFFDQSKNGYAGYIDGGASQEEFYKFIKPILEKMDGTEELLVKLNREDLLRKQRTFDNGSIPHQIHLGELHAILRRQEDFYPFLKDNREKIEKILTFRIPYYVGPLARGNSRFAWMTRKSEETITPWNFEEVVDKGASAQSFIERMTNFDKNLPNEKVLPKHSLLYEYFTVYNELTKVKYVTEGMRKPAFLSGEQKKAIVDLLFKTNRKVTVKQLKEDYFKKIECFDSVEISGVEDRFNASLGTYHDLLKIIKDKDFLDNEENEDILEDIVLTLTLFEDREMIEERLKTYAHLFDDKVMKQLKRRRYTGWGRLSRKLINGIRDKQSGKTILDFLKSDGFANRNFMQLIHDDSLTFKEDIQKAQVSGQGDSLHEHIANLAGSPAIKKGILQTVKVVDELVKVMGRHKPENIVIEMARENQTTQKGQKNSRERMKRIEEGIKELGSQILKEHPVENTQLQNEKLYLYYLQNGRDMYVDQELDINRLSDYDVDHIVPQSFLKDDSIDNKVLTRSDKARGKSDNVPSEEVVKKMKNYWRQLLNAKLITQRKFDNLTKAERGGLSELDKAGFIKRQLVETRQITKHVAQILDSRMNTKYDENDKLIREVKVITLKSKLVSDFRKDFQFYKVREINNYHHAHDAYLNAVVGTALIKKYPKLESEFVYGDYKVYDVRKMIAKSEQEIGKATAKYFFYSNIMNFFKTEITLANGEIRKRPLIETNGETGEIVWDKGRDFATVRKVLSMPQVNIVKKTEVQTGGFSKESILPKRNSDKLIARKKDWDPKKYGGFDSPTVAYSVLVVAKVEKGKSKKLKSVKELLGITIMERSSFEKNPIDFLEAKGYKEVKKDLIIKLPKYSLFELENGRKRMLASAGELQKGNELALPSKYVNFLYLASHYEKLKGSPEDNEQKQLFVEQHKHYLDEIIEQISEFSKRVILADANLDKVLSAYNKHRDKPIREQAENIIHLFTLTNLGAPAAFKYFDTTIDRKRYTSTKEVLDATLIHQSITGLYETRIDLSQLGGDGGPAPEAAAKGSSGGTLNLEDEYRLYETSAEPEVSPGSTWLSDFPQAWAETGGMGLAVRQAPLIIPLKATSTPVSIKQYPMSQEAKLGIKPHIQRLLDQGILVPCQSPWNTPLLPVKKPGTNDYRPVQDLREVNKRVEDIHPTVPNPYNLLSGLPPSHRWYTVLDLKDAFFCLRLHPTSQPLFAFEWRDPGMGISGQLTWTRLPQGFKNSPTLFNEALHRDLADFRIQHPDLILLQYVDDILLAATSELDCQQGTRALLLTLGNLGYRASAKKAQLCQKQVKYLGYLLKEGQRWLTEARKETVMGQPTPKTPRQLREFLGKAGFCRLFIPGFAEMAAPLYPLTKPGTLFNWGPDQQKAYQEIKQALLTAPALGLPDLTKPFELFVDEKQGYAKGVLTQKLGPWRRPVAYLSKKLDPVAAGWPPCLRMVAAIAVLRKDAGKLTMGQPLVILAPHAVEALVKQPPDRWLSNARMTHYQAMLLDTDRVQFGPVVALNPATLLPLPEEGAPHDCLEILAETHGTRPDLTDQPIPDADHTWYTDGSSFLQEGQRKAGAAVTTETEVIWARALPAGTSAQRAELIALTQALKMAEGKRLNVYTDSRYAFATAHIHGEIYRRRGWLTSEGREIKNKSEILALLKALFLPKRLSIIHCLGHQKGDSAEARGNRLADQAAREAAIKTPPDTSTLLAGKRTADGSEFEKRTADGSEFESPKKKAKVE

SEQ ID NO: 1920 - protein, 2096 aa, synthetic construct
MPAAKRVKLDGGDKKYSIGLDIGTNSVGWAVITDEYKVPSKKFKVLGNTDRHSIKKNLIGALLFDSGETAEATRLKRTARRRYTRRKNRICYLQEIFSNEMAKVDDSFFHRLEESFLVEEDKKHERHPIFGNIVDEVAYHEKYPTIYHLRKKLVDSTDKADLRLIYLALAHMIKFRGHFLIEGDLNPDNSDVDKLFIQLVQTYNQLFEENPINASGVDAKAILSARLSKSRRLENLIAQLPGEKKNGLFGNLIALSLGLTPNFKSNFDLAEDAKLQLSKDTYDDDLDNLLAQIGDQYADLFLAAKNLSDAILLSDILRVNTEITKAPLSASMIKRYDEHHQDLTLLKALVRQQLPEKYKEIFFDQSKNGYAGYIDGGASQEEFYKFIKPILEKMDGTEELLVKLNREDLLRKQRTFDNGSIPHQIHLGELHAILRRQEDFYPFLKDNREKIEKILTFRIPYYVGPLARGNSRFAWMTRKSEETITPWNFEEVVDKGASAQSFIERMTNFDKNLPNEKVLPKHSLLYEYFTVYNELTKVKYVTEGMRKPAFLSGEQKKAIVDLLFKTNRKVTVKQLKEDYFKKIECFDSVEISGVEDRFNASLGTYHDLLKIIKDKDFLDNEENEDILEDIVLTLTLFEDREMIEERLKTYAHLFDDKVMKQLKRRRYTGWGRLSRKLINGIRDKQSGKTILDFLKSDGFANRNFMQLIHDDSLTFKEDIQKAQVSGQGDSLHEHIANLAGSPAIKKGILQTVKVVDELVKVMGRHKPENIVIEMARENQTTQKGQKNSRERMKRIEEGIKELGSQILKEHPVENTQLQNEKLYLYYLQNGRDMYVDQELDINRLSDYDVDHIVPQSFLKDDSIDNKVLTRSDKARGKSDNVPSEEVVKKMKNYWRQLLNAKLITQRKFDNLTKAERGGLSELDKAGFIKRQLVETRQITKHVAQILDSRMNTKYDENDKLIREVKVITLKSKLVSDFRKDFQFYKVREINNYHHAHDAYLNAVVGTALIKKYPKLESEFVYGDYKVYDVRKMIAKSEQEIGKATAKYFFYSNIMNFFKTEITLANGEIRKRPLIETNGETGEIVWDKGRDFATVRKVLSMPQVNIVKKTEVQTGGFSKESILPKRNSDKLIARKKDWDPKKYGGFDSPTVAYSVLVVAKVEKGKSKKLKSVKELLGITIMERSSFEKNPIDFLEAKGYKEVKKDLIIKLPKYSLFELENGRKRMLASAGELQKGNELALPSKYVNFLYLASHYEKLKGSPEDNEQKQLFVEQHKHYLDEIIEQISEFSKRVILADANLDKVLSAYNKHRDKPIREQAENIIHLFTLTNLGAPAAFKYFDTTIDRKRYTSTKEVLDATLIHQSITGLYETRIDLSQLGGDGGGGGEAAAKGGSGGTLNLEDEYRLYETSAEPEVSPGSTWLSDFPQAWAETGGMGLAVRQAPLIIPLKATSTPVSIKQYPMSQEAKLGIKPHIQRLLDQGILVPCQSPWNTPLLPVKKPGTNDYRPVQDLREVNKRVEDIHPTVPNPYNLLSGLPPSHRWYTVLDLKDAFFCLRLHPTSQPLFAFEWRDPGMGISGQLTWTRLPQGFKNSPTLFNEALHRDLADFRIQHPDLILLQYVDDILLAATSELDCQQGTRALLLTLGNLGYRASAKKAQLCQKQVKYLGYLLKEGQRWLTEARKETVMGQPTPKTPRQLREFLGKAGFCRLFIPGFAEMAAPLYPLTKPGTLFNWGPDQQKAYQEIKQALLTAPALGLPDLTKPFELFVDEKQGYAKGVLTQKLGPWRRPVAYLSKKLDPVAAGWPPCLRMVAAIAVLRKDAGKLTMGQPLVILAPHAVEALVKQPPDRWLSNARMTHYQAMLLDTDRVQFGPVVALNPATLLPLPEEGAPHDCLEILAETHGTRPDLTDQPIPDADHTWYTDGSSFLQEGQRKAGAAVTTETEVIWARALPAGTSAQRAELIALTQALKMAEGKRLNVYTDSRYAFATAHIHGEIYRRRGWLTSEGREIKNKSEILALLKALFLPKRLSIIHCLGHQKGDSAEARGNRLADQAAREAAIKTPPDTSTLLAGKRTADGSEFEKRTADGSEFESPKKKAKVE

SEQ ID NO: 1921 - protein, 2096 aa, synthetic construct
MPAAKRVKLDGGDKKYSIGLDIGTNSVGWAVITDEYKVPSKKFKVLGNTDRHSIKKNLIGALLFDSGETAEATRLKRTARRRYTRRKNRICYLQEIFSNEMAKVDDSFFHRLEESFLVEEDKKHERHPIFGNIVDEVAYHEKYPTIYHLRKKLVDSTDKADLRLIYLALAHMIKFRGHFLIEGDLNPDNSDVDKLFIQLVQTYNQLFEENPINASGVDAKAILSARLSKSRRLENLIAQLPGEKKNGLFGNLIALSLGLTPNFKSNFDLAEDAKLQLSKDTYDDDLDNLLAQIGDQYADLFLAAKNLSDAILLSDILRVNTEITKAPLSASMIKRYDEHHQDLTLLKALVRQQLPEKYKEIFFDQSKNGYAGYIDGGASQEEFYKFIKPILEKMDGTEELLVKLNREDLLRKQRTFDNGSIPHQIHLGELHAILRRQEDFYPFLKDNREKIEKILTFRIPYYVGPLARGNSRFAWMTRKSEETITPWNFEEVVDKGASAQSFIERMTNFDKNLPNEKVLPKHSLLYEYFTVYNELTKVKYVTEGMRKPAFLSGEQKKAIVDLLFKTNRKVTVKQLKEDYFKKIECFDSVEISGVEDRFNASLGTYHDLLKIIKDKDFLDNEENEDILEDIVLTLTLFEDREMIEERLKTYAHLFDDKVMKQLKRRRYTGWGRLSRKLINGIRDKQSGKTILDFLKSDGFANRNFMQLIHDDSLTFKEDIQKAQVSGQGDSLHEHIANLAGSPAIKKGILQTVKVVDELVKVMGRHKPENIVIEMARENQTTQKGQKNSRERMKRIEEGIKELGSQILKEHPVENTQLQNEKLYLYYLQNGRDMYVDQELDINRLSDYDVDHIVPQSFLKDDSIDNKVLTRSDKARGKSDNVPSEEVVKKMKNYWRQLLNAKLITQRKFDNLTKAERGGLSELDKAGFIKRQLVETRQITKHVAQILDSRMNTKYDENDKLIREVKVITLKSKLVSDFRKDFQFYKVREINNYHHAHDAYLNAVVGTALIKKYPKLESEFVYGDYKVYDVRKMIAKSEQEIGKATAKYFFYSNIMNFFKTEITLANGEIRKRPLIETNGETGEIVWDKGRDFATVRKVLSMPQVNIVKKTEVQTGGFSKESILPKRNSDKLIARKKDWDPKKYGGFDSPTVAYSVLVVAKVEKGKSKKLKSVKELLGITIMERSSFEKNPIDFLEAKGYKEVKKDLIIKLPKYSLFELENGRKRMLASAGELQKGNELALPSKYVNFLYLASHYEKLKGSPEDNEQKQLFVEQHKHYLDEIIEQISEFSKRVILADANLDKVLSAYNKHRDKPIREQAENIIHLFTLTNLGAPAAFKYFDTTIDRKRYTSTKEVLDATLIHQSITGLYETRIDLSQLGGDGGEAAAKGSSGGGGGTLNLEDEYRLYETSAEPEVSPGSTWLSDFPQAWAETGGMGLAVRQAPLIIPLKATSTPVSIKQYPMSQEAKLGIKPHIQRLLDQGILVPCQSPWNTPLLPVKKPGTNDYRPVQDLREVNKRVEDIHPTVPNPYNLLSGLPPSHRWYTVLDLKDAFFCLRLHPTSQPLFAFEWRDPGMGISGQLTWTRLPQGFKNSPTLFNEALHRDLADFRIQHPDLILLQYVDDILLAATSELDCQQGTRALLLTLGNLGYRASAKKAQLCQKQVKYLGYLLKEGQRWLTEARKETVMGQPTPKTPRQLREFLGKAGFCRLFIPGFAEMAAPLYPLTKPGTLFNWGPDQQKAYQEIKQALLTAPALGLPDLTKPFELFVDEKQGYAKGVLTQKLGPWRRPVAYLSKKLDPVAAGWPPCLRMVAAIAVLRKDAGKLTMGQPLVILAPHAVEALVKQPPDRWLSNARMTHYQAMLLDTDRVQFGPVVALNPATLLPLPEEGAPHDCLEILAETHGTRPDLTDQPIPDADHTWYTDGSSFLQEGQRKAGAAVTTETEVIWARALPAGTSAQRAELIALTQALKMAEGKRLNVYTDSRYAFATAHIHGEIYRRRGWLTSEGREIKNKSEILALLKALFLPKRLSIIHCLGHQKGDSAEARGNRLADQAAREAAIKTPPDTSTLLAGKRTADGSEFEKRTADGSEFESPKKKAKVE

SEQ ID NO: 1922 - protein, 2093 aa, synthetic construct
MPAAKRVKLDGGDKKYSIGLDIGTNSVGWAVITDEYKVPSKKFKVLGNTDRHSIKKNLIGALLFDSGETAEATRLKRTARRRYTRRKNRICYLQEIFSNEMAKVDDSFFHRLEESFLVEEDKKHERHPIFGNIVDEVAYHEKYPTIYHLRKKLVDSTDKADLRLIYLALAHMIKFRGHFLIEGDLNPDNSDVDKLFIQLVQTYNQLFEENPINASGVDAKAILSARLSKSRRLENLIAQLPGEKKNGLFGNLIALSLGLTPNFKSNFDLAEDAKLQLSKDTYDDDLDNLLAQIGDQYADLFLAAKNLSDAILLSDILRVNTEITKAPLSASMIKRYDEHHQDLTLLKALVRQQLPEKYKEIFFDQSKNGYAGYIDGGASQEEFYKFIKPILEKMDGTEELLVKLNREDLLRKQRTFDNGSIPHQIHLGELHAILRRQEDFYPFLKDNREKIEKILTFRIPYYVGPLARGNSRFAWMTRKSEETITPWNFEEVVDKGASAQSFIERMTNFDKNLPNEKVLPKHSLLYEYFTVYNELTKVKYVTEGMRKPAFLSGEQKKAIVDLLFKTNRKVTVKQLKEDYFKKIECFDSVEISGVEDRFNASLGTYHDLLKIIKDKDFLDNEENEDILEDIVLTLTLFEDREMIEERLKTYAHLFDDKVMKQLKRRRYTGWGRLSRKLINGIRDKQSGKTILDFLKSDGFANRNFMQLIHDDSLTFKEDIQKAQVSGQGDSLHEHIANLAGSPAIKKGILQTVKVVDELVKVMGRHKPENIVIEMARENQTTQKGQKNSRERMKRIEEGIKELGSQILKEHPVENTQLQNEKLYLYYLQNGRDMYVDQELDINRLSDYDVDHIVPQSFLKDDSIDNKVLTRSDKARGKSDNVPSEEVVKKMKNYWRQLLNAKLITQRKFDNLTKAERGGLSELDKAGFIKRQLVETRQITKHVAQILDSRMNTKYDENDKLIREVKVITLKSKLVSDFRKDFQFYKVREINNYHHAHDAYLNAVVGTALIKKYPKLESEFVYGDYKVYDVRKMIAKSEQEIGKATAKYFFYSNIMNFFKTEITLANGEIRKRPLIETNGETGEIVWDKGRDFATVRKVLSMPQVNIVKKTEVQTGGFSKESILPKRNSDKLIARKKDWDPKKYGGFDSPTVAYSVLVVAKVEKGKSKKLKSVKELLGITIMERSSFEKNPIDFLEAKGYKEVKKDLIIKLPKYSLFELENGRKRMLASAGELQKGNELALPSKYVNFLYLASHYEKLKGSPEDNEQKQLFVEQHKHYLDEIIEQISEFSKRVILADANLDKVLSAYNKHRDKPIREQAENIIHLFTLTNLGAPAAFKYFDTTIDRKRYTSTKEVLDATLIHQSITGLYETRIDLSQLGGDGGGGSEAAAKGGTLNLEDEYRLYETSAEPEVSPGSTWLSDFPQAWAETGGMGLAVRQAPLIIPLKATSTPVSIKQYPMSQEAKLGIKPHIQRLLDQGILVPCQSPWNTPLLPVKKPGTNDYRPVQDLREVNKRVEDIHPTVPNPYNLLSGLPPSHRWYTVLDLKDAFFCLRLHPTSQPLFAFEWRDPGMGISGQLTWTRLPQGFKNSPTLFNEALHRDLADFRIQHPDLILLQYVDDILLAATSELDCQQGTRALLLTLGNLGYRASAKKAQLCQKQVKYLGYLLKEGQRWLTEARKETVMGQPTPKTPRQLREFLGKAGFCRLFIPGFAEMAAPLYPLTKPGTLFNWGPDQQKAYQEIKQALLTAPALGLPDLTKPFELFVDEKQGYAKGVLTQKLGPWRRPVAYLSKKLDPVAAGWPPCLRMVAAIAVLRKDAGKLTMGQPLVILAPHAVEALVKQPPDRWLSNARMTHYQAMLLDTDRVQFGPVVALNPATLLPLPEEGAPHDCLEILAETHGTRPDLTDQPIPDADHTWYTDGSSFLQEGQRKAGAAVTTETEVIWARALPAGTSAQRAELIALTQALKMAEGKRLNVYTDSRYAFATAHIHGEIYRRRGWLTSEGREIKNKSEILALLKALFLPKRLSIIHCLGHQKGDSAEARGNRLADQAAREAAIKTPPDTSTLLAGKRTADGSEFEKRTADGSEFESPKKKAKVE

SEQ ID NO: 1923 - protein, 2100 aa, synthetic construct
MPAAKRVKLDGGDKKYSIGLDIGTNSVGWAVITDEYKVPSKKFKVLGNTDRHSIKKNLIGALLFDSGETAEATRLKRTARRRYTRRKNRICYLQEIFSNEMAKVDDSFFHRLEESFLVEEDKKHERHPIFGNIVDEVAYHEKYPTIYHLRKKLVDSTDKADLRLIYLALAHMIKFRGHFLIEGDLNPDNSDVDKLFIQLVQTYNQLFEENPINASGVDAKAILSARLSKSRRLENLIAQLPGEKKNGLFGNLIALSLGLTPNFKSNFDLAEDAKLQLSKDTYDDDLDNLLAQIGDQYADLFLAAKNLSDAILLSDILRVNTEITKAPLSASMIKRYDEHHQDLTLLKALVRQQLPEKYKEIFFDQSKNGYAGYIDGGASQEEFYKFIKPILEKMDGTEELLVKLNREDLLRKQRTFDNGSIPHQIHLGELHAILRRQEDFYPFLKDNREKIEKILTFRIPYYVGPLARGNSRFAWMTRKSEETITPWNFEEVVDKGASAQSFIERMTNFDKNLPNEKVLPKHSLLYEYFTVYNELTKVKYVTEGMRKPAFLSGEQKKAIVDLLFKTNRKVTVKQLKEDYFKKIECFDSVEISGVEDRFNASLGTYHDLLKIIKDKDFLDNEENEDILEDIVLTLTLFEDREMIEERLKTYAHLFDDKVMKQLKRRRYTGWGRLSRKLINGIRDKQSGKTILDFLKSDGFANRNFMQLIHDDSLTFKEDIQKAQVSGQGDSLHEHIANLAGSPAIKKGILQTVKVVDELVKVMGRHKPENIVIEMARENQTTQKGQKNSRERMKRIEEGIKELGSQILKEHPVENTQLQNEKLYLYYLQNGRDMYVDQELDINRLSDYDVDHIVPQSFLKDDSIDNKVLTRSDKARGKSDNVPSEEVVKKMKNYWRQLLNAKLITQRKFDNLTKAERGGLSELDKAGFIKRQLVETRQITKHVAQILDSRMNTKYDENDKLIREVKVITLKSKLVSDFRKDFQFYKVREINNYHHAHDAYLNAVVGTALIKKYPKLESEFVYGDYKVYDVRKMIAKSEQEIGKATAKYFFYSNIMNFFKTEITLANGEIRKRPLIETNGETGEIVWDKGRDFATVRKVLSMPQVNIVKKTEVQTGGFSKESILPKRNSDKLIARKKDWDPKKYGGFDSPTVAYSVLVVAKVEKGKSKKLKSVKELLGITIMERSSFEKNPIDFLEAKGYKEVKKDLIIKLPKYSLFELENGRKRMLASAGELQKGNELALPSKYVNFLYLASHYEKLKGSPEDNEQKQLFVEQHKHYLDEIIEQISEFSKRVILADANLDKVLSAYNKHRDKPIREQAENIIHLFTLTNLGAPAAFKYFDTTIDRKRYTSTKEVLDATLIHQSITGLYETRIDLSQLGGDGGGSSGSSGSSGSSGSSGGTLNLEDEYRLYETSAEPEVSPGSTWLSDFPQAWAETGGMGLAVRQAPLIIPLKATSTPVSIKQYPMSQEAKLGIKPHIQRLLDQGILVPCQSPWNTPLLPVKKPGTNDYRPVQDLREVNKRVEDIHPTVPNPYNLLSGLPPSHRWYTVLDLKDAFFCLRLHPTSQPLFAFEWRDPGMGISGQLTWTRLPQGFKNSPTLFNEALHRDLADFRIQHPDLILLQYVDDILLAATSELDCQQGTRALLLTLGNLGYRASAKKAQLCQKQVKYLGYLLKEGQRWLTEARKETVMGQPTPKTPRQLREFLGKAGFCRLFIPGFAEMAAPLYPLTKPGTLFNWGPDQQKAYQEIKQALLTAPALGLPDLTKPFELFVDEKQGYAKGVLTQKLGPWRRPVAYLSKKLDPVAAGWPPCLRMVAAIAVLRKDAGKLTMGQPLVILAPHAVEALVKQPPDRWLSNARMTHYQAMLLDTDRVQFGPVVALNPATLLPLPEEGAPHDCLEILAETHGTRPDLTDQPIPDADHTWYTDGSSFLQEGQRKAGAAVTTETEVIWARALPAGTSAQRAELIALTQALKMAEGKRLNVYTDSRYAFATAHIHGEIYRRRGWLTSEGREIKNKSEILALLKALFLPKRLSIIHCLGHQKGDSAEARGNRLADQAAREAAIKTPPDTSTLLAGKRTADGSEFEKRTADGSEFESPKKKAKVE

SEQ ID NO: 1924 - protein, 2096 aa, synthetic construct
MPAAKRVKLDGGDKKYSIGLDIGTNSVGWAVITDEYKVPSKKFKVLGNTDRHSIKKNLIGALLFDSGETAEATRLKRTARRRYTRRKNRICYLQEIFSNEMAKVDDSFFHRLEESFLVEEDKKHERHPIFGNIVDEVAYHEKYPTIYHLRKKLVDSTDKADLRLIYLALAHMIKFRGHFLIEGDLNPDNSDVDKLFIQLVQTYNQLFEENPINASGVDAKAILSARLSKSRRLENLIAQLPGEKKNGLFGNLIALSLGLTPNFKSNFDLAEDAKLQLSKDTYDDDLDNLLAQIGDQYADLFLAAKNLSDAILLSDILRVNTEITKAPLSASMIKRYDEHHQDLTLLKALVRQQLPEKYKEIFFDQSKNGYAGYIDGGASQEEFYKFIKPILEKMDGTEELLVKLNREDLLRKQRTFDNGSIPHQIHLGELHAILRRQEDFYPFLKDNREKIEKILTFRIPYYVGPLARGNSRFAWMTRKSEETITPWNFEEVVDKGASAQSFIERMTNFDKNLPNEKVLPKHSLLYEYFTVYNELTKVKYVTEGMRKPAFLSGEQKKAIVDLLFKTNRKVTVKQLKEDYFKKIECFDSVEISGVEDRFNASLGTYHDLLKIIKDKDFLDNEENEDILEDIVLTLTLFEDREMIEERLKTYAHLFDDKVMKQLKRRRYTGWGRLSRKLINGIRDKQSGKTILDFLKSDGFANRNFMQLIHDDSLTFKEDIQKAQVSGQGDSLHEHIANLAGSPAIKKGILQTVKVVDELVKVMGRHKPENIVIEMARENQTTQKGQKNSRERMKRIEEGIKELGSQILKEHPVENTQLQNEKLYLYYLQNGRDMYVDQELDINRLSDYDVDHIVPQSFLKDDSIDNKVLTRSDKARGKSDNVPSEEVVKKMKNYWRQLLNAKLITQRKFDNLTKAERGGLSELDKAGFIKRQLVETRQITKHVAQILDSRMNTKYDENDKLIREVKVITLKSKLVSDFRKDFQFYKVREINNYHHAHDAYLNAVVGTALIKKYPKLESEFVYGDYKVYDVRKMIAKSEQEIGKATAKYFFYSNIMNFFKTEITLANGEIRKRPLIETNGETGEIVWDKGRDFATVRKVLSMPQVNIVKKTEVQTGGFSKESILPKRNSDKLIARKKDWDPKKYGGFDSPTVAYSVLVVAKVEKGKSKKLKSVKELLGITIMERSSFEKNPIDFLEAKGYKEVKKDLIIKLPKYSLFELENGRKRMLASAGELQKGNELALPSKYVNFLYLASHYEKLKGSPEDNEQKQLFVEQHKHYLDEIIEQISEFSKRVILADANLDKVLSAYNKHRDKPIREQAENIIHLFTLTNLGAPAAFKYFDTTIDRKRYTSTKEVLDATLIHQSITGLYETRIDLSQLGGDGGPAPAPAPAPAPGGTLNLEDEYRLYETSAEPEVSPGSTWLSDFPQAWAETGGMGLAVRQAPLIIPLKATSTPVSIKQYPMSQEAKLGIKPHIQRLLDQGILVPCQSPWNTPLLPVKKPGTNDYRPVQDLREVNKRVEDIHPTVPNPYNLLSGLPPSHRWYTVLDLKDAFFCLRLHPTSQPLFAFEWRDPGMGISGQLTWTRLPQGFKNSPTLFNEALHRDLADFRIQHPDLILLQYVDDILLAATSELDCQQGTRALLLTLGNLGYRASAKKAQLCQKQVKYLGYLLKEGQRWLTEARKETVMGQPTPKTPRQLREFLGKAGFCRLFIPGFAEMAAPLYPLTKPGTLFNWGPDQQKAYQEIKQALLTAPALGLPDLTKPFELFVDEKQGYAKGVLTQKLGPWRRPVAYLSKKLDPVAAGWPPCLRMVAAIAVLRKDAGKLTMGQPLVILAPHAVEALVKQPPDRWLSNARMTHYQAMLLDTDRVQFGPVVALNPATLLPLPEEGAPHDCLEILAETHGTRPDLTDQPIPDADHTWYTDGSSFLQEGQRKAGAAVTTETEVIWARALPAGTSAQRAELIALTQALKMAEGKRLNVYTDSRYAFATAHIHGEIYRRRGWLTSEGREIKNKSEILALLKALFLPKRLSIIHCLGHQKGDSAEARGNRLADQAAREAAIKTPPDTSTLLAGKRTADGSEFEKRTADGSEFESPKKKAKVE

SEQ ID NO: 1925 - protein, 2094 aa, synthetic construct
MPAAKRVKLDGGDKKYSIGLDIGTNSVGWAVITDEYKVPSKKFKVLGNTDRHSIKKNLIGALLFDSGETAEATRLKRTARRRYTRRKNRICYLQEIFSNEMAKVDDSFFHRLEESFLVEEDKKHERHPIFGNIVDEVAYHEKYPTIYHLRKKLVDSTDKADLRLIYLALAHMIKFRGHFLIEGDLNPDNSDVDKLFIQLVQTYNQLFEENPINASGVDAKAILSARLSKSRRLENLIAQLPGEKKNGLFGNLIALSLGLTPNFKSNFDLAEDAKLQLSKDTYDDDLDNLLAQIGDQYADLFLAAKNLSDAILLSDILRVNTEITKAPLSASMIKRYDEHHQDLTLLKALVRQQLPEKYKEIFFDQSKNGYAGYIDGGASQEEFYKFIKPILEKMDGTEELLVKLNREDLLRKQRTFDNGSIPHQIHLGELHAILRRQEDFYPFLKDNREKIEKILTFRIPYYVGPLARGNSRFAWMTRKSEETITPWNFEEVVDKGASAQSFIERMTNFDKNLPNEKVLPKHSLLYEYFTVYNELTKVKYVTEGMRKPAFLSGEQKKAIVDLLFKTNRKVTVKQLKEDYFKKIECFDSVEISGVEDRFNASLGTYHDLLKIIKDKDFLDNEENEDILEDIVLTLTLFEDREMIEERLKTYAHLFDDKVMKQLKRRRYTGWGRLSRKLINGIRDKQSGKTILDFLKSDGFANRNFMQLIHDDSLTFKEDIQKAQVSGQGDSLHEHIANLAGSPAIKKGILQTVKVVDELVKVMGRHKPENIVIEMARENQTTQKGQKNSRERMKRIEEGIKELGSQILKEHPVENTQLQNEKLYLYYLQNGRDMYVDQELDINRLSDYDVDHIVPQSFLKDDSIDNKVLTRSDKARGKSDNVPSEEVVKKMKNYWRQLLNAKLITQRKFDNLTKAERGGLSELDKAGFIKRQLVETRQITKHVAQILDSRMNTKYDENDKLIREVKVITLKSKLVSDFRKDFQFYKVREINNYHHAHDAYLNAVVGTALIKKYPKLESEFVYGDYKVYDVRKMIAKSEQEIGKATAKYFFYSNIMNFFKTEITLANGEIRKRPLIETNGETGEIVWDKGRDFATVRKVLSMPQVNIVKKTEVQTGGFSKESILPKRNSDKLIARKKDWDPKKYGGFDSPTVAYSVLVVAKVEKGKSKKLKSVKELLGITIMERSSFEKNPIDFLEAKGYKEVKKDLIIKLPKYSLFELENGRKRMLASAGELQKGNELALPSKYVNFLYLASHYEKLKGSPEDNEQKQLFVEQHKHYLDEIIEQISEFSKRVILADANLDKVLSAYNKHRDKPIREQAENIIHLFTLTNLGAPAAFKYFDTTIDRKRYTSTKEVLDATLIHQSITGLYETRIDLSQLGGDGGGSSGSSGSSGGTLNLEDEYRLYETSAEPEVSPGSTWLSDFPQAWAETGGMGLAVRQAPLIIPLKATSTPVSIKQYPMSQEAKLGIKPHIQRLLDQGILVPCQSPWNTPLLPVKKPGTNDYRPVQDLREVNKRVEDIHPTVPNPYNLLSGLPPSHRWYTVLDLKDAFFCLRLHPTSQPLFAFEWRDPGMGISGQLTWTRLPQGFKNSPTLFNEALHRDLADFRIQHPDLILLQYVDDILLAATSELDCQQGTRALLLTLGNLGYRASAKKAQLCQKQVKYLGYLLKEGQRWLTEARKETVMGQPTPKTPRQLREFLGKAGFCRLFIPGFAEMAAPLYPLTKPGTLFNWGPDQQKAYQEIKQALLTAPALGLPDLTKPFELFVDEKQGYAKGVLTQKLGPWRRPVAYLSKKLDPVAAGWPPCLRMVAAIAVLRKDAGKLTMGQPLVILAPHAVEALVKQPPDRWLSNARMTHYQAMLLDTDRVQFGPVVALNPATLLPLPEEGAPHDCLEILAETHGTRPDLTDQPIPDADHTWYTDGSSFLQEGQRKAGAAVTTETEVIWARALPAGTSAQRAELIALTQALKMAEGKRLNVYTDSRYAFATAHIHGEIYRRRGWLTSEGREIKNKSEILALLKALFLPKRLSIIHCLGHQKGDSAEARGNRLADQAAREAAIKTPPDTSTLLAGKRTADGSEFEKRTADGSEFESPKKKAKVE

SEQ ID NO: 1926 - protein, 2094 aa, synthetic construct
MPAAKRVKLDGGDKKYSIGLDIGTNSVGWAVITDEYKVPSKKFKVLGNTDRHSIKKNLIGALLFDSGETAEATRLKRTARRRYTRRKNRICYLQEIFSNEMAKVDDSFFHRLEESFLVEEDKKHERHPIFGNIVDEVAYHEKYPTIYHLRKKLVDSTDKADLRLIYLALAHMIKFRGHFLIEGDLNPDNSDVDKLFIQLVQTYNQLFEENPINASGVDAKAILSARLSKSRRLENLIAQLPGEKKNGLFGNLIALSLGLTPNFKSNFDLAEDAKLQLSKDTYDDDLDNLLAQIGDQYADLFLAAKNLSDAILLSDILRVNTEITKAPLSASMIKRYDEHHQDLTLLKALVRQQLPEKYKEIFFDQSKNGYAGYIDGGASQEEFYKFIKPILEKMDGTEELLVKLNREDLLRKQRTFDNGSIPHQIHLGELHAILRRQEDFYPFLKDNREKIEKILTFRIPYYVGPLARGNSRFAWMTRKSEETITPWNFEEVVDKGASAQSFIERMTNFDKNLPNEKVLPKHSLLYEYFTVYNELTKVKYVTEGMRKPAFLSGEQKKAIVDLLFKTNRKVTVKQLKEDYFKKIECFDSVEISGVEDRFNASLGTYHDLLKIIKDKDFLDNEENEDILEDIVLTLTLFEDREMIEERLKTYAHLFDDKVMKQLKRRRYTGWGRLSRKLINGIRDKQSGKTILDFLKSDGFANRNFMQLIHDDSLTFKEDIQKAQVSGQGDSLHEHIANLAGSPAIKKGILQTVKVVDELVKVMGRHKPENIVIEMARENQTTQKGQKNSRERMKRIEEGIKELGSQILKEHPVENTQLQNEKLYLYYLQNGRDMYVDQELDINRLSDYDVDHIVPQSFLKDDSIDNKVLTRSDKARGKSDNVPSEEVVKKMKNYWRQLLNAKLITQRKFDNLTKAERGGLSELDKAGFIKRQLVETRQITKHVAQILDSRMNTKYDENDKLIREVKVITLKSKLVSDFRKDFQFYKVREINNYHHAHDAYLNAVVGTALIKKYPKLESEFVYGDYKVYDVRKMIAKSEQEIGKATAKYFFYSNIMNFFKTEITLANGEIRKRPLIETNGETGEIVWDKGRDFATVRKVLSMPQVNIVKKTEVQTGGFSKESILPKRNSDKLIARKKDWDPKKYGGFDSPTVAYSVLVVAKVEKGKSKKLKSVKELLGITIMERSSFEKNPIDFLEAKGYKEVKKDLIIKLPKYSLFELENGRKRMLASAGELQKGNELALPSKYVNFLYLASHYEKLKGSPEDNEQKQLFVEQHKHYLDEIIEQISEFSKRVILADANLDKVLSAYNKHRDKPIREQAENIIHLFTLTNLGAPAAFKYFDTTIDRKRYTSTKEVLDATLIHQSITGLYETRIDLSQLGGDGGGSSGGSPAPGGTLNLEDEYRLYETSAEPEVSPGSTWLSDFPQAWAETGGMGLAVRQAPLIIPLKATSTPVSIKQYPMSQEAKLGIKPHIQRLLDQGILVPCQSPWNTPLLPVKKPGTNDYRPVQDLREVNKRVEDIHPTVPNPYNLLSGLPPSHRWYTVLDLKDAFFCLRLHPTSQPLFAFEWRDPGMGISGQLTWTRLPQGFKNSPTLFNEALHRDLADFRIQHPDLILLQYVDDILLAATSELDCQQGTRALLLTLGNLGYRASAKKAQLCQKQVKYLGYLLKEGQRWLTEARKETVMGQPTPKTPRQLREFLGKAGFCRLFIPGFAEMAAPLYPLTKPGTLFNWGPDQQKAYQEIKQALLTAPALGLPDLTKPFELFVDEKQGYAKGVLTQKLGPWRRPVAYLSKKLDPVAAGWPPCLRMVAAIAVLRKDAGKLTMGQPLVILAPHAVEALVKQPPDRWLSNARMTHYQAMLLDTDRVQFGPVVALNPATLLPLPEEGAPHDCLEILAETHGTRPDLTDQPIPDADHTWYTDGSSFLQEGQRKAGAAVTTETEVIWARALPAGTSAQRAELIALTQALKMAEGKRLNVYTDSRYAFATAHIHGEIYRRRGWLTSEGREIKNKSEILALLKALFLPKRLSIIHCLGHQKGDSAEARGNRLADQAAREAAIKTPPDTSTLLAGKRTADGSEFEKRTADGSEFESPKKKAKVE

SEQ ID NO: 1927 - protein, 2091 aa, synthetic construct
MPAAKRVKLDGGDKKYSIGLDIGTNSVGWAVITDEYKVPSKKFKVLGNTDRHSIKKNLIGALLFDSGETAEATRLKRTARRRYTRRKNRICYLQEIFSNEMAKVDDSFFHRLEESFLVEEDKKHERHPIFGNIVDEVAYHEKYPTIYHLRKKLVDSTDKADLRLIYLALAHMIKFRGHFLIEGDLNPDNSDVDKLFIQLVQTYNQLFEENPINASGVDAKAILSARLSKSRRLENLIAQLPGEKKNGLFGNLIALSLGLTPNFKSNFDLAEDAKLQLSKDTYDDDLDNLLAQIGDQYADLFLAAKNLSDAILLSDILRVNTEITKAPLSASMIKRYDEHHQDLTLLKALVRQQLPEKYKEIFFDQSKNGYAGYIDGGASQEEFYKFIKPILEKMDGTEELLVKLNREDLLRKQRTFDNGSIPHQIHLGELHAILRRQEDFYPFLKDNREKIEKILTFRIPYYVGPLARGNSRFAWMTRKSEETITPWNFEEVVDKGASAQSFIERMTNFDKNLPNEKVLPKHSLLYEYFTVYNELTKVKYVTEGMRKPAFLSGEQKKAIVDLLFKTNRKVTVKQLKEDYFKKIECFDSVEISGVEDRFNASLGTYHDLLKIIKDKDFLDNEENEDILEDIVLTLTLFEDREMIEERLKTYAHLFDDKVMKQLKRRRYTGWGRLSRKLINGIRDKQSGKTILDFLKSDGFANRNFMQLIHDDSLTFKEDIQKAQVSGQGDSLHEHIANLAGSPAIKKGILQTVKVVDELVKVMGRHKPENIVIEMARENQTTQKGQKNSRERMKRIEEGIKELGSQILKEHPVENTQLQNEKLYLYYLQNGRDMYVDQELDINRLSDYDVDHIVPQSFLKDDSIDNKVLTRSDKARGKSDNVPSEEVVKKMKNYWRQLLNAKLITQRKFDNLTKAERGGLSELDKAGFIKRQLVETRQITKHVAQILDSRMNTKYDENDKLIREVKVITLKSKLVSDFRKDFQFYKVREINNYHHAHDAYLNAVVGTALIKKYPKLESEFVYGDYKVYDVRKMIAKSEQEIGKATAKYFFYSNIMNFFKTEITLANGEIRKRPLIETNGETGEIVWDKGRDFATVRKVLSMPQVNIVKKTEVQTGGFSKESILPKRNSDKLIARKKDWDPKKYGGFDSPTVAYSVLVVAKVEKGKSKKLKSVKELLGITIMERSSFEKNPIDFLEAKGYKEVKKDLIIKLPKYSLFELENGRKRMLASAGELQKGNELALPSKYVNFLYLASHYEKLKGSPEDNEQKQLFVEQHKHYLDEIIEQISEFSKRVILADANLDKVLSAYNKHRDKPIREQAENIIHLFTLTNLGAPAAFKYFDTTIDRKRYTSTKEVLDATLIHQSITGLYETRIDLSQLGGDGGGSSGSSGGTLNLEDEYRLYETSAEPEVSPGSTWLSDFPQAWAETGGMGLAVRQAPLIIPLKATSTPVSIKQYPMSQEAKLGIKPHIQRLLDQGILVPCQSPWNTPLLPVKKPGTNDYRPVQDLREVNKRVEDIHPTVPNPYNLLSGLPPSHRWYTVLDLKDAFFCLRLHPTSQPLFAFEWRDPGMGISGQLTWTRLPQGFKNSPTLFNEALHRDLADFRIQHPDLILLQYVDDILLAATSELDCQQGTRALLLTLGNLGYRASAKKAQLCQKQVKYLGYLLKEGQRWLTEARKETVMGQPTPKTPRQLREFLGKAGFCRLFIPGFAEMAAPLYPLTKPGTLFNWGPDQQKAYQEIKQALLTAPALGLPDLTKPFELFVDEKQGYAKGVLTQKLGPWRRPVAYLSKKLDPVAAGWPPCLRMVAAIAVLRKDAGKLTMGQPLVILAPHAVEALVKQPPDRWLSNARMTHYQAMLLDTDRVQFGPVVALNPATLLPLPEEGAPHDCLEILAETHGTRPDLTDQPIPDADHTWYTDGSSFLQEGQRKAGAAVTTETEVIWARALPAGTSAQRAELIALTQALKMAEGKRLNVYTDSRYAFATAHIHGEIYRRRGWLTSEGREIKNKSEILALLKALFLPKRLSIIHCLGHQKGDSAEARGNRLADQAAREAAIKTPPDTSTLLAGKRTADGSEFEKRTADGSEFESPKKKAKVE

SEQ ID NO: 1928 - protein, 2091 aa, synthetic construct
MPAAKRVKLDGGDKKYSIGLDIGTNSVGWAVITDEYKVPSKKFKVLGNTDRHSIKKNLIGALLFDSGETAEATRLKRTARRRYTRRKNRICYLQEIFSNEMAKVDDSFFHRLEESFLVEEDKKHERHPIFGNIVDEVAYHEKYPTIYHLRKKLVDSTDKADLRLIYLALAHMIKFRGHFLIEGDLNPDNSDVDKLFIQLVQTYNQLFEENPINASGVDAKAILSARLSKSRRLENLIAQLPGEKKNGLFGNLIALSLGLTPNFKSNFDLAEDAKLQLSKDTYDDDLDNLLAQIGDQYADLFLAAKNLSDAILLSDILRVNTEITKAPLSASMIKRYDEHHQDLTLLKALVRQQLPEKYKEIFFDQSKNGYAGYIDGGASQEEFYKFIKPILEKMDGTEELLVKLNREDLLRKQRTFDNGSIPHQIHLGELHAILRRQEDFYPFLKDNREKIEKILTFRIPYYVGPLARGNSRFAWMTRKSEETITPWNFEEVVDKGASAQSFIERMTNFDKNLPNEKVLPKHSLLYEYFTVYNELTKVKYVTEGMRKPAFLSGEQKKAIVDLLFKTNRKVTVKQLKEDYFKKIECFDSVEISGVEDRFNASLGTYHDLLKIIKDKDFLDNEENEDILEDIVLTLTLFEDREMIEERLKTYAHLFDDKVMKQLKRRRYTGWGRLSRKLINGIRDKQSGKTILDFLKSDGFANRNFMQLIHDDSLTFKEDIQKAQVSGQGDSLHEHIANLAGSPAIKKGILQTVKVVDELVKVMGRHKPENIVIEMARENQTTQKGQKNSRERMKRIEEGIKELGSQILKEHPVENTQLQNEKLYLYYLQNGRDMYVDQELDINRLSDYDVDHIVPQSFLKDDSIDNKVLTRSDKARGKSDNVPSEEVVKKMKNYWRQLLNAKLITQRKFDNLTKAERGGLSELDKAGFIKRQLVETRQITKHVAQILDSRMNTKYDENDKLIREVKVITLKSKLVSDFRKDFQFYKVREINNYHHAHDAYLNAVVGTALIKKYPKLESEFVYGDYKVYDVRKMIAKSEQEIGKATAKYFFYSNIMNFFKTEITLANGEIRKRPLIETNGETGEIVWDKGRDFATVRKVLSMPQVNIVKKTEVQTGGFSKESILPKRNSDKLIARKKDWDPKKYGGFDSPTVAYSVLVVAKVEKGKSKKLKSVKELLGITIMERSSFEKNPIDFLEAKGYKEVKKDLIIKLPKYSLFELENGRKRMLASAGELQKGNELALPSKYVNFLYLASHYEKLKGSPEDNEQKQLFVEQHKHYLDEIIEQISEFSKRVILADANLDKVLSAYNKHRDKPIREQAENIIHLFTLTNLGAPAAFKYFDTTIDRKRYTSTKEVLDATLIHQSITGLYETRIDLSQLGGDGGGGGGGSGGTLNLEDEYRLYETSAEPEVSPGSTWLSDFPQAWAETGGMGLAVRQAPLIIPLKATSTPVSIKQYPMSQEAKLGIKPHIQRLLDQGILVPCQSPWNTPLLPVKKPGTNDYRPVQDLREVNKRVEDIHPTVPNPYNLLSGLPPSHRWYTVLDLKDAFFCLRLHPTSQPLFAFEWRDPGMGISGQLTWTRLPQGFKNSPTLFNEALHRDLADFRIQHPDLILLQYVDDILLAATSELDCQQGTRALLLTLGNLGYRASAKKAQLCQKQVKYLGYLLKEGQRWLTEARKETVMGQPTPKTPRQLREFLGKAGFCRLFIPGFAEMAAPLYPLTKPGTLFNWGPDQQKAYQEIKQALLTAPALGLPDLTKPFELFVDEKQGYAKGVLTQKLGPWRRPVAYLSKKLDPVAAGWPPCLRMVAAIAVLRKDAGKLTMGQPLVILAPHAVEALVKQPPDRWLSNARMTHYQAMLLDTDRVQFGPVVALNPATLLPLPEEGAPHDCLEILAETHGTRPDLTDQPIPDADHTWYTDGSSFLQEGQRKAGAAVTTETEVIWARALPAGTSAQRAELIALTQALKMAEGKRLNVYTDSRYAFATAHIHGEIYRRRGWLTSEGREIKNKSEILALLKALFLPKRLSIIHCLGHQKGDSAEARGNRLADQAAREAAIKTPPDTSTLLAGKRTADGSEFEKRTADGSEFESPKKKAKVE

SEQ ID NO: 1929 - protein, 2096 aa, synthetic construct
MPAAKRVKLDGGDKKYSIGLDIGTNSVGWAVITDEYKVPSKKFKVLGNTDRHSIKKNLIGALLFDSGETAEATRLKRTARRRYTRRKNRICYLQEIFSNEMAKVDDSFFHRLEESFLVEEDKKHERHPIFGNIVDEVAYHEKYPTIYHLRKKLVDSTDKADLRLIYLALAHMIKFRGHFLIEGDLNPDNSDVDKLFIQLVQTYNQLFEENPINASGVDAKAILSARLSKSRRLENLIAQLPGEKKNGLFGNLIALSLGLTPNFKSNFDLAEDAKLQLSKDTYDDDLDNLLAQIGDQYADLFLAAKNLSDAILLSDILRVNTEITKAPLSASMIKRYDEHHQDLTLLKALVRQQLPEKYKEIFFDQSKNGYAGYIDGGASQEEFYKFIKPILEKMDGTEELLVKLNREDLLRKQRTFDNGSIPHQIHLGELHAILRRQEDFYPFLKDNREKIEKILTFRIPYYVGPLARGNSRFAWMTRKSEETITPWNFEEVVDKGASAQSFIERMTNFDKNLPNEKVLPKHSLLYEYFTVYNELTKVKYVTEGMRKPAFLSGEQKKAIVDLLFKTNRKVTVKQLKEDYFKKIECFDSVEISGVEDRFNASLGTYHDLLKIIKDKDFLDNEENEDILEDIVLTLTLFEDREMIEERLKTYAHLFDDKVMKQLKRRRYTGWGRLSRKLINGIRDKQSGKTILDFLKSDGFANRNFMQLIHDDSLTFKEDIQKAQVSGQGDSLHEHIANLAGSPAIKKGILQTVKVVDELVKVMGRHKPENIVIEMARENQTTQKGQKNSRERMKRIEEGIKELGSQILKEHPVENTQLQNEKLYLYYLQNGRDMYVDQELDINRLSDYDVDHIVPQSFLKDDSIDNKVLTRSDKARGKSDNVPSEEVVKKMKNYWRQLLNAKLITQRKFDNLTKAERGGLSELDKAGFIKRQLVETRQITKHVAQILDSRMNTKYDENDKLIREVKVITLKSKLVSDFRKDFQFYKVREINNYHHAHDAYLNAVVGTALIKKYPKLESEFVYGDYKVYDVRKMIAKSEQEIGKATAKYFFYSNIMNFFKTEITLANGEIRKRPLIETNGETGEIVWDKGRDFATVRKVLSMPQVNIVKKTEVQTGGFSKESILPKRNSDKLIARKKDWDPKKYGGFDSPTVAYSVLVVAKVEKGKSKKLKSVKELLGITIMERSSFEKNPIDFLEAKGYKEVKKDLIIKLPKYSLFELENGRKRMLASAGELQKGNELALPSKYVNFLYLASHYEKLKGSPEDNEQKQLFVEQHKHYLDEIIEQISEFSKRVILADANLDKVLSAYNKHRDKPIREQAENIIHLFTLTNLGAPAAFKYFDTTIDRKRYTSTKEVLDATLIHQSITGLYETRIDLSQLGGDGGGGGPAPEAAAKGGTLNLEDEYRLYETSAEPEVSPGSTWLSDFPQAWAETGGMGLAVRQAPLIIPLKATSTPVSIKQYPMSQEAKLGIKPHIQRLLDQGILVPCQSPWNTPLLPVKKPGTNDYRPVQDLREVNKRVEDIHPTVPNPYNLLSGLPPSHRWYTVLDLKDAFFCLRLHPTSQPLFAFEWRDPGMGISGQLTWTRLPQGFKNSPTLFNEALHRDLADFRIQHPDLILLQYVDDILLAATSELDCQQGTRALLLTLGNLGYRASAKKAQLCQKQVKYLGYLLKEGQRWLTEARKETVMGQPTPKTPRQLREFLGKAGFCRLFIPGFAEMAAPLYPLTKPGTLFNWGPDQQKAYQEIKQALLTAPALGLPDLTKPFELFVDEKQGYAKGVLTQKLGPWRRPVAYLSKKLDPVAAGWPPCLRMVAAIAVLRKDAGKLTMGQPLVILAPHAVEALVKQPPDRWLSNARMTHYQAMLLDTDRVQFGPVVALNPATLLPLPEEGAPHDCLEILAETHGTRPDLTDQPIPDADHTWYTDGSSFLQEGQRKAGAAVTTETEVIWARALPAGTSAQRAELIALTQALKMAEGKRLNVYTDSRYAFATAHIHGEIYRRRGWLTSEGREIKNKSEILALLKALFLPKRLSIIHCLGHQKGDSAEARGNRLADQAAREAAIKTPPDTSTLLAGKRTADGSEFEKRTADGSEFESPKKKAKVE

SEQ ID NO: 1930 - protein, 2091 aa, synthetic construct
MPAAKRVKLDGGDKKYSIGLDIGTNSVGWAVITDEYKVPSKKFKVLGNTDRHSIKKNLIGALLFDSGETAEATRLKRTARRRYTRRKNRICYLQEIFSNEMAKVDDSFFHRLEESFLVEEDKKHERHPIFGNIVDEVAYHEKYPTIYHLRKKLVDSTDKADLRLIYLALAHMIKFRGHFLIEGDLNPDNSDVDKLFIQLVQTYNQLFEENPINASGVDAKAILSARLSKSRRLENLIAQLPGEKKNGLFGNLIALSLGLTPNFKSNFDLAEDAKLQLSKDTYDDDLDNLLAQIGDQYADLFLAAKNLSDAILLSDILRVNTEITKAPLSASMIKRYDEHHQDLTLLKALVRQQLPEKYKEIFFDQSKNGYAGYIDGGASQEEFYKFIKPILEKMDGTEELLVKLNREDLLRKQRTFDNGSIPHQIHLGELHAILRRQEDFYPFLKDNREKIEKILTFRIPYYVGPLARGNSRFAWMTRKSEETITPWNFEEVVDKGASAQSFIERMTNFDKNLPNEKVLPKHSLLYEYFTVYNELTKVKYVTEGMRKPAFLSGEQKKAIVDLLFKTNRKVTVKQLKEDYFKKIECFDSVEISGVEDRFNASLGTYHDLLKIIKDKDFLDNEENEDILEDIVLTLTLFEDREMIEERLKTYAHLFDDKVMKQLKRRRYTGWGRLSRKLINGIRDKQSGKTILDFLKSDGFANRNFMQLIHDDSLTFKEDIQKAQVSGQGDSLHEHIANLAGSPAIKKGILQTVKVVDELVKVMGRHKPENIVIEMARENQTTQKGQKNSRERMKRIEEGIKELGSQILKEHPVENTQLQNEKLYLYYLQNGRDMYVDQELDINRLSDYDVDHIVPQSFLKDDSIDNKVLTRSDKARGKSDNVPSEEVVKKMKNYWRQLLNAKLITQRKFDNLTKAERGGLSELDKAGFIKRQLVETRQITKHVAQILDSRMNTKYDENDKLIREVKVITLKSKLVSDFRKDFQFYKVREINNYHHAHDAYLNAVVGTALIKKYPKLESEFVYGDYKVYDVRKMIAKSEQEIGKATAKYFFYSNIMNFFKTEITLANGEIRKRPLIETNGETGEIVWDKGRDFATVRKVLSMPQVNIVKKTEVQTGGFSKESILPKRNSDKLIARKKDWDPKKYGGFDSPTVAYSVLVVAKVEKGKSKKLKSVKELLGITIMERSSFEKNPIDFLEAKGYKEVKKDLIIKLPKYSLFELENGRKRMLASAGELQKGNELALPSKYVNFLYLASHYEKLKGSPEDNEQKQLFVEQHKHYLDEIIEQISEFSKRVILADANLDKVLSAYNKHRDKPIREQAENIIHLFTLTNLGAPAAFKYFDTTIDRKRYTSTKEVLDATLIHQSITGLYETRIDLSQLGGDGGGGGGSSGGTLNLEDEYRLYETSAEPEVSPGSTWLSDFPQAWAETGGMGLAVRQAPLIIPLKATSTPVSIKQYPMSQEAKLGIKPHIQRLLDQGILVPCQSPWNTPLLPVKKPGTNDYRPVQDLREVNKRVEDIHPTVPNPYNLLSGLPPSHRWYTVLDLKDAFFCLRLHPTSQPLFAFEWRDPGMGISGQLTWTRLPQGFKNSPTLFNEALHRDLADFRIQHPDLILLQYVDDILLAATSELDCQQGTRALLLTLGNLGYRASAKKAQLCQKQVKYLGYLLKEGQRWLTEARKETVMGQPTPKTPRQLREFLGKAGFCRLFIPGFAEMAAPLYPLTKPGTLFNWGPDQQKAYQEIKQALLTAPALGLPDLTKPFELFVDEKQGYAKGVLTQKLGPWRRPVAYLSKKLDPVAAGWPPCLRMVAAIAVLRKDAGKLTMGQPLVILAPHAVEALVKQPPDRWLSNARMTHYQAMLLDTDRVQFGPVVALNPATLLPLPEEGAPHDCLEILAETHGTRPDLTDQPIPDADHTWYTDGSSFLQEGQRKAGAAVTTETEVIWARALPAGTSAQRAELIALTQALKMAEGKRLNVYTDSRYAFATAHIHGEIYRRRGWLTSEGREIKNKSEILALLKALFLPKRLSIIHCLGHQKGDSAEARGNRLADQAAREAAIKTPPDTSTLLAGKRTADGSEFEKRTADGSEFESPKKKAKVE

SEQ ID NO: 1931 - protein, 2091 aa, synthetic construct
MPAAKRVKLDGGDKKYSIGLDIGTNSVGWAVITDEYKVPSKKFKVLGNTDRHSIKKNLIGALLFDSGETAEATRLKRTARRRYTRRKNRICYLQEIFSNEMAKVDDSFFHRLEESFLVEEDKKHERHPIFGNIVDEVAYHEKYPTIYHLRKKLVDSTDKADLRLIYLALAHMIKFRGHFLIEGDLNPDNSDVDKLFIQLVQTYNQLFEENPINASGVDAKAILSARLSKSRRLENLIAQLPGEKKNGLFGNLIALSLGLTPNFKSNFDLAEDAKLQLSKDTYDDDLDNLLAQIGDQYADLFLAAKNLSDAILLSDILRVNTEITKAPLSASMIKRYDEHHQDLTLLKALVRQQLPEKYKEIFFDQSKNGYAGYIDGGASQEEFYKFIKPILEKMDGTEELLVKLNREDLLRKQRTFDNGSIPHQIHLGELHAILRRQEDFYPFLKDNREKIEKILTFRIPYYVGPLARGNSRFAWMTRKSEETITPWNFEEVVDKGASAQSFIERMTNFDKNLPNEKVLPKHSLLYEYFTVYNELTKVKYVTEGMRKPAFLSGEQKKAIVDLLFKTNRKVTVKQLKEDYFKKIECFDSVEISGVEDRFNASLGTYHDLLKIIKDKDFLDNEENEDILEDIVLTLTLFEDREMIEERLKTYAHLFDDKVMKQLKRRRYTGWGRLSRKLINGIRDKQSGKTILDFLKSDGFANRNFMQLIHDDSLTFKEDIQKAQVSGQGDSLHEHIANLAGSPAIKKGILQTVKVVDELVKVMGRHKPENIVIEMARENQTTQKGQKNSRERMKRIEEGIKELGSQILKEHPVENTQLQNEKLYLYYLQNGRDMYVDQELDINRLSDYDVDHIVPQSFLKDDSIDNKVLTRSDKARGKSDNVPSEEVVKKMKNYWRQLLNAKLITQRKFDNLTKAERGGLSELDKAGFIKRQLVETRQITKHVAQILDSRMNTKYDENDKLIREVKVITLKSKLVSDFRKDFQFYKVREINNYHHAHDAYLNAVVGTALIKKYPKLESEFVYGDYKVYDVRKMIAKSEQEIGKATAKYFFYSNIMNFFKTEITLANGEIRKRPLIETNGETGEIVWDKGRDFATVRKVLSMPQVNIVKKTEVQTGGFSKESILPKRNSDKLIARKKDWDPKKYGGFDSPTVAYSVLVVAKVEKGKSKKLKSVKELLGITIMERSSFEKNPIDFLEAKGYKEVKKDLIIKLPKYSLFELENGRKRMLASAGELQKGNELALPSKYVNFLYLASHYEKLKGSPEDNEQKQLFVEQHKHYLDEIIEQISEFSKRVILADANLDKVLSAYNKHRDKPIREQAENIIHLFTLTNLGAPAAFKYFDTTIDRKRYTSTKEVLDATLIHQSITGLYETRIDLSQLGGDGGGSSGGSGGTLNLEDEYRLYETSAEPEVSPGSTWLSDFPQAWAETGGMGLAVRQAPLIIPLKATSTPVSIKQYPMSQEAKLGIKPHIQRLLDQGILVPCQSPWNTPLLPVKKPGTNDYRPVQDLREVNKRVEDIHPTVPNPYNLLSGLPPSHRWYTVLDLKDAFFCLRLHPTSQPLFAFEWRDPGMGISGQLTWTRLPQGFKNSPTLFNEALHRDLADFRIQHPDLILLQYVDDILLAATSELDCQQGTRALLLTLGNLGYRASAKKAQLCQKQVKYLGYLLKEGQRWLTEARKETVMGQPTPKTPRQLREFLGKAGFCRLFIPGFAEMAAPLYPLTKPGTLFNWGPDQQKAYQEIKQALLTAPALGLPDLTKPFELFVDEKQGYAKGVLTQKLGPWRRPVAYLSKKLDPVAAGWPPCLRMVAAIAVLRKDAGKLTMGQPLVILAPHAVEALVKQPPDRWLSNARMTHYQAMLLDTDRVQFGPVVALNPATLLPLPEEGAPHDCLEILAETHGTRPDLTDQPIPDADHTWYTDGSSFLQEGQRKAGAAVTTETEVIWARALPAGTSAQRAELIALTQALKMAEGKRLNVYTDSRYAFATAHIHGEIYRRRGWLTSEGREIKNKSEILALLKALFLPKRLSIIHCLGHQKGDSAEARGNRLADQAAREAAIKTPPDTSTLLAGKRTADGSEFEKRTADGSEFESPKKKAKVE

SEQ ID NO: 1932 - protein, 2094 aa, synthetic construct
MPAAKRVKLDGGDKKYSIGLDIGTNSVGWAVITDEYKVPSKKFKVLGNTDRHSIKKNLIGALLFDSGETAEATRLKRTARRRYTRRKNRICYLQEIFSNEMAKVDDSFFHRLEESFLVEEDKKHERHPIFGNIVDEVAYHEKYPTIYHLRKKLVDSTDKADLRLIYLALAHMIKFRGHFLIEGDLNPDNSDVDKLFIQLVQTYNQLFEENPINASGVDAKAILSARLSKSRRLENLIAQLPGEKKNGLFGNLIALSLGLTPNFKSNFDLAEDAKLQLSKDTYDDDLDNLLAQIGDQYADLFLAAKNLSDAILLSDILRVNTEITKAPLSASMIKRYDEHHQDLTLLKALVRQQLPEKYKEIFFDQSKNGYAGYIDGGASQEEFYKFIKPILEKMDGTEELLVKLNREDLLRKQRTFDNGSIPHQIHLGELHAILRRQEDFYPFLKDNREKIEKILTFRIPYYVGPLARGNSRFAWMTRKSEETITPWNFEEVVDKGASAQSFIERMTNFDKNLPNEKVLPKHSLLYEYFTVYNELTKVKYVTEGMRKPAFLSGEQKKAIVDLLFKTNRKVTVKQLKEDYFKKIECFDSVEISGVEDRFNASLGTYHDLLKIIKDKDFLDNEENEDILEDIVLTLTLFEDREMIEERLKTYAHLFDDKVMKQLKRRRYTGWGRLSRKLINGIRDKQSGKTILDFLKSDGFANRNFMQLIHDDSLTFKEDIQKAQVSGQGDSLHEHIANLAGSPAIKKGILQTVKVVDELVKVMGRHKPENIVIEMARENQTTQKGQKNSRERMKRIEEGIKELGSQILKEHPVENTQLQNEKLYLYYLQNGRDMYVDQELDINRLSDYDVDHIVPQSFLKDDSIDNKVLTRSDKARGKSDNVPSEEVVKKMKNYWRQLLNAKLITQRKFDNLTKAERGGLSELDKAGFIKRQLVETRQITKHVAQILDSRMNTKYDENDKLIREVKVITLKSKLVSDFRKDFQFYKVREINNYHHAHDAYLNAVVGTALIKKYPKLESEFVYGDYKVYDVRKMIAKSEQEIGKATAKYFFYSNIMNFFKTEITLANGEIRKRPLIETNGETGEIVWDKGRDFATVRKVLSMPQVNIVKKTEVQTGGFSKESILPKRNSDKLIARKKDWDPKKYGGFDSPTVAYSVLVVAKVEKGKSKKLKSVKELLGITIMERSSFEKNPIDFLEAKGYKEVKKDLIIKLPKYSLFELENGRKRMLASAGELQKGNELALPSKYVNFLYLASHYEKLKGSPEDNEQKQLFVEQHKHYLDEIIEQISEFSKRVILADANLDKVLSAYNKHRDKPIREQAENIIHLFTLTNLGAPAAFKYFDTTIDRKRYTSTKEVLDATLIHQSITGLYETRIDLSQLGGDGGGSSGGSGGGGGTLNLEDEYRLYETSAEPEVSPGSTWLSDFPQAWAETGGMGLAVRQAPLIIPLKATSTPVSIKQYPMSQEAKLGIKPHIQRLLDQGILVPCQSPWNTPLLPVKKPGTNDYRPVQDLREVNKRVEDIHPTVPNPYNLLSGLPPSHRWYTVLDLKDAFFCLRLHPTSQPLFAFEWRDPGMGISGQLTWTRLPQGFKNSPTLFNEALHRDLADFRIQHPDLILLQYVDDILLAATSELDCQQGTRALLLTLGNLGYRASAKKAQLCQKQVKYLGYLLKEGQRWLTEARKETVMGQPTPKTPRQLREFLGKAGFCRLFIPGFAEMAAPLYPLTKPGTLFNWGPDQQKAYQEIKQALLTAPALGLPDLTKPFELFVDEKQGYAKGVLTQKLGPWRRPVAYLSKKLDPVAAGWPPCLRMVAAIAVLRKDAGKLTMGQPLVILAPHAVEALVKQPPDRWLSNARMTHYQAMLLDTDRVQFGPVVALNPATLLPLPEEGAPHDCLEILAETHGTRPDLTDQPIPDADHTWYTDGSSFLQEGQRKAGAAVTTETEVIWARALPAGTSAQRAELIALTQALKMAEGKRLNVYTDSRYAFATAHIHGEIYRRRGWLTSEGREIKNKSEILALLKALFLPKRLSIIHCLGHQKGDSAEARGNRLADQAAREAAIKTPPDTSTLLAGKRTADGSEFEKRTADGSEFESPKKKAKVE

SEQ ID NO: 1933 - protein, 2092 aa, synthetic construct
MPAAKRVKLDGGDKKYSIGLDIGTNSVGWAVITDEYKVPSKKFKVLGNTDRHSIKKNLIGALLFDSGETAEATRLKRTARRRYTRRKNRICYLQEIFSNEMAKVDDSFFHRLEESFLVEEDKKHERHPIFGNIVDEVAYHEKYPTIYHLRKKLVDSTDKADLRLIYLALAHMIKFRGHFLIEGDLNPDNSDVDKLFIQLVQTYNQLFEENPINASGVDAKAILSARLSKSRRLENLIAQLPGEKKNGLFGNLIALSLGLTPNFKSNFDLAEDAKLQLSKDTYDDDLDNLLAQIGDQYADLFLAAKNLSDAILLSDILRVNTEITKAPLSASMIKRYDEHHQDLTLLKALVRQQLPEKYKEIFFDQSKNGYAGYIDGGASQEEFYKFIKPILEKMDGTEELLVKLNREDLLRKQRTFDNGSIPHQIHLGELHAILRRQEDFYPFLKDNREKIEKILTFRIPYYVGPLARGNSRFAWMTRKSEETITPWNFEEVVDKGASAQSFIERMTNFDKNLPNEKVLPKHSLLYEYFTVYNELTKVKYVTEGMRKPAFLSGEQKKAIVDLLFKTNRKVTVKQLKEDYFKKIECFDSVEISGVEDRFNASLGTYHDLLKIIKDKDFLDNEENEDILEDIVLTLTLFEDREMIEERLKTYAHLFDDKVMKQLKRRRYTGWGRLSRKLINGIRDKQSGKTILDFLKSDGFANRNFMQLIHDDSLTFKEDIQKAQVSGQGDSLHEHIANLAGSPAIKKGILQTVKVVDELVKVMGRHKPENIVIEMARENQTTQKGQKNSRERMKRIEEGIKELGSQILKEHPVENTQLQNEKLYLYYLQNGRDMYVDQELDINRLSDYDVDHIVPQSFLKDDSIDNKVLTRSDKARGKSDNVPSEEVVKKMKNYWRQLLNAKLITQRKFDNLTKAERGGLSELDKAGFIKRQLVETRQITKHVAQILDSRMNTKYDENDKLIREVKVITLKSKLVSDFRKDFQFYKVREINNYHHAHDAYLNAVVGTALIKKYPKLESEFVYGDYKVYDVRKMIAKSEQEIGKATAKYFFYSNIMNFFKTEITLANGEIRKRPLIETNGETGEIVWDKGRDFATVRKVLSMPQVNIVKKTEVQTGGFSKESILPKRNSDKLIARKKDWDPKKYGGFDSPTVAYSVLVVAKVEKGKSKKLKSVKELLGITIMERSSFEKNPIDFLEAKGYKEVKKDLIIKLPKYSLFELENGRKRMLASAGELQKGNELALPSKYVNFLYLASHYEKLKGSPEDNEQKQLFVEQHKHYLDEIIEQISEFSKRVILADANLDKVLSAYNKHRDKPIREQAENIIHLFTLTNLGAPAAFKYFDTTIDRKRYTSTKEVLDATLIHQSITGLYETRIDLSQLGGDGGPAPAPAPGGTLNLEDEYRLYETSAEPEVSPGSTWLSDFPQAWAETGGMGLAVRQAPLIIPLKATSTPVSIKQYPMSQEAKLGIKPHIQRLLDQGILVPCQSPWNTPLLPVKKPGTNDYRPVQDLREVNKRVEDIHPTVPNPYNLLSGLPPSHRWYTVLDLKDAFFCLRLHPTSQPLFAFEWRDPGMGISGQLTWTRLPQGFKNSPTLFNEALHRDLADFRIQHPDLILLQYVDDILLAATSELDCQQGTRALLLTLGNLGYRASAKKAQLCQKQVKYLGYLLKEGQRWLTEARKETVMGQPTPKTPRQLREFLGKAGFCRLFIPGFAEMAAPLYPLTKPGTLFNWGPDQQKAYQEIKQALLTAPALGLPDLTKPFELFVDEKQGYAKGVLTQKLGPWRRPVAYLSKKLDPVAAGWPPCLRMVAAIAVLRKDAGKLTMGQPLVILAPHAVEALVKQPPDRWLSNARMTHYQAMLLDTDRVQFGPVVALNPATLLPLPEEGAPHDCLEILAETHGTRPDLTDQPIPDADHTWYTDGSSFLQEGQRKAGAAVTTETEVIWARALPAGTSAQRAELIALTQALKMAEGKRLNVYTDSRYAFATAHIHGEIYRRRGWLTSEGREIKNKSEILALLKALFLPKRLSIIHCLGHQKGDSAEARGNRLADQAAREAAIKTPPDTSTLLAGKRTADGSEFEKRTADGSEFESPKKKAKVE

SEQ ID NO: 1934 - protein, 2102 aa, synthetic construct
MPAAKRVKLDGGDKKYSIGLDIGTNSVGWAVITDEYKVPSKKFKVLGNTDRHSIKKNLIGALLFDSGETAEATRLKRTARRRYTRRKNRICYLQEIFSNEMAKVDDSFFHRLEESFLVEEDKKHERHPIFGNIVDEVAYHEKYPTIYHLRKKLVDSTDKADLRLIYLALAHMIKFRGHFLIEGDLNPDNSDVDKLFIQLVQTYNQLFEENPINASGVDAKAILSARLSKSRRLENLIAQLPGEKKNGLFGNLIALSLGLTPNFKSNFDLAEDAKLQLSKDTYDDDLDNLLAQIGDQYADLFLAAKNLSDAILLSDILRVNTEITKAPLSASMIKRYDEHHQDLTLLKALVRQQLPEKYKEIFFDQSKNGYAGYIDGGASQEEFYKFIKPILEKMDGTEELLVKLNREDLLRKQRTFDNGSIPHQIHLGELHAILRRQEDFYPFLKDNREKIEKILTFRIPYYVGPLARGNSRFAWMTRKSEETITPWNFEEVVDKGASAQSFIERMTNFDKNLPNEKVLPKHSLLYEYFTVYNELTKVKYVTEGMRKPAFLSGEQKKAIVDLLFKTNRKVTVKQLKEDYFKKIECFDSVEISGVEDRFNASLGTYHDLLKIIKDKDFLDNEENEDILEDIVLTLTLFEDREMIEERLKTYAHLFDDKVMKQLKRRRYTGWGRLSRKLINGIRDKQSGKTILDFLKSDGFANRNFMQLIHDDSLTFKEDIQKAQVSGQGDSLHEHIANLAGSPAIKKGILQTVKVVDELVKVMGRHKPENIVIEMARENQTTQKGQKNSRERMKRIEEGIKELGSQILKEHPVENTQLQNEKLYLYYLQNGRDMYVDQELDINRLSDYDVDHIVPQSFLKDDSIDNKVLTRSDKARGKSDNVPSEEVVKKMKNYWRQLLNAKLITQRKFDNLTKAERGGLSELDKAGFIKRQLVETRQITKHVAQILDSRMNTKYDENDKLIREVKVITLKSKLVSDFRKDFQFYKVREINNYHHAHDAYLNAVVGTALIKKYPKLESEFVYGDYKVYDVRKMIAKSEQEIGKATAKYFFYSNIMNFFKTEITLANGEIRKRPLIETNGETGEIVWDKGRDFATVRKVLSMPQVNIVKKTEVQTGGFSKESILPKRNSDKLIARKKDWDPKKYGGFDSPTVAYSVLVVAKVEKGKSKKLKSVKELLGITIMERSSFEKNPIDFLEAKGYKEVKKDLIIKLPKYSLFELENGRKRMLASAGELQKGNELALPSKYVNFLYLASHYEKLKGSPEDNEQKQLFVEQHKHYLDEIIEQISEFSKRVILADANLDKVLSAYNKHRDKPIREQAENIIHLFTLTNLGAPAAFKYFDTTIDRKRYTSTKEVLDATLIHQSITGLYETRIDLSQLGGDGGPAPAPAPAPAPGGTVSLQDEHRLFDIPVTTSLPDVWLQDFPQAWAETGGLGRAKCQAPIIIDLKPTAVPVSIKQYPMSLEAHMGIRQHIIKFLELGVLRPCRSPWNTPLLPVKKPGTQDYRPVQDLREINKRTVDIHPTVPNPYNLLSTLKPDYSWYTVLDLKDAFFCLPLAPQSQELFAFEWKDPERGISGQLTWTRLPQGFKNSPTLFNEALHRDLTDFRTQHPEVTLLQYVDDLLLAAPTKKACTQGTRHLLQELGEKGYRASAKKAQICQTKVTYLGYILSEGKRWLTPGRIETVARIPPPRNPREVREFLGKAGFCRLFIPGFAELAAPLYALTKPSTPFTWQTEHQLAFEALKKALLSAPALGLPDTSKPFTLFLDERQGIAKGVLTQKLGPWKRPVAYLSKKLDPVAAGWPPCLRIMAATAMLVKDSAKLTLGQPLTVITPHTLEAIVRQPPDRWITNARLTHYQALLLDTDRVQFGPPVTLNPATLLPVPENQPSPHDCRQVLAETHGTREDLKDQELPDADHTWYTDGSSYLDSGTRRAGAAVVDGHNTIWAQSLPPGTSAQKAELIALTKALELSKGKKANIYTDSRYAFATAHTHGSIYERRGWLTSEGKEIKNKAEIIALLKALFLPQEVAIIHCPGHQKGQDPVAVGNRQADRVARQAAMAEVLTLATEPDNTSHITAGKRTADGSEFEKRTADGSEFESPKKKAKVE

SEQ ID NO: 1935 - protein, 2102 aa, synthetic construct
MPAAKRVKLDGGDKKYSIGLDIGTNSVGWAVITDEYKVPSKKFKVLGNTDRHSIKKNLIGALLFDSGETAEATRLKRTARRRYTRRKNRICYLQEIFSNEMAKVDDSFFHRLEESFLVEEDKKHERHPIFGNIVDEVAYHEKYPTIYHLRKKLVDSTDKADLRLIYLALAHMIKFRGHFLIEGDLNPDNSDVDKLFIQLVQTYNQLFEENPINASGVDAKAILSARLSKSRRLENLIAQLPGEKKNGLFGNLIALSLGLTPNFKSNFDLAEDAKLQLSKDTYDDDLDNLLAQIGDQYADLFLAAKNLSDAILLSDILRVNTEITKAPLSASMIKRYDEHHQDLTLLKALVRQQLPEKYKEIFFDQSKNGYAGYIDGGASQEEFYKFIKPILEKMDGTEELLVKLNREDLLRKQRTFDNGSIPHQIHLGELHAILRRQEDFYPFLKDNREKIEKILTFRIPYYVGPLARGNSRFAWMTRKSEETITPWNFEEVVDKGASAQSFIERMTNFDKNLPNEKVLPKHSLLYEYFTVYNELTKVKYVTEGMRKPAFLSGEQKKAIVDLLFKTNRKVTVKQLKEDYFKKIECFDSVEISGVEDRFNASLGTYHDLLKIIKDKDFLDNEENEDILEDIVLTLTLFEDREMIEERLKTYAHLFDDKVMKQLKRRRYTGWGRLSRKLINGIRDKQSGKTILDFLKSDGFANRNFMQLIHDDSLTFKEDIQKAQVSGQGDSLHEHIANLAGSPAIKKGILQTVKVVDELVKVMGRHKPENIVIEMARENQTTQKGQKNSRERMKRIEEGIKELGSQILKEHPVENTQLQNEKLYLYYLQNGRDMYVDQELDINRLSDYDVDHIVPQSFLKDDSIDNKVLTRSDKARGKSDNVPSEEVVKKMKNYWRQLLNAKLITQRKFDNLTKAERGGLSELDKAGFIKRQLVETRQITKHVAQILDSRMNTKYDENDKLIREVKVITLKSKLVSDFRKDFQFYKVREINNYHHAHDAYLNAVVGTALIKKYPKLESEFVYGDYKVYDVRKMIAKSEQEIGKATAKYFFYSNIMNFFKTEITLANGEIRKRPLIETNGETGEIVWDKGRDFATVRKVLSMPQVNIVKKTEVQTGGFSKESILPKRNSDKLIARKKDWDPKKYGGFDSPTVAYSVLVVAKVEKGKSKKLKSVKELLGITIMERSSFEKNPIDFLEAKGYKEVKKDLIIKLPKYSLFELENGRKRMLASAGELQKGNELALPSKYVNFLYLASHYEKLKGSPEDNEQKQLFVEQHKHYLDEIIEQISEFSKRVILADANLDKVLSAYNKHRDKPIREQAENIIHLFTLTNLGAPAAFKYFDTTIDRKRYTSTKEVLDATLIHQSITGLYETRIDLSQLGGDGGEAAAKGGSGGGGGTVSLQDEHRLFDIPVTTSLPDVWLQDFPQAWAETGGLGRAKCQAPIIIDLKPTAVPVSIKQYPMSLEAHMGIRQHIIKFLELGVLRPCRSPWNTPLLPVKKPGTQDYRPVQDLREINKRTVDIHPTVPNPYNLLSTLKPDYSWYTVLDLKDAFFCLPLAPQSQELFAFEWKDPERGISGQLTWTRLPQGFKNSPTLFNEALHRDLTDFRTQHPEVTLLQYVDDLLLAAPTKKACTQGTRHLLQELGEKGYRASAKKAQICQTKVTYLGYILSEGKRWLTPGRIETVARIPPPRNPREVREFLGKAGFCRLFIPGFAELAAPLYALTKPSTPFTWQTEHQLAFEALKKALLSAPALGLPDTSKPFTLFLDERQGIAKGVLTQKLGPWKRPVAYLSKKLDPVAAGWPPCLRIMAATAMLVKDSAKLTLGQPLTVITPHTLEAIVRQPPDRWITNARLTHYQALLLDTDRVQFGPPVTLNPATLLPVPENQPSPHDCRQVLAETHGTREDLKDQELPDADHTWYTDGSSYLDSGTRRAGAAVVDGHNTIWAQSLPPGTSAQKAELIALTKALELSKGKKANIYTDSRYAFATAHTHGSIYERRGWLTSEGKEIKNKAEIIALLKALFLPQEVAIIHCPGHQKGQDPVAVGNRQADRVARQAAMAEVLTLATEPDNTSHITAGKRTADGSEFEKRTADGSEFESPKKKAKVE

SEQ ID NO: 1936 - protein, 2121 aa, synthetic construct
MPAAKRVKLDGGDKKYSIGLDIGTNSVGWAVITDEYKVPSKKFKVLGNTDRHSIKKNLIGALLFDSGETAEATRLKRTARRRYTRRKNRICYLQEIFSNEMAKVDDSFFHRLEESFLVEEDKKHERHPIFGNIVDEVAYHEKYPTIYHLRKKLVDSTDKADLRLIYLALAHMIKFRGHFLIEGDLNPDNSDVDKLFIQLVQTYNQLFEENPINASGVDAKAILSARLSKSRRLENLIAQLPGEKKNGLFGNLIALSLGLTPNFKSNFDLAEDAKLQLSKDTYDDDLDNLLAQIGDQYADLFLAAKNLSDAILLSDILRVNTEITKAPLSASMIKRYDEHHQDLTLLKALVRQQLPEKYKEIFFDQSKNGYAGYIDGGASQEEFYKFIKPILEKMDGTEELLVKLNREDLLRKQRTFDNGSIPHQIHLGELHAILRRQEDFYPFLKDNREKIEKILTFRIPYYVGPLARGNSRFAWMTRKSEETITPWNFEEVVDKGASAQSFIERMTNFDKNLPNEKVLPKHSLLYEYFTVYNELTKVKYVTEGMRKPAFLSGEQKKAIVDLLFKTNRKVTVKQLKEDYFKKIECFDSVEISGVEDRFNASLGTYHDLLKIIKDKDFLDNEENEDILEDIVLTLTLFEDREMIEERLKTYAHLFDDKVMKQLKRRRYTGWGRLSRKLINGIRDKQSGKTILDFLKSDGFANRNFMQLIHDDSLTFKEDIQKAQVSGQGDSLHEHIANLAGSPAIKKGILQTVKVVDELVKVMGRHKPENIVIEMARENQTTQKGQKNSRERMKRIEEGIKELGSQILKEHPVENTQLQNEKLYLYYLQNGRDMYVDQELDINRLSDYDVDHIVPQSFLKDDSIDNKVLTRSDKARGKSDNVPSEEVVKKMKNYWRQLLNAKLITQRKFDNLTKAERGGLSELDKAGFIKRQLVETRQITKHVAQILDSRMNTKYDENDKLIREVKVITLKSKLVSDFRKDFQFYKVREINNYHHAHDAYLNAVVGTALIKKYPKLESEFVYGDYKVYDVRKMIAKSEQEIGKATAKYFFYSNIMNFFKTEITLANGEIRKRPLIETNGETGEIVWDKGRDFATVRKVLSMPQVNIVKKTEVQTGGFSKESILPKRNSDKLIARKKDWDPKKYGGFDSPTVAYSVLVVAKVEKGKSKKLKSVKELLGITIMERSSFEKNPIDFLEAKGYKEVKKDLIIKLPKYSLFELENGRKRMLASAGELQKGNELALPSKYVNFLYLASHYEKLKGSPEDNEQKQLFVEQHKHYLDEIIEQISEFSKRVILADANLDKVLSAYNKHRDKPIREQAENIIHLFTLTNLGAPAAFKYFDTTIDRKRYTSTKEVLDATLIHQSITGLYETRIDLSQLGGDGGGGGGSGGGGSGGGGSGGGGSGGGGSGGGGSGGTVSLQDEHRLFDIPVTTSLPDVWLQDFPQAWAETGGLGRAKCQAPIIIDLKPTAVPVSIKQYPMSLEAHMGIRQHIIKFLELGVLRPCRSPWNTPLLPVKKPGTQDYRPVQDLREINKRTVDIHPTVPNPYNLLSTLKPDYSWYTVLDLKDAFFCLPLAPQSQELFAFEWKDPERGISGQLTWTRLPQGFKNSPTLFNEALHRDLTDFRTQHPEVTLLQYVDDLLLAAPTKKACTQGTRHLLQELGEKGYRASAKKAQICQTKVTYLGYILSEGKRWLTPGRIETVARIPPPRNPREVREFLGKAGFCRLFIPGFAELAAPLYALTKPSTPFTWQTEHQLAFEALKKALLSAPALGLPDTSKPFTLFLDERQGIAKGVLTQKLGPWKRPVAYLSKKLDPVAAGWPPCLRIMAATAMLVKDSAKLTLGQPLTVITPHTLEAIVRQPPDRWITNARLTHYQALLLDTDRVQFGPPVTLNPATLLPVPENQPSPHDCRQVLAETHGTREDLKDQELPDADHTWYTDGSSYLDSGTRRAGAAVVDGHNTIWAQSLPPGTSAQKAELIALTKALELSKGKKANIYTDSRYAFATAHTHGSIYERRGWLTSEGKEIKNKAEIIALLKALFLPQEVAIIHCPGHQKGQDPVAVGNRQADRVARQAAMAEVLTLATEPDNTSHITAGKRTADGSEFEKRTADGSEFESPKKKAKVE

SEQ ID NO: 1937 - protein, 2102 aa, synthetic construct
MPAAKRVKLDGGDKKYSIGLDIGTNSVGWAVITDEYKVPSKKFKVLGNTDRHSIKKNLIGALLFDSGETAEATRLKRTARRRYTRRKNRICYLQEIFSNEMAKVDDSFFHRLEESFLVEEDKKHERHPIFGNIVDEVAYHEKYPTIYHLRKKLVDSTDKADLRLIYLALAHMIKFRGHFLIEGDLNPDNSDVDKLFIQLVQTYNQLFEENPINASGVDAKAILSARLSKSRRLENLIAQLPGEKKNGLFGNLIALSLGLTPNFKSNFDLAEDAKLQLSKDTYDDDLDNLLAQIGDQYADLFLAAKNLSDAILLSDILRVNTEITKAPLSASMIKRYDEHHQDLTLLKALVRQQLPEKYKEIFFDQSKNGYAGYIDGGASQEEFYKFIKPILEKMDGTEELLVKLNREDLLRKQRTFDNGSIPHQIHLGELHAILRRQEDFYPFLKDNREKIEKILTFRIPYYVGPLARGNSRFAWMTRKSEETITPWNFEEVVDKGASAQSFIERMTNFDKNLPNEKVLPKHSLLYEYFTVYNELTKVKYVTEGMRKPAFLSGEQKKAIVDLLFKTNRKVTVKQLKEDYFKKIECFDSVEISGVEDRFNASLGTYHDLLKIIKDKDFLDNEENEDILEDIVLTLTLFEDREMIEERLKTYAHLFDDKVMKQLKRRRYTGWGRLSRKLINGIRDKQSGKTILDFLKSDGFANRNFMQLIHDDSLTFKEDIQKAQVSGQGDSLHEHIANLAGSPAIKKGILQTVKVVDELVKVMGRHKPENIVIEMARENQTTQKGQKNSRERMKRIEEGIKELGSQILKEHPVENTQLQNEKLYLYYLQNGRDMYVDQELDINRLSDYDVDHIVPQSFLKDDSIDNKVLTRSDKARGKSDNVPSEEVVKKMKNYWRQLLNAKLITQRKFDNLTKAERGGLSELDKAGFIKRQLVETRQITKHVAQILDSRMNTKYDENDKLIREVKVITLKSKLVSDFRKDFQFYKVREINNYHHAHDAYLNAVVGTALIKKYPKLESEFVYGDYKVYDVRKMIAKSEQEIGKATAKYFFYSNIMNFFKTEITLANGEIRKRPLIETNGETGEIVWDKGRDFATVRKVLSMPQVNIVKKTEVQTGGFSKESILPKRNSDKLIARKKDWDPKKYGGFDSPTVAYSVLVVAKVEKGKSKKLKSVKELLGITIMERSSFEKNPIDFLEAKGYKEVKKDLIIKLPKYSLFELENGRKRMLASAGELQKGNELALPSKYVNFLYLASHYEKLKGSPEDNEQKQLFVEQHKHYLDEIIEQISEFSKRVILADANLDKVLSAYNKHRDKPIREQAENIIHLFTLTNLGAPAAFKYFDTTIDRKRYTSTKEVLDATLIHQSITGLYETRIDLSQLGGDGGGGGGGSEAAAKGGTVSLQDEHRLFDIPVTTSLPDVWLQDFPQAWAETGGLGRAKCQAPIIIDLKPTAVPVSIKQYPMSLEAHMGIRQHIIKFLELGVLRPCRSPWNTPLLPVKKPGTQDYRPVQDLREINKRTVDIHPTVPNPYNLLSTLKPDYSWYTVLDLKDAFFCLPLAPQSQELFAFEWKDPERGISGQLTWTRLPQGFKNSPTLFNEALHRDLTDFRTQHPEVTLLQYVDDLLLAAPTKKACTQGTRHLLQELGEKGYRASAKKAQICQTKVTYLGYILSEGKRWLTPGRIETVARIPPPRNPREVREFLGKAGFCRLFIPGFAELAAPLYALTKPSTPFTWQTEHQLAFEALKKALLSAPALGLPDTSKPFTLFLDERQGIAKGVLTQKLGPWKRPVAYLSKKLDPVAAGWPPCLRIMAATAMLVKDSAKLTLGQPLTVITPHTLEAIVRQPPDRWITNARLTHYQALLLDTDRVQFGPPVTLNPATLLPVPENQPSPHDCRQVLAETHGTREDLKDQELPDADHTWYTDGSSYLDSGTRRAGAAVVDGHNTIWAQSLPPGTSAQKAELIALTKALELSKGKKANIYTDSRYAFATAHTHGSIYERRGWLTSEGKEIKNKAEIIALLKALFLPQEVAIIHCPGHQKGQDPVAVGNRQADRVARQAAMAEVLTLATEPDNTSHITAGKRTADGSEFEKRTADGSEFESPKKKAKVE

SEQ ID NO: 1938 - protein, 2102 aa, synthetic construct
MPAAKRVKLDGGDKKYSIGLDIGTNSVGWAVITDEYKVPSKKFKVLGNTDRHSIKKNLIGALLFDSGETAEATRLKRTARRRYTRRKNRICYLQEIFSNEMAKVDDSFFHRLEESFLVEEDKKHERHPIFGNIVDEVAYHEKYPTIYHLRKKLVDSTDKADLRLIYLALAHMIKFRGHFLIEGDLNPDNSDVDKLFIQLVQTYNQLFEENPINASGVDAKAILSARLSKSRRLENLIAQLPGEKKNGLFGNLIALSLGLTPNFKSNFDLAEDAKLQLSKDTYDDDLDNLLAQIGDQYADLFLAAKNLSDAILLSDILRVNTEITKAPLSASMIKRYDEHHQDLTLLKALVRQQLPEKYKEIFFDQSKNGYAGYIDGGASQEEFYKFIKPILEKMDGTEELLVKLNREDLLRKQRTFDNGSIPHQIHLGELHAILRRQEDFYPFLKDNREKIEKILTFRIPYYVGPLARGNSRFAWMTRKSEETITPWNFEEVVDKGASAQSFIERMTNFDKNLPNEKVLPKHSLLYEYFTVYNELTKVKYVTEGMRKPAFLSGEQKKAIVDLLFKTNRKVTVKQLKEDYFKKIECFDSVEISGVEDRFNASLGTYHDLLKIIKDKDFLDNEENEDILEDIVLTLTLFEDREMIEERLKTYAHLFDDKVMKQLKRRRYTGWGRLSRKLINGIRDKQSGKTILDFLKSDGFANRNFMQLIHDDSLTFKEDIQKAQVSGQGDSLHEHIANLAGSPAIKKGILQTVKVVDELVKVMGRHKPENIVIEMARENQTTQKGQKNSRERMKRIEEGIKELGSQILKEHPVENTQLQNEKLYLYYLQNGRDMYVDQELDINRLSDYDVDHIVPQSFLKDDSIDNKVLTRSDKARGKSDNVPSEEVVKKMKNYWRQLLNAKLITQRKFDNLTKAERGGLSELDKAGFIKRQLVETRQITKHVAQILDSRMNTKYDENDKLIREVKVITLKSKLVSDFRKDFQFYKVREINNYHHAHDAYLNAVVGTALIKKYPKLESEFVYGDYKVYDVRKMIAKSEQEIGKATAKYFFYSNIMNFFKTEITLANGEIRKRPLIETNGETGEIVWDKGRDFATVRKVLSMPQVNIVKKTEVQTGGFSKESILPKRNSDKLIARKKDWDPKKYGGFDSPTVAYSVLVVAKVEKGKSKKLKSVKELLGITIMERSSFEKNPIDFLEAKGYKEVKKDLIIKLPKYSLFELENGRKRMLASAGELQKGNELALPSKYVNFLYLASHYEKLKGSPEDNEQKQLFVEQHKHYLDEIIEQISEFSKRVILADANLDKVLSAYNKHRDKPIREQAENIIHLFTLTNLGAPAAFKYFDTTIDRKRYTSTKEVLDATLIHQSITGLYETRIDLSQLGGDGGGGGPAPEAAAKGGTVSLQDEHRLFDIPVTTSLPDVWLQDFPQAWAETGGLGRAKCQAPIIIDLKPTAVPVSIKQYPMSLEAHMGIRQHIIKFLELGVLRPCRSPWNTPLLPVKKPGTQDYRPVQDLREINKRTVDIHPTVPNPYNLLSTLKPDYSWYTVLDLKDAFFCLPLAPQSQELFAFEWKDPERGISGQLTWTRLPQGFKNSPTLFNEALHRDLTDFRTQHPEVTLLQYVDDLLLAAPTKKACTQGTRHLLQELGEKGYRASAKKAQICQTKVTYLGYILSEGKRWLTPGRIETVARIPPPRNPREVREFLGKAGFCRLFIPGFAELAAPLYALTKPSTPFTWQTEHQLAFEALKKALLSAPALGLPDTSKPFTLFLDERQGIAKGVLTQKLGPWKRPVAYLSKKLDPVAAGWPPCLRIMAATAMLVKDSAKLTLGQPLTVITPHTLEAIVRQPPDRWITNARLTHYQALLLDTDRVQFGPPVTLNPATLLPVPENQPSPHDCRQVLAETHGTREDLKDQELPDADHTWYTDGSSYLDSGTRRAGAAVVDGHNTIWAQSLPPGTSAQKAELIALTKALELSKGKKANIYTDSRYAFATAHTHGSIYERRGWLTSEGKEIKNKAEIIALLKALFLPQEVAIIHCPGHQKGQDPVAVGNRQADRVARQAAMAEVLTLATEPDNTSHITAGKRTADGSEFEKRTADGSEFESPKKKAKVE

SEQ ID NO: 1939 - protein, 2102 aa, synthetic construct
MPAAKRVKLDGGDKKYSIGLDIGTNSVGWAVITDEYKVPSKKFKVLGNTDRHSIKKNLIGALLFDSGETAEATRLKRTARRRYTRRKNRICYLQEIFSNEMAKVDDSFFHRLEESFLVEEDKKHERHPIFGNIVDEVAYHEKYPTIYHLRKKLVDSTDKADLRLIYLALAHMIKFRGHFLIEGDLNPDNSDVDKLFIQLVQTYNQLFEENPINASGVDAKAILSARLSKSRRLENLIAQLPGEKKNGLFGNLIALSLGLTPNFKSNFDLAEDAKLQLSKDTYDDDLDNLLAQIGDQYADLFLAAKNLSDAILLSDILRVNTEITKAPLSASMIKRYDEHHQDLTLLKALVRQQLPEKYKEIFFDQSKNGYAGYIDGGASQEEFYKFIKPILEKMDGTEELLVKLNREDLLRKQRTFDNGSIPHQIHLGELHAILRRQEDFYPFLKDNREKIEKILTFRIPYYVGPLARGNSRFAWMTRKSEETITPWNFEEVVDKGASAQSFIERMTNFDKNLPNEKVLPKHSLLYEYFTVYNELTKVKYVTEGMRKPAFLSGEQKKAIVDLLFKTNRKVTVKQLKEDYFKKIECFDSVEISGVEDRFNASLGTYHDLLKIIKDKDFLDNEENEDILEDIVLTLTLFEDREMIEERLKTYAHLFDDKVMKQLKRRRYTGWGRLSRKLINGIRDKQSGKTILDFLKSDGFANRNFMQLIHDDSLTFKEDIQKAQVSGQGDSLHEHIANLAGSPAIKKGILQTVKVVDELVKVMGRHKPENIVIEMARENQTTQKGQKNSRERMKRIEEGIKELGSQILKEHPVENTQLQNEKLYLYYLQNGRDMYVDQELDINRLSDYDVDHIVPQSFLKDDSIDNKVLTRSDKARGKSDNVPSEEVVKKMKNYWRQLLNAKLITQRKFDNLTKAERGGLSELDKAGFIKRQLVETRQITKHVAQILDSRMNTKYDENDKLIREVKVITLKSKLVSDFRKDFQFYKVREINNYHHAHDAYLNAVVGTALIKKYPKLESEFVYGDYKVYDVRKMIAKSEQEIGKATAKYFFYSNIMNFFKTEITLANGEIRKRPLIETNGETGEIVWDKGRDFATVRKVLSMPQVNIVKKTEVQTGGFSKESILPKRNSDKLIARKKDWDPKKYGGFDSPTVAYSVLVVAKVEKGKSKKLKSVKELLGITIMERSSFEKNPIDFLEAKGYKEVKKDLIIKLPKYSLFELENGRKRMLASAGELQKGNELALPSKYVNFLYLASHYEKLKGSPEDNEQKQLFVEQHKHYLDEIIEQISEFSKRVILADANLDKVLSAYNKHRDKPIREQAENIIHLFTLTNLGAPAAFKYFDTTIDRKRYTSTKEVLDATLIHQSITGLYETRIDLSQLGGDGGPAPGGSEAAAKGGTVSLQDEHRLFDIPVTTSLPDVWLQDFPQAWAETGGLGRAKCQAPIIIDLKPTAVPVSIKQYPMSLEAHMGIRQHIIKFLELGVLRPCRSPWNTPLLPVKKPGTQDYRPVQDLREINKRTVDIHPTVPNPYNLLSTLKPDYSWYTVLDLKDAFFCLPLAPQSQELFAFEWKDPERGISGQLTWTRLPQGFKNSPTLFNEALHRDLTDFRTQHPEVTLLQYVDDLLLAAPTKKACTQGTRHLLQELGEKGYRASAKKAQICQTKVTYLGYILSEGKRWLTPGRIETVARIPPPRNPREVREFLGKAGFCRLFIPGFAELAAPLYALTKPSTPFTWQTEHQLAFEALKKALLSAPALGLPDTSKPFTLFLDERQGIAKGVLTQKLGPWKRPVAYLSKKLDPVAAGWPPCLRIMAATAMLVKDSAKLTLGQPLTVITPHTLEAIVRQPPDRWITNARLTHYQALLLDTDRVQFGPPVTLNPATLLPVPENQPSPHDCRQVLAETHGTREDLKDQELPDADHTWYTDGSSYLDSGTRRAGAAVVDGHNTIWAQSLPPGTSAQKAELIALTKALELSKGKKANIYTDSRYAFATAHTHGSIYERRGWLTSEGKEIKNKAEIIALLKALFLPQEVAIIHCPGHQKGQDPVAVGNRQADRVARQAAMAEVLTLATEPDNTSHITAGKRTADGSEFEKRTADGSEFESPKKKAKVE

SEQ ID NO: 1940 - protein, 2097 aa, synthetic construct
MPAAKRVKLDGGDKKYSIGLDIGTNSVGWAVITDEYKVPSKKFKVLGNTDRHSIKKNLIGALLFDSGETAEATRLKRTARRRYTRRKNRICYLQEIFSNEMAKVDDSFFHRLEESFLVEEDKKHERHPIFGNIVDEVAYHEKYPTIYHLRKKLVDSTDKADLRLIYLALAHMIKFRGHFLIEGDLNPDNSDVDKLFIQLVQTYNQLFEENPINASGVDAKAILSARLSKSRRLENLIAQLPGEKKNGLFGNLIALSLGLTPNFKSNFDLAEDAKLQLSKDTYDDDLDNLLAQIGDQYADLFLAAKNLSDAILLSDILRVNTEITKAPLSASMIKRYDEHHQDLTLLKALVRQQLPEKYKEIFFDQSKNGYAGYIDGGASQEEFYKFIKPILEKMDGTEELLVKLNREDLLRKQRTFDNGSIPHQIHLGELHAILRRQEDFYPFLKDNREKIEKILTFRIPYYVGPLARGNSRFAWMTRKSEETITPWNFEEVVDKGASAQSFIERMTNFDKNLPNEKVLPKHSLLYEYFTVYNELTKVKYVTEGMRKPAFLSGEQKKAIVDLLFKTNRKVTVKQLKEDYFKKIECFDSVEISGVEDRFNASLGTYHDLLKIIKDKDFLDNEENEDILEDIVLTLTLFEDREMIEERLKTYAHLFDDKVMKQLKRRRYTGWGRLSRKLINGIRDKQSGKTILDFLKSDGFANRNFMQLIHDDSLTFKEDIQKAQVSGQGDSLHEHIANLAGSPAIKKGILQTVKVVDELVKVMGRHKPENIVIEMARENQTTQKGQKNSRERMKRIEEGIKELGSQILKEHPVENTQLQNEKLYLYYLQNGRDMYVDQELDINRLSDYDVDHIVPQSFLKDDSIDNKVLTRSDKARGKSDNVPSEEVVKKMKNYWRQLLNAKLITQRKFDNLTKAERGGLSELDKAGFIKRQLVETRQITKHVAQILDSRMNTKYDENDKLIREVKVITLKSKLVSDFRKDFQFYKVREINNYHHAHDAYLNAVVGTALIKKYPKLESEFVYGDYKVYDVRKMIAKSEQEIGKATAKYFFYSNIMNFFKTEITLANGEIRKRPLIETNGETGEIVWDKGRDFATVRKVLSMPQVNIVKKTEVQTGGFSKESILPKRNSDKLIARKKDWDPKKYGGFDSPTVAYSVLVVAKVEKGKSKKLKSVKELLGITIMERSSFEKNPIDFLEAKGYKEVKKDLIIKLPKYSLFELENGRKRMLASAGELQKGNELALPSKYVNFLYLASHYEKLKGSPEDNEQKQLFVEQHKHYLDEIIEQISEFSKRVILADANLDKVLSAYNKHRDKPIREQAENIIHLFTLTNLGAPAAFKYFDTTIDRKRYTSTKEVLDATLIHQSITGLYETRIDLSQLGGDGGGGSGGGGGTVSLQDEHRLFDIPVTTSLPDVWLQDFPQAWAETGGLGRAKCQAPIIIDLKPTAVPVSIKQYPMSLEAHMGIRQHIIKFLELGVLRPCRSPWNTPLLPVKKPGTQDYRPVQDLREINKRTVDIHPTVPNPYNLLSTLKPDYSWYTVLDLKDAFFCLPLAPQSQELFAFEWKDPERGISGQLTWTRLPQGFKNSPTLFNEALHRDLTDFRTQHPEVTLLQYVDDLLLAAPTKKACTQGTRHLLQELGEKGYRASAKKAQICQTKVTYLGYILSEGKRWLTPGRIETVARIPPPRNPREVREFLGKAGFCRLFIPGFAELAAPLYALTKPSTPFTWQTEHQLAFEALKKALLSAPALGLPDTSKPFTLFLDERQGIAKGVLTQKLGPWKRPVAYLSKKLDPVAAGWPPCLRIMAATAMLVKDSAKLTLGQPLTVITPHTLEAIVRQPPDRWITNARLTHYQALLLDTDRVQFGPPVTLNPATLLPVPENQPSPHDCRQVLAETHGTREDLKDQELPDADHTWYTDGSSYLDSGTRRAGAAVVDGHNTIWAQSLPPGTSAQKAELIALTKALELSKGKKANIYTDSRYAFATAHTHGSIYERRGWLTSEGKEIKNKAEIIALLKALFLPQEVAIIHCPGHQKGQDPVAVGNRQADRVARQAAMAEVLTLATEPDNTSHITAGKRTADGSEFEKRTADGSEFESPKKKAKVE

SEQ ID NO: 1941 - protein, 2111 aa, synthetic construct
MPAAKRVKLDGGDKKYSIGLDIGTNSVGWAVITDEYKVPSKKFKVLGNTDRHSIKKNLIGALLFDSGETAEATRLKRTARRRYTRRKNRICYLQEIFSNEMAKVDDSFFHRLEESFLVEEDKKHERHPIFGNIVDEVAYHEKYPTIYHLRKKLVDSTDKADLRLIYLALAHMIKFRGHFLIEGDLNPDNSDVDKLFIQLVQTYNQLFEENPINASGVDAKAILSARLSKSRRLENLIAQLPGEKKNGLFGNLIALSLGLTPNFKSNFDLAEDAKLQLSKDTYDDDLDNLLAQIGDQYADLFLAAKNLSDAILLSDILRVNTEITKAPLSASMIKRYDEHHQDLTLLKALVRQQLPEKYKEIFFDQSKNGYAGYIDGGASQEEFYKFIKPILEKMDGTEELLVKLNREDLLRKQRTFDNGSIPHQIHLGELHAILRRQEDFYPFLKDNREKIEKILTFRIPYYVGPLARGNSRFAWMTRKSEETITPWNFEEVVDKGASAQSFIERMTNFDKNLPNEKVLPKHSLLYEYFTVYNELTKVKYVTEGMRKPAFLSGEQKKAIVDLLFKTNRKVTVKQLKEDYFKKIECFDSVEISGVEDRFNASLGTYHDLLKIIKDKDFLDNEENEDILEDIVLTLTLFEDREMIEERLKTYAHLFDDKVMKQLKRRRYTGWGRLSRKLINGIRDKQSGKTILDFLKSDGFANRNFMQLIHDDSLTFKEDIQKAQVSGQGDSLHEHIANLAGSPAIKKGILQTVKVVDELVKVMGRHKPENIVIEMARENQTTQKGQKNSRERMKRIEEGIKELGSQILKEHPVENTQLQNEKLYLYYLQNGRDMYVDQELDINRLSDYDVDHIVPQSFLKDDSIDNKVLTRSDKARGKSDNVPSEEVVKKMKNYWRQLLNAKLITQRKFDNLTKAERGGLSELDKAGFIKRQLVETRQITKHVAQILDSRMNTKYDENDKLIREVKVITLKSKLVSDFRKDFQFYKVREINNYHHAHDAYLNAVVGTALIKKYPKLESEFVYGDYKVYDVRKMIAKSEQEIGKATAKYFFYSNIMNFFKTEITLANGEIRKRPLIETNGETGEIVWDKGRDFATVRKVLSMPQVNIVKKTEVQTGGFSKESILPKRNSDKLIARKKDWDPKKYGGFDSPTVAYSVLVVAKVEKGKSKKLKSVKELLGITIMERSSFEKNPIDFLEAKGYKEVKKDLIIKLPKYSLFELENGRKRMLASAGELQKGNELALPSKYVNFLYLASHYEKLKGSPEDNEQKQLFVEQHKHYLDEIIEQISEFSKRVILADANLDKVLSAYNKHRDKPIREQAENIIHLFTLTNLGAPAAFKYFDTTIDRKRYTSTKEVLDATLIHQSITGLYETRIDLSQLGGDGGEAAAKEAAAKEAAAKEAAAKGGTVSLQDEHRLFDIPVTTSLPDVWLQDFPQAWAETGGLGRAKCQAPIIIDLKPTAVPVSIKQYPMSLEAHMGIRQHIIKFLELGVLRPCRSPWNTPLLPVKKPGTQDYRPVQDLREINKRTVDIHPTVPNPYNLLSTLKPDYSWYTVLDLKDAFFCLPLAPQSQELFAFEWKDPERGISGQLTWTRLPQGFKNSPTLFNEALHRDLTDFRTQHPEVTLLQYVDDLLLAAPTKKACTQGTRHLLQELGEKGYRASAKKAQICQTKVTYLGYILSEGKRWLTPGRIETVARIPPPRNPREVREFLGKAGFCRLFIPGFAELAAPLYALTKPSTPFTWQTEHQLAFEALKKALLSAPALGLPDTSKPFTLFLDERQGIAKGVLTQKLGPWKRPVAYLSKKLDPVAAGWPPCLRIMAATAMLVKDSAKLTLGQPLTVITPHTLEAIVRQPPDRWITNARLTHYQALLLDTDRVQFGPPVTLNPATLLPVPENQPSPHDCRQVLAETHGTREDLKDQELPDADHTWYTDGSSYLDSGTRRAGAAVVDGHNTIWAQSLPPGTSAQKAELIALTKALELSKGKKANIYTDSRYAFATAHTHGSIYERRGWLTSEGKEIKNKAEIIALLKALFLPQEVAIIHCPGHQKGQDPVAVGNRQADRVARQAAMAEVLTLATEPDNTSHITAGKRTADGSEFEKRTADGSEFESPKKKAKVE

SEQ ID NO: 1942 - protein, 2100 aa, synthetic construct
MPAAKRVKLDGGDKKYSIGLDIGTNSVGWAVITDEYKVPSKKFKVLGNTDRHSIKKNLIGALLFDSGETAEATRLKRTARRRYTRRKNRICYLQEIFSNEMAKVDDSFFHRLEESFLVEEDKKHERHPIFGNIVDEVAYHEKYPTIYHLRKKLVDSTDKADLRLIYLALAHMIKFRGHFLIEGDLNPDNSDVDKLFIQLVQTYNQLFEENPINASGVDAKAILSARLSKSRRLENLIAQLPGEKKNGLFGNLIALSLGLTPNFKSNFDLAEDAKLQLSKDTYDDDLDNLLAQIGDQYADLFLAAKNLSDAILLSDILRVNTEITKAPLSASMIKRYDEHHQDLTLLKALVRQQLPEKYKEIFFDQSKNGYAGYIDGGASQEEFYKFIKPILEKMDGTEELLVKLNREDLLRKQRTFDNGSIPHQIHLGELHAILRRQEDFYPFLKDNREKIEKILTFRIPYYVGPLARGNSRFAWMTRKSEETITPWNFEEVVDKGASAQSFIERMTNFDKNLPNEKVLPKHSLLYEYFTVYNELTKVKYVTEGMRKPAFLSGEQKKAIVDLLFKTNRKVTVKQLKEDYFKKIECFDSVEISGVEDRFNASLGTYHDLLKIIKDKDFLDNEENEDILEDIVLTLTLFEDREMIEERLKTYAHLFDDKVMKQLKRRRYTGWGRLSRKLINGIRDKQSGKTILDFLKSDGFANRNFMQLIHDDSLTFKEDIQKAQVSGQGDSLHEHIANLAGSPAIKKGILQTVKVVDELVKVMGRHKPENIVIEMARENQTTQKGQKNSRERMKRIEEGIKELGSQILKEHPVENTQLQNEKLYLYYLQNGRDMYVDQELDINRLSDYDVDHIVPQSFLKDDSIDNKVLTRSDKARGKSDNVPSEEVVKKMKNYWRQLLNAKLITQRKFDNLTKAERGGLSELDKAGFIKRQLVETRQITKHVAQILDSRMNTKYDENDKLIREVKVITLKSKLVSDFRKDFQFYKVREINNYHHAHDAYLNAVVGTALIKKYPKLESEFVYGDYKVYDVRKMIAKSEQEIGKATAKYFFYSNIMNFFKTEITLANGEIRKRPLIETNGETGEIVWDKGRDFATVRKVLSMPQVNIVKKTEVQTGGFSKESILPKRNSDKLIARKKDWDPKKYGGFDSPTVAYSVLVVAKVEKGKSKKLKSVKELLGITIMERSSFEKNPIDFLEAKGYKEVKKDLIIKLPKYSLFELENGRKRMLASAGELQKGNELALPSKYVNFLYLASHYEKLKGSPEDNEQKQLFVEQHKHYLDEIIEQISEFSKRVILADANLDKVLSAYNKHRDKPIREQAENIIHLFTLTNLGAPAAFKYFDTTIDRKRYTSTKEVLDATLIHQSITGLYETRIDLSQLGGDGGGGSGGGPAPGGTVSLQDEHRLFDIPVTTSLPDVWLQDFPQAWAETGGLGRAKCQAPIIIDLKPTAVPVSIKQYPMSLEAHMGIRQHIIKFLELGVLRPCRSPWNTPLLPVKKPGTQDYRPVQDLREINKRTVDIHPTVPNPYNLLSTLKPDYSWYTVLDLKDAFFCLPLAPQSQELFAFEWKDPERGISGQLTWTRLPQGFKNSPTLFNEALHRDLTDFRTQHPEVTLLQYVDDLLLAAPTKKACTQGTRHLLQELGEKGYRASAKKAQICQTKVTYLGYILSEGKRWLTPGRIETVARIPPPRNPREVREFLGKAGFCRLFIPGFAELAAPLYALTKPSTPFTWQTEHQLAFEALKKALLSAPALGLPDTSKPFTLFLDERQGIAKGVLTQKLGPWKRPVAYLSKKLDPVAAGWPPCLRIMAATAMLVKDSAKLTLGQPLTVITPHTLEAIVRQPPDRWITNARLTHYQALLLDTDRVQFGPPVTLNPATLLPVPENQPSPHDCRQVLAETHGTREDLKDQELPDADHTWYTDGSSYLDSGTRRAGAAVVDGHNTIWAQSLPPGTSAQKAELIALTKALELSKGKKANIYTDSRYAFATAHTHGSIYERRGWLTSEGKEIKNKAEIIALLKALFLPQEVAIIHCPGHQKGQDPVAVGNRQADRVARQAAMAEVLTLATEPDNTSHITAGKRTADGSEFEKRTADGSEFESPKKKAKVE

SEQ ID NO: 1943 - protein, 2102 aa, synthetic construct
MPAAKRVKLDGGDKKYSIGLDIGTNSVGWAVITDEYKVPSKKFKVLGNTDRHSIKKNLIGALLFDSGETAEATRLKRTARRRYTRRKNRICYLQEIFSNEMAKVDDSFFHRLEESFLVEEDKKHERHPIFGNIVDEVAYHEKYPTIYHLRKKLVDSTDKADLRLIYLALAHMIKFRGHFLIEGDLNPDNSDVDKLFIQLVQTYNQLFEENPINASGVDAKAILSARLSKSRRLENLIAQLPGEKKNGLFGNLIALSLGLTPNFKSNFDLAEDAKLQLSKDTYDDDLDNLLAQIGDQYADLFLAAKNLSDAILLSDILRVNTEITKAPLSASMIKRYDEHHQDLTLLKALVRQQLPEKYKEIFFDQSKNGYAGYIDGGASQEEFYKFIKPILEKMDGTEELLVKLNREDLLRKQRTFDNGSIPHQIHLGELHAILRRQEDFYPFLKDNREKIEKILTFRIPYYVGPLARGNSRFAWMTRKSEETITPWNFEEVVDKGASAQSFIERMTNFDKNLPNEKVLPKHSLLYEYFTVYNELTKVKYVTEGMRKPAFLSGEQKKAIVDLLFKTNRKVTVKQLKEDYFKKIECFDSVEISGVEDRFNASLGTYHDLLKIIKDKDFLDNEENEDILEDIVLTLTLFEDREMIEERLKTYAHLFDDKVMKQLKRRRYTGWGRLSRKLINGIRDKQSGKTILDFLKSDGFANRNFMQLIHDDSLTFKEDIQKAQVSGQGDSLHEHIANLAGSPAIKKGILQTVKVVDELVKVMGRHKPENIVIEMARENQTTQKGQKNSRERMKRIEEGIKELGSQILKEHPVENTQLQNEKLYLYYLQNGRDMYVDQELDINRLSDYDVDHIVPQSFLKDDSIDNKVLTRSDKARGKSDNVPSEEVVKKMKNYWRQLLNAKLITQRKFDNLTKAERGGLSELDKAGFIKRQLVETRQITKHVAQILDSRMNTKYDENDKLIREVKVITLKSKLVSDFRKDFQFYKVREINNYHHAHDAYLNAVVGTALIKKYPKLESEFVYGDYKVYDVRKMIAKSEQEIGKATAKYFFYSNIMNFFKTEITLANGEIRKRPLIETNGETGEIVWDKGRDFATVRKVLSMPQVNIVKKTEVQTGGFSKESILPKRNSDKLIARKKDWDPKKYGGFDSPTVAYSVLVVAKVEKGKSKKLKSVKELLGITIMERSSFEKNPIDFLEAKGYKEVKKDLIIKLPKYSLFELENGRKRMLASAGELQKGNELALPSKYVNFLYLASHYEKLKGSPEDNEQKQLFVEQHKHYLDEIIEQISEFSKRVILADANLDKVLSAYNKHRDKPIREQAENIIHLFTLTNLGAPAAFKYFDTTIDRKRYTSTKEVLDATLIHQSITGLYETRIDLSQLGGDGGGGGEAAAKGGSGGTVSLQDEHRLFDIPVTTSLPDVWLQDFPQAWAETGGLGRAKCQAPIIIDLKPTAVPVSIKQYPMSLEAHMGIRQHIIKFLELGVLRPCRSPWNTPLLPVKKPGTQDYRPVQDLREINKRTVDIHPTVPNPYNLLSTLKPDYSWYTVLDLKDAFFCLPLAPQSQELFAFEWKDPERGISGQLTWTRLPQGFKNSPTLFNEALHRDLTDFRTQHPEVTLLQYVDDLLLAAPTKKACTQGTRHLLQELGEKGYRASAKKAQICQTKVTYLGYILSEGKRWLTPGRIETVARIPPPRNPREVREFLGKAGFCRLFIPGFAELAAPLYALTKPSTPFTWQTEHQLAFEALKKALLSAPALGLPDTSKPFTLFLDERQGIAKGVLTQKLGPWKRPVAYLSKKLDPVAAGWPPCLRIMAATAMLVKDSAKLTLGQPLTVITPHTLEAIVRQPPDRWITNARLTHYQALLLDTDRVQFGPPVTLNPATLLPVPENQPSPHDCRQVLAETHGTREDLKDQELPDADHTWYTDGSSYLDSGTRRAGAAVVDGHNTIWAQSLPPGTSAQKAELIALTKALELSKGKKANIYTDSRYAFATAHTHGSIYERRGWLTSEGKEIKNKAEIIALLKALFLPQEVAIIHCPGHQKGQDPVAVGNRQADRVARQAAMAEVLTLATEPDNTSHITAGKRTADGSEFEKRTADGSEFESPKKKAKVE

SEQ ID NO: 1944 - protein, 2116 aa, synthetic construct
MPAAKRVKLDGGDKKYSIGLDIGTNSVGWAVITDEYKVPSKKFKVLGNTDRHSIKKNLIGALLFDSGETAEATRLKRTARRRYTRRKNRICYLQEIFSNEMAKVDDSFFHRLEESFLVEEDKKHERHPIFGNIVDEVAYHEKYPTIYHLRKKLVDSTDKADLRLIYLALAHMIKFRGHFLIEGDLNPDNSDVDKLFIQLVQTYNQLFEENPINASGVDAKAILSARLSKSRRLENLIAQLPGEKKNGLFGNLIALSLGLTPNFKSNFDLAEDAKLQLSKDTYDDDLDNLLAQIGDQYADLFLAAKNLSDAILLSDILRVNTEITKAPLSASMIKRYDEHHQDLTLLKALVRQQLPEKYKEIFFDQSKNGYAGYIDGGASQEEFYKFIKPILEKMDGTEELLVKLNREDLLRKQRTFDNGSIPHQIHLGELHAILRRQEDFYPFLKDNREKIEKILTFRIPYYVGPLARGNSRFAWMTRKSEETITPWNFEEVVDKGASAQSFIERMTNFDKNLPNEKVLPKHSLLYEYFTVYNELTKVKYVTEGMRKPAFLSGEQKKAIVDLLFKTNRKVTVKQLKEDYFKKIECFDSVEISGVEDRFNASLGTYHDLLKIIKDKDFLDNEENEDILEDIVLTLTLFEDREMIEERLKTYAHLFDDKVMKQLKRRRYTGWGRLSRKLINGIRDKQSGKTILDFLKSDGFANRNFMQLIHDDSLTFKEDIQKAQVSGQGDSLHEHIANLAGSPAIKKGILQTVKVVDELVKVMGRHKPENIVIEMARENQTTQKGQKNSRERMKRIEEGIKELGSQILKEHPVENTQLQNEKLYLYYLQNGRDMYVDQELDINRLSDYDVDHIVPQSFLKDDSIDNKVLTRSDKARGKSDNVPSEEVVKKMKNYWRQLLNAKLITQRKFDNLTKAERGGLSELDKAGFIKRQLVETRQITKHVAQILDSRMNTKYDENDKLIREVKVITLKSKLVSDFRKDFQFYKVREINNYHHAHDAYLNAVVGTALIKKYPKLESEFVYGDYKVYDVRKMIAKSEQEIGKATAKYFFYSNIMNFFKTEITLANGEIRKRPLIETNGETGEIVWDKGRDFATVRKVLSMPQVNIVKKTEVQTGGFSKESILPKRNSDKLIARKKDWDPKKYGGFDSPTVAYSVLVVAKVEKGKSKKLKSVKELLGITIMERSSFEKNPIDFLEAKGYKEVKKDLIIKLPKYSLFELENGRKRMLASAGELQKGNELALPSKYVNFLYLASHYEKLKGSPEDNEQKQLFVEQHKHYLDEIIEQISEFSKRVILADANLDKVLSAYNKHRDKPIREQAENIIHLFTLTNLGAPAAFKYFDTTIDRKRYTSTKEVLDATLIHQSITGLYETRIDLSQLGGDGGGGGGSGGGGSGGGGSGGGGSGGGGSGGTVSLQDEHRLFDIPVTTSLPDVWLQDFPQAWAETGGLGRAKCQAPIIIDLKPTAVPVSIKQYPMSLEAHMGIRQHIIKFLELGVLRPCRSPWNTPLLPVKKPGTQDYRPVQDLREINKRTVDIHPTVPNPYNLLSTLKPDYSWYTVLDLKDAFFCLPLAPQSQELFAFEWKDPERGISGQLTWTRLPQGFKNSPTLFNEALHRDLTDFRTQHPEVTLLQYVDDLLLAAPTKKACTQGTRHLLQELGEKGYRASAKKAQICQTKVTYLGYILSEGKRWLTPGRIETVARIPPPRNPREVREFLGKAGFCRLFIPGFAELAAPLYALTKPSTPFTWQTEHQLAFEALKKALLSAPALGLPDTSKPFTLFLDERQGIAKGVLTQKLGPWKRPVAYLSKKLDPVAAGWPPCLRIMAATAMLVKDSAKLTLGQPLTVITPHTLEAIVRQPPDRWITNARLTHYQALLLDTDRVQFGPPVTLNPATLLPVPENQPSPHDCRQVLAETHGTREDLKDQELPDADHTWYTDGSSYLDSGTRRAGAAVVDGHNTIWAQSLPPGTSAQKAELIALTKALELSKGKKANIYTDSRYAFATAHTHGSIYERRGWLTSEGKEIKNKAEIIALLKALFLPQEVAIIHCPGHQKGQDPVAVGNRQADRVARQAAMAEVLTLATEPDNTSHITAGKRTADGSEFEKRTADGSEFESPKKKAKVE

SEQ ID NO: 1945 - protein, 2096 aa, synthetic construct
MPAAKRVKLDGGDKKYSIGLDIGTNSVGWAVITDEYKVPSKKFKVLGNTDRHSIKKNLIGALLFDSGETAEATRLKRTARRRYTRRKNRICYLQEIFSNEMAKVDDSFFHRLEESFLVEEDKKHERHPIFGNIVDEVAYHEKYPTIYHLRKKLVDSTDKADLRLIYLALAHMIKFRGHFLIEGDLNPDNSDVDKLFIQLVQTYNQLFEENPINASGVDAKAILSARLSKSRRLENLIAQLPGEKKNGLFGNLIALSLGLTPNFKSNFDLAEDAKLQLSKDTYDDDLDNLLAQIGDQYADLFLAAKNLSDAILLSDILRVNTEITKAPLSASMIKRYDEHHQDLTLLKALVRQQLPEKYKEIFFDQSKNGYAGYIDGGASQEEFYKFIKPILEKMDGTEELLVKLNREDLLRKQRTFDNGSIPHQIHLGELHAILRRQEDFYPFLKDNREKIEKILTFRIPYYVGPLARGNSRFAWMTRKSEETITPWNFEEVVDKGASAQSFIERMTNFDKNLPNEKVLPKHSLLYEYFTVYNELTKVKYVTEGMRKPAFLSGEQKKAIVDLLFKTNRKVTVKQLKEDYFKKIECFDSVEISGVEDRFNASLGTYHDLLKIIKDKDFLDNEENEDILEDIVLTLTLFEDREMIEERLKTYAHLFDDKVMKQLKRRRYTGWGRLSRKLINGIRDKQSGKTILDFLKSDGFANRNFMQLIHDDSLTFKEDIQKAQVSGQGDSLHEHIANLAGSPAIKKGILQTVKVVDELVKVMGRHKPENIVIEMARENQTTQKGQKNSRERMKRIEEGIKELGSQILKEHPVENTQLQNEKLYLYYLQNGRDMYVDQELDINRLSDYDVDHIVPQSFLKDDSIDNKVLTRSDKARGKSDNVPSEEVVKKMKNYWRQLLNAKLITQRKFDNLTKAERGGLSELDKAGFIKRQLVETRQITKHVAQILDSRMNTKYDENDKLIREVKVITLKSKLVSDFRKDFQFYKVREINNYHHAHDAYLNAVVGTALIKKYPKLESEFVYGDYKVYDVRKMIAKSEQEIGKATAKYFFYSNIMNFFKTEITLANGEIRKRPLIETNGETGEIVWDKGRDFATVRKVLSMPQVNIVKKTEVQTGGFSKESILPKRNSDKLIARKKDWDPKKYGGFDSPTVAYSVLVVAKVEKGKSKKLKSVKELLGITIMERSSFEKNPIDFLEAKGYKEVKKDLIIKLPKYSLFELENGRKRMLASAGELQKGNELALPSKYVNFLYLASHYEKLKGSPEDNEQKQLFVEQHKHYLDEIIEQISEFSKRVILADANLDKVLSAYNKHRDKPIREQAENIIHLFTLTNLGAPAAFKYFDTTIDRKRYTSTKEVLDATLIHQSITGLYETRIDLSQLGGDGGPAPAPGGTVSLQDEHRLFDIPVTTSLPDVWLQDFPQAWAETGGLGRAKCQAPIIIDLKPTAVPVSIKQYPMSLEAHMGIRQHIIKFLELGVLRPCRSPWNTPLLPVKKPGTQDYRPVQDLREINKRTVDIHPTVPNPYNLLSTLKPDYSWYTVLDLKDAFFCLPLAPQSQELFAFEWKDPERGISGQLTWTRLPQGFKNSPTLFNEALHRDLTDFRTQHPEVTLLQYVDDLLLAAPTKKACTQGTRHLLQELGEKGYRASAKKAQICQTKVTYLGYILSEGKRWLTPGRIETVARIPPPRNPREVREFLGKAGFCRLFIPGFAELAAPLYALTKPSTPFTWQTEHQLAFEALKKALLSAPALGLPDTSKPFTLFLDERQGIAKGVLTQKLGPWKRPVAYLSKKLDPVAAGWPPCLRIMAATAMLVKDSAKLTLGQPLTVITPHTLEAIVRQPPDRWITNARLTHYQALLLDTDRVQFGPPVTLNPATLLPVPENQPSPHDCRQVLAETHGTREDLKDQELPDADHTWYTDGSSYLDSGTRRAGAAVVDGHNTIWAQSLPPGTSAQKAELIALTKALELSKGKKANIYTDSRYAFATAHTHGSIYERRGWLTSEGKEIKNKAEIIALLKALFLPQEVAIIHCPGHQKGQDPVAVGNRQADRVARQAAMAEVLTLATEPDNTSHITAGKRTADGSEFEKRTADGSEFESPKKKAKVE

SEQ ID NO: 1946 - protein, 2116 aa, synthetic construct
MPAAKRVKLDGGDKKYSIGLDIGTNSVGWAVITDEYKVPSKKFKVLGNTDRHSIKKNLIGALLFDSGETAEATRLKRTARRRYTRRKNRICYLQEIFSNEMAKVDDSFFHRLEESFLVEEDKKHERHPIFGNIVDEVAYHEKYPTIYHLRKKLVDSTDKADLRLIYLALAHMIKFRGHFLIEGDLNPDNSDVDKLFIQLVQTYNQLFEENPINASGVDAKAILSARLSKSRRLENLIAQLPGEKKNGLFGNLIALSLGLTPNFKSNFDLAEDAKLQLSKDTYDDDLDNLLAQIGDQYADLFLAAKNLSDAILLSDILRVNTEITKAPLSASMIKRYDEHHQDLTLLKALVRQQLPEKYKEIFFDQSKNGYAGYIDGGASQEEFYKFIKPILEKMDGTEELLVKLNREDLLRKQRTFDNGSIPHQIHLGELHAILRRQEDFYPFLKDNREKIEKILTFRIPYYVGPLARGNSRFAWMTRKSEETITPWNFEEVVDKGASAQSFIERMTNFDKNLPNEKVLPKHSLLYEYFTVYNELTKVKYVTEGMRKPAFLSGEQKKAIVDLLFKTNRKVTVKQLKEDYFKKIECFDSVEISGVEDRFNASLGTYHDLLKIIKDKDFLDNEENEDILEDIVLTLTLFEDREMIEERLKTYAHLFDDKVMKQLKRRRYTGWGRLSRKLINGIRDKQSGKTILDFLKSDGFANRNFMQLIHDDSLTFKEDIQKAQVSGQGDSLHEHIANLAGSPAIKKGILQTVKVVDELVKVMGRHKPENIVIEMARENQTTQKGQKNSRERMKRIEEGIKELGSQILKEHPVENTQLQNEKLYLYYLQNGRDMYVDQELDINRLSDYDVDHIVPQSFLKDDSIDNKVLTRSDKARGKSDNVPSEEVVKKMKNYWRQLLNAKLITQRKFDNLTKAERGGLSELDKAGFIKRQLVETRQITKHVAQILDSRMNTKYDENDKLIREVKVITLKSKLVSDFRKDFQFYKVREINNYHHAHDAYLNAVVGTALIKKYPKLESEFVYGDYKVYDVRKMIAKSEQEIGKATAKYFFYSNIMNFFKTEITLANGEIRKRPLIETNGETGEIVWDKGRDFATVRKVLSMPQVNIVKKTEVQTGGFSKESILPKRNSDKLIARKKDWDPKKYGGFDSPTVAYSVLVVAKVEKGKSKKLKSVKELLGITIMERSSFEKNPIDFLEAKGYKEVKKDLIIKLPKYSLFELENGRKRMLASAGELQKGNELALPSKYVNFLYLASHYEKLKGSPEDNEQKQLFVEQHKHYLDEIIEQISEFSKRVILADANLDKVLSAYNKHRDKPIREQAENIIHLFTLTNLGAPAAFKYFDTTIDRKRYTSTKEVLDATLIHQSITGLYETRIDLSQLGGDGGEAAAKEAAAKEAAAKEAAAKEAAAKGGTVSLQDEHRLFDIPVTTSLPDVWLQDFPQAWAETGGLGRAKCQAPIIIDLKPTAVPVSIKQYPMSLEAHMGIRQHIIKFLELGVLRPCRSPWNTPLLPVKKPGTQDYRPVQDLREINKRTVDIHPTVPNPYNLLSTLKPDYSWYTVLDLKDAFFCLPLAPQSQELFAFEWKDPERGISGQLTWTRLPQGFKNSPTLFNEALHRDLTDFRTQHPEVTLLQYVDDLLLAAPTKKACTQGTRHLLQELGEKGYRASAKKAQICQTKVTYLGYILSEGKRWLTPGRIETVARIPPPRNPREVREFLGKAGFCRLFIPGFAELAAPLYALTKPSTPFTWQTEHQLAFEALKKALLSAPALGLPDTSKPFTLFLDERQGIAKGVLTQKLGPWKRPVAYLSKKLDPVAAGWPPCLRIMAATAMLVKDSAKLTLGQPLTVITPHTLEAIVRQPPDRWITNARLTHYQALLLDTDRVQFGPPVTLNPATLLPVPENQPSPHDCRQVLAETHGTREDLKDQELPDADHTWYTDGSSYLDSGTRRAGAAVVDGHNTIWAQSLPPGTSAQKAELIALTKALELSKGKKANIYTDSRYAFATAHTHGSIYERRGWLTSEGKEIKNKAEIIALLKALFLPQEVAIIHCPGHQKGQDPVAVGNRQADRVARQAAMAEVLTLATEPDNTSHITAGKRTADGSEFEKRTADGSEFESPKKKAKVE

SEQ ID NO: 1947 - protein, 2106 aa, synthetic construct
MPAAKRVKLDGGDKKYSIGLDIGTNSVGWAVITDEYKVPSKKFKVLGNTDRHSIKKNLIGALLFDSGETAEATRLKRTARRRYTRRKNRICYLQEIFSNEMAKVDDSFFHRLEESFLVEEDKKHERHPIFGNIVDEVAYHEKYPTIYHLRKKLVDSTDKADLRLIYLALAHMIKFRGHFLIEGDLNPDNSDVDKLFIQLVQTYNQLFEENPINASGVDAKAILSARLSKSRRLENLIAQLPGEKKNGLFGNLIALSLGLTPNFKSNFDLAEDAKLQLSKDTYDDDLDNLLAQIGDQYADLFLAAKNLSDAILLSDILRVNTEITKAPLSASMIKRYDEHHQDLTLLKALVRQQLPEKYKEIFFDQSKNGYAGYIDGGASQEEFYKFIKPILEKMDGTEELLVKLNREDLLRKQRTFDNGSIPHQIHLGELHAILRRQEDFYPFLKDNREKIEKILTFRIPYYVGPLARGNSRFAWMTRKSEETITPWNFEEVVDKGASAQSFIERMTNFDKNLPNEKVLPKHSLLYEYFTVYNELTKVKYVTEGMRKPAFLSGEQKKAIVDLLFKTNRKVTVKQLKEDYFKKIECFDSVEISGVEDRFNASLGTYHDLLKIIKDKDFLDNEENEDILEDIVLTLTLFEDREMIEERLKTYAHLFDDKVMKQLKRRRYTGWGRLSRKLINGIRDKQSGKTILDFLKSDGFANRNFMQLIHDDSLTFKEDIQKAQVSGQGDSLHEHIANLAGSPAIKKGILQTVKVVDELVKVMGRHKPENIVIEMARENQTTQKGQKNSRERMKRIEEGIKELGSQILKEHPVENTQLQNEKLYLYYLQNGRDMYVDQELDINRLSDYDVDHIVPQSFLKDDSIDNKVLTRSDKARGKSDNVPSEEVVKKMKNYWRQLLNAKLITQRKFDNLTKAERGGLSELDKAGFIKRQLVETRQITKHVAQILDSRMNTKYDENDKLIREVKVITLKSKLVSDFRKDFQFYKVREINNYHHAHDAYLNAVVGTALIKKYPKLESEFVYGDYKVYDVRKMIAKSEQEIGKATAKYFFYSNIMNFFKTEITLANGEIRKRPLIETNGETGEIVWDKGRDFATVRKVLSMPQVNIVKKTEVQTGGFSKESILPKRNSDKLIARKKDWDPKKYGGFDSPTVAYSVLVVAKVEKGKSKKLKSVKELLGITIMERSSFEKNPIDFLEAKGYKEVKKDLIIKLPKYSLFELENGRKRMLASAGELQKGNELALPSKYVNFLYLASHYEKLKGSPEDNEQKQLFVEQHKHYLDEIIEQISEFSKRVILADANLDKVLSAYNKHRDKPIREQAENIIHLFTLTNLGAPAAFKYFDTTIDRKRYTSTKEVLDATLIHQSITGLYETRIDLSQLGGDGGEAAAKGGGGSEAAAKGGTVSLQDEHRLFDIPVTTSLPDVWLQDFPQAWAETGGLGRAKCQAPIIIDLKPTAVPVSIKQYPMSLEAHMGIRQHIIKFLELGVLRPCRSPWNTPLLPVKKPGTQDYRPVQDLREINKRTVDIHPTVPNPYNLLSTLKPDYSWYTVLDLKDAFFCLPLAPQSQELFAFEWKDPERGISGQLTWTRLPQGFKNSPTLFNEALHRDLTDFRTQHPEVTLLQYVDDLLLAAPTKKACTQGTRHLLQELGEKGYRASAKKAQICQTKVTYLGYILSEGKRWLTPGRIETVARIPPPRNPREVREFLGKAGFCRLFIPGFAELAAPLYALTKPSTPFTWQTEHQLAFEALKKALLSAPALGLPDTSKPFTLFLDERQGIAKGVLTQKLGPWKRPVAYLSKKLDPVAAGWPPCLRIMAATAMLVKDSAKLTLGQPLTVITPHTLEAIVRQPPDRWITNARLTHYQALLLDTDRVQFGPPVTLNPATLLPVPENQPSPHDCRQVLAETHGTREDLKDQELPDADHTWYTDGSSYLDSGTRRAGAAVVDGHNTIWAQSLPPGTSAQKAELIALTKALELSKGKKANIYTDSRYAFATAHTHGSIYERRGWLTSEGKEIKNKAEIIALLKALFLPQEVAIIHCPGHQKGQDPVAVGNRQADRVARQAAMAEVLTLATEPDNTSHITAGKRTADGSEFEKRTADGSEFESPKKKAKVE

SEQ ID NO: 1948 - protein, 2106 aa, synthetic construct
MPAAKRVKLDGGDKKYSIGLDIGTNSVGWAVITDEYKVPSKKFKVLGNTDRHSIKKNLIGALLFDSGETAEATRLKRTARRRYTRRKNRICYLQEIFSNEMAKVDDSFFHRLEESFLVEEDKKHERHPIFGNIVDEVAYHEKYPTIYHLRKKLVDSTDKADLRLIYLALAHMIKFRGHFLIEGDLNPDNSDVDKLFIQLVQTYNQLFEENPINASGVDAKAILSARLSKSRRLENLIAQLPGEKKNGLFGNLIALSLGLTPNFKSNFDLAEDAKLQLSKDTYDDDLDNLLAQIGDQYADLFLAAKNLSDAILLSDILRVNTEITKAPLSASMIKRYDEHHQDLTLLKALVRQQLPEKYKEIFFDQSKNGYAGYIDGGASQEEFYKFIKPILEKMDGTEELLVKLNREDLLRKQRTFDNGSIPHQIHLGELHAILRRQEDFYPFLKDNREKIEKILTFRIPYYVGPLARGNSRFAWMTRKSEETITPWNFEEVVDKGASAQSFIERMTNFDKNLPNEKVLPKHSLLYEYFTVYNELTKVKYVTEGMRKPAFLSGEQKKAIVDLLFKTNRKVTVKQLKEDYFKKIECFDSVEISGVEDRFNASLGTYHDLLKIIKDKDFLDNEENEDILEDIVLTLTLFEDREMIEERLKTYAHLFDDKVMKQLKRRRYTGWGRLSRKLINGIRDKQSGKTILDFLKSDGFANRNFMQLIHDDSLTFKEDIQKAQVSGQGDSLHEHIANLAGSPAIKKGILQTVKVVDELVKVMGRHKPENIVIEMARENQTTQKGQKNSRERMKRIEEGIKELGSQILKEHPVENTQLQNEKLYLYYLQNGRDMYVDQELDINRLSDYDVDHIVPQSFLKDDSIDNKVLTRSDKARGKSDNVPSEEVVKKMKNYWRQLLNAKLITQRKFDNLTKAERGGLSELDKAGFIKRQLVETRQITKHVAQILDSRMNTKYDENDKLIREVKVITLKSKLVSDFRKDFQFYKVREINNYHHAHDAYLNAVVGTALIKKYPKLESEFVYGDYKVYDVRKMIAKSEQEIGKATAKYFFYSNIMNFFKTEITLANGEIRKRPLIETNGETGEIVWDKGRDFATVRKVLSMPQVNIVKKTEVQTGGFSKESILPKRNSDKLIARKKDWDPKKYGGFDSPTVAYSVLVVAKVEKGKSKKLKSVKELLGITIMERSSFEKNPIDFLEAKGYKEVKKDLIIKLPKYSLFELENGRKRMLASAGELQKGNELALPSKYVNFLYLASHYEKLKGSPEDNEQKQLFVEQHKHYLDEIIEQISEFSKRVILADANLDKVLSAYNKHRDKPIREQAENIIHLFTLTNLGAPAAFKYFDTTIDRKRYTSTKEVLDATLIHQSITGLYETRIDLSQLGGDGGGSSGSSGSSGSSGSSGGTVSLQDEHRLFDIPVTTSLPDVWLQDFPQAWAETGGLGRAKCQAPIIIDLKPTAVPVSIKQYPMSLEAHMGIRQHIIKFLELGVLRPCRSPWNTPLLPVKKPGTQDYRPVQDLREINKRTVDIHPTVPNPYNLLSTLKPDYSWYTVLDLKDAFFCLPLAPQSQELFAFEWKDPERGISGQLTWTRLPQGFKNSPTLFNEALHRDLTDFRTQHPEVTLLQYVDDLLLAAPTKKACTQGTRHLLQELGEKGYRASAKKAQICQTKVTYLGYILSEGKRWLTPGRIETVARIPPPRNPREVREFLGKAGFCRLFIPGFAELAAPLYALTKPSTPFTWQTEHQLAFEALKKALLSAPALGLPDTSKPFTLFLDERQGIAKGVLTQKLGPWKRPVAYLSKKLDPVAAGWPPCLRIMAATAMLVKDSAKLTLGQPLTVITPHTLEAIVRQPPDRWITNARLTHYQALLLDTDRVQFGPPVTLNPATLLPVPENQPSPHDCRQVLAETHGTREDLKDQELPDADHTWYTDGSSYLDSGTRRAGAAVVDGHNTIWAQSLPPGTSAQKAELIALTKALELSKGKKANIYTDSRYAFATAHTHGSIYERRGWLTSEGKEIKNKAEIIALLKALFLPQEVAIIHCPGHQKGQDPVAVGNRQADRVARQAAMAEVLTLATEPDNTSHITAGKRTADGSEFEKRTADGSEFESPKKKAKVE

SEQ ID NO: 1949 - protein, 2106 aa, synthetic construct
MPAAKRVKLDGGDKKYSIGLDIGTNSVGWAVITDEYKVPSKKFKVLGNTDRHSIKKNLIGALLFDSGETAEATRLKRTARRRYTRRKNRICYLQEIFSNEMAKVDDSFFHRLEESFLVEEDKKHERHPIFGNIVDEVAYHEKYPTIYHLRKKLVDSTDKADLRLIYLALAHMIKFRGHFLIEGDLNPDNSDVDKLFIQLVQTYNQLFEENPINASGVDAKAILSARLSKSRRLENLIAQLPGEKKNGLFGNLIALSLGLTPNFKSNFDLAEDAKLQLSKDTYDDDLDNLLAQIGDQYADLFLAAKNLSDAILLSDILRVNTEITKAPLSASMIKRYDEHHQDLTLLKALVRQQLPEKYKEIFFDQSKNGYAGYIDGGASQEEFYKFIKPILEKMDGTEELLVKLNREDLLRKQRTFDNGSIPHQIHLGELHAILRRQEDFYPFLKDNREKIEKILTFRIPYYVGPLARGNSRFAWMTRKSEETITPWNFEEVVDKGASAQSFIERMTNFDKNLPNEKVLPKHSLLYEYFTVYNELTKVKYVTEGMRKPAFLSGEQKKAIVDLLFKTNRKVTVKQLKEDYFKKIECFDSVEISGVEDRFNASLGTYHDLLKIIKDKDFLDNEENEDILEDIVLTLTLFEDREMIEERLKTYAHLFDDKVMKQLKRRRYTGWGRLSRKLINGIRDKQSGKTILDFLKSDGFANRNFMQLIHDDSLTFKEDIQKAQVSGQGDSLHEHIANLAGSPAIKKGILQTVKVVDELVKVMGRHKPENIVIEMARENQTTQKGQKNSRERMKRIEEGIKELGSQILKEHPVENTQLQNEKLYLYYLQNGRDMYVDQELDINRLSDYDVDHIVPQSFLKDDSIDNKVLTRSDKARGKSDNVPSEEVVKKMKNYWRQLLNAKLITQRKFDNLTKAERGGLSELDKAGFIKRQLVETRQITKHVAQILDSRMNTKYDENDKLIREVKVITLKSKLVSDFRKDFQFYKVREINNYHHAHDAYLNAVVGTALIKKYPKLESEFVYGDYKVYDVRKMIAKSEQEIGKATAKYFFYSNIMNFFKTEITLANGEIRKRPLIETNGETGEIVWDKGRDFATVRKVLSMPQVNIVKKTEVQTGGFSKESILPKRNSDKLIARKKDWDPKKYGGFDSPTVAYSVLVVAKVEKGKSKKLKSVKELLGITIMERSSFEKNPIDFLEAKGYKEVKKDLIIKLPKYSLFELENGRKRMLASAGELQKGNELALPSKYVNFLYLASHYEKLKGSPEDNEQKQLFVEQHKHYLDEIIEQISEFSKRVILADANLDKVLSAYNKHRDKPIREQAENIIHLFTLTNLGAPAAFKYFDTTIDRKRYTSTKEVLDATLIHQSITGLYETRIDLSQLGGDGGGGGGSEAAAKGGGGSGGTVSLQDEHRLFDIPVTTSLPDVWLQDFPQAWAETGGLGRAKCQAPIIIDLKPTAVPVSIKQYPMSLEAHMGIRQHIIKFLELGVLRPCRSPWNTPLLPVKKPGTQDYRPVQDLREINKRTVDIHPTVPNPYNLLSTLKPDYSWYTVLDLKDAFFCLPLAPQSQELFAFEWKDPERGISGQLTWTRLPQGFKNSPTLFNEALHRDLTDFRTQHPEVTLLQYVDDLLLAAPTKKACTQGTRHLLQELGEKGYRASAKKAQICQTKVTYLGYILSEGKRWLTPGRIETVARIPPPRNPREVREFLGKAGFCRLFIPGFAELAAPLYALTKPSTPFTWQTEHQLAFEALKKALLSAPALGLPDTSKPFTLFLDERQGIAKGVLTQKLGPWKRPVAYLSKKLDPVAAGWPPCLRIMAATAMLVKDSAKLTLGQPLTVITPHTLEAIVRQPPDRWITNARLTHYQALLLDTDRVQFGPPVTLNPATLLPVPENQPSPHDCRQVLAETHGTREDLKDQELPDADHTWYTDGSSYLDSGTRRAGAAVVDGHNTIWAQSLPPGTSAQKAELIALTKALELSKGKKANIYTDSRYAFATAHTHGSIYERRGWLTSEGKEIKNKAEIIALLKALFLPQEVAIIHCPGHQKGQDPVAVGNRQADRVARQAAMAEVLTLATEPDNTSHITAGKRTADGSEFEKRTADGSEFESPKKKAKVE

SEQ ID NO: 1950 - protein, 2097 aa, synthetic construct
MPAAKRVKLDGGDKKYSIGLDIGTNSVGWAVITDEYKVPSKKFKVLGNTDRHSIKKNLIGALLFDSGETAEATRLKRTARRRYTRRKNRICYLQEIFSNEMAKVDDSFFHRLEESFLVEEDKKHERHPIFGNIVDEVAYHEKYPTIYHLRKKLVDSTDKADLRLIYLALAHMIKFRGHFLIEGDLNPDNSDVDKLFIQLVQTYNQLFEENPINASGVDAKAILSARLSKSRRLENLIAQLPGEKKNGLFGNLIALSLGLTPNFKSNFDLAEDAKLQLSKDTYDDDLDNLLAQIGDQYADLFLAAKNLSDAILLSDILRVNTEITKAPLSASMIKRYDEHHQDLTLLKALVRQQLPEKYKEIFFDQSKNGYAGYIDGGASQEEFYKFIKPILEKMDGTEELLVKLNREDLLRKQRTFDNGSIPHQIHLGELHAILRRQEDFYPFLKDNREKIEKILTFRIPYYVGPLARGNSRFAWMTRKSEETITPWNFEEVVDKGASAQSFIERMTNFDKNLPNEKVLPKHSLLYEYFTVYNELTKVKYVTEGMRKPAFLSGEQKKAIVDLLFKTNRKVTVKQLKEDYFKKIECFDSVEISGVEDRFNASLGTYHDLLKIIKDKDFLDNEENEDILEDIVLTLTLFEDREMIEERLKTYAHLFDDKVMKQLKRRRYTGWGRLSRKLINGIRDKQSGKTILDFLKSDGFANRNFMQLIHDDSLTFKEDIQKAQVSGQGDSLHEHIANLAGSPAIKKGILQTVKVVDELVKVMGRHKPENIVIEMARENQTTQKGQKNSRERMKRIEEGIKELGSQILKEHPVENTQLQNEKLYLYYLQNGRDMYVDQELDINRLSDYDVDHIVPQSFLKDDSIDNKVLTRSDKARGKSDNVPSEEVVKKMKNYWRQLLNAKLITQRKFDNLTKAERGGLSELDKAGFIKRQLVETRQITKHVAQILDSRMNTKYDENDKLIREVKVITLKSKLVSDFRKDFQFYKVREINNYHHAHDAYLNAVVGTALIKKYPKLESEFVYGDYKVYDVRKMIAKSEQEIGKATAKYFFYSNIMNFFKTEITLANGEIRKRPLIETNGETGEIVWDKGRDFATVRKVLSMPQVNIVKKTEVQTGGFSKESILPKRNSDKLIARKKDWDPKKYGGFDSPTVAYSVLVVAKVEKGKSKKLKSVKELLGITIMERSSFEKNPIDFLEAKGYKEVKKDLIIKLPKYSLFELENGRKRMLASAGELQKGNELALPSKYVNFLYLASHYEKLKGSPEDNEQKQLFVEQHKHYLDEIIEQISEFSKRVILADANLDKVLSAYNKHRDKPIREQAENIIHLFTLTNLGAPAAFKYFDTTIDRKRYTSTKEVLDATLIHQSITGLYETRIDLSQLGGDGGGGGGSSGGTVSLQDEHRLFDIPVTTSLPDVWLQDFPQAWAETGGLGRAKCQAPIIIDLKPTAVPVSIKQYPMSLEAHMGIRQHIIKFLELGVLRPCRSPWNTPLLPVKKPGTQDYRPVQDLREINKRTVDIHPTVPNPYNLLSTLKPDYSWYTVLDLKDAFFCLPLAPQSQELFAFEWKDPERGISGQLTWTRLPQGFKNSPTLFNEALHRDLTDFRTQHPEVTLLQYVDDLLLAAPTKKACTQGTRHLLQELGEKGYRASAKKAQICQTKVTYLGYILSEGKRWLTPGRIETVARIPPPRNPREVREFLGKAGFCRLFIPGFAELAAPLYALTKPSTPFTWQTEHQLAFEALKKALLSAPALGLPDTSKPFTLFLDERQGIAKGVLTQKLGPWKRPVAYLSKKLDPVAAGWPPCLRIMAATAMLVKDSAKLTLGQPLTVITPHTLEAIVRQPPDRWITNARLTHYQALLLDTDRVQFGPPVTLNPATLLPVPENQPSPHDCRQVLAETHGTREDLKDQELPDADHTWYTDGSSYLDSGTRRAGAAVVDGHNTIWAQSLPPGTSAQKAELIALTKALELSKGKKANIYTDSRYAFATAHTHGSIYERRGWLTSEGKEIKNKAEIIALLKALFLPQEVAIIHCPGHQKGQDPVAVGNRQADRVARQAAMAEVLTLATEPDNTSHITAGKRTADGSEFEKRTADGSEFESPKKKAKVE

SEQ ID NO: 1951 - protein, 2102 aa, synthetic construct
MPAAKRVKLDGGDKKYSIGLDIGTNSVGWAVITDEYKVPSKKFKVLGNTDRHSIKKNLIGALLFDSGETAEATRLKRTARRRYTRRKNRICYLQEIFSNEMAKVDDSFFHRLEESFLVEEDKKHERHPIFGNIVDEVAYHEKYPTIYHLRKKLVDSTDKADLRLIYLALAHMIKFRGHFLIEGDLNPDNSDVDKLFIQLVQTYNQLFEENPINASGVDAKAILSARLSKSRRLENLIAQLPGEKKNGLFGNLIALSLGLTPNFKSNFDLAEDAKLQLSKDTYDDDLDNLLAQIGDQYADLFLAAKNLSDAILLSDILRVNTEITKAPLSASMIKRYDEHHQDLTLLKALVRQQLPEKYKEIFFDQSKNGYAGYIDGGASQEEFYKFIKPILEKMDGTEELLVKLNREDLLRKQRTFDNGSIPHQIHLGELHAILRRQEDFYPFLKDNREKIEKILTFRIPYYVGPLARGNSRFAWMTRKSEETITPWNFEEVVDKGASAQSFIERMTNFDKNLPNEKVLPKHSLLYEYFTVYNELTKVKYVTEGMRKPAFLSGEQKKAIVDLLFKTNRKVTVKQLKEDYFKKIECFDSVEISGVEDRFNASLGTYHDLLKIIKDKDFLDNEENEDILEDIVLTLTLFEDREMIEERLKTYAHLFDDKVMKQLKRRRYTGWGRLSRKLINGIRDKQSGKTILDFLKSDGFANRNFMQLIHDDSLTFKEDIQKAQVSGQGDSLHEHIANLAGSPAIKKGILQTVKVVDELVKVMGRHKPENIVIEMARENQTTQKGQKNSRERMKRIEEGIKELGSQILKEHPVENTQLQNEKLYLYYLQNGRDMYVDQELDINRLSDYDVDHIVPQSFLKDDSIDNKVLTRSDKARGKSDNVPSEEVVKKMKNYWRQLLNAKLITQRKFDNLTKAERGGLSELDKAGFIKRQLVETRQITKHVAQILDSRMNTKYDENDKLIREVKVITLKSKLVSDFRKDFQFYKVREINNYHHAHDAYLNAVVGTALIKKYPKLESEFVYGDYKVYDVRKMIAKSEQEIGKATAKYFFYSNIMNFFKTEITLANGEIRKRPLIETNGETGEIVWDKGRDFATVRKVLSMPQVNIVKKTEVQTGGFSKESILPKRNSDKLIARKKDWDPKKYGGFDSPTVAYSVLVVAKVEKGKSKKLKSVKELLGITIMERSSFEKNPIDFLEAKGYKEVKKDLIIKLPKYSLFELENGRKRMLASAGELQKGNELALPSKYVNFLYLASHYEKLKGSPEDNEQKQLFVEQHKHYLDEIIEQISEFSKRVILADANLDKVLSAYNKHRDKPIREQAENIIHLFTLTNLGAPAAFKYFDTTIDRKRYTSTKEVLDATLIHQSITGLYETRIDLSQLGGDGGGGSGSSEAAAKGGTVSLQDEHRLFDIPVTTSLPDVWLQDFPQAWAETGGLGRAKCQAPIIIDLKPTAVPVSIKQYPMSLEAHMGIRQHIIKFLELGVLRPCRSPWNTPLLPVKKPGTQDYRPVQDLREINKRTVDIHPTVPNPYNLLSTLKPDYSWYTVLDLKDAFFCLPLAPQSQELFAFEWKDPERGISGQLTWTRLPQGFKNSPTLFNEALHRDLTDFRTQHPEVTLLQYVDDLLLAAPTKKACTQGTRHLLQELGEKGYRASAKKAQICQTKVTYLGYILSEGKRWLTPGRIETVARIPPPRNPREVREFLGKAGFCRLFIPGFAELAAPLYALTKPSTPFTWQTEHQLAFEALKKALLSAPALGLPDTSKPFTLFLDERQGIAKGVLTQKLGPWKRPVAYLSKKLDPVAAGWPPCLRIMAATAMLVKDSAKLTLGQPLTVITPHTLEAIVRQPPDRWITNARLTHYQALLLDTDRVQFGPPVTLNPATLLPVPENQPSPHDCRQVLAETHGTREDLKDQELPDADHTWYTDGSSYLDSGTRRAGAAVVDGHNTIWAQSLPPGTSAQKAELIALTKALELSKGKKANIYTDSRYAFATAHTHGSIYERRGWLTSEGKEIKNKAEIIALLKALFLPQEVAIIHCPGHQKGQDPVAVGNRQADRVARQAAMAEVLTLATEPDNTSHITAGKRTADGSEFEKRTADGSEFESPKKKAKVE

SEQ ID NO: 1952 - protein, 2102 aa, synthetic construct
MPAAKRVKLDGGDKKYSIGLDIGTNSVGWAVITDEYKVPSKKFKVLGNTDRHSIKKNLIGALLFDSGETAEATRLKRTARRRYTRRKNRICYLQEIFSNEMAKVDDSFFHRLEESFLVEEDKKHERHPIFGNIVDEVAYHEKYPTIYHLRKKLVDSTDKADLRLIYLALAHMIKFRGHFLIEGDLNPDNSDVDKLFIQLVQTYNQLFEENPINASGVDAKAILSARLSKSRRLENLIAQLPGEKKNGLFGNLIALSLGLTPNFKSNFDLAEDAKLQLSKDTYDDDLDNLLAQIGDQYADLFLAAKNLSDAILLSDILRVNTEITKAPLSASMIKRYDEHHQDLTLLKALVRQQLPEKYKEIFFDQSKNGYAGYIDGGASQEEFYKFIKPILEKMDGTEELLVKLNREDLLRKQRTFDNGSIPHQIHLGELHAILRRQEDFYPFLKDNREKIEKILTFRIPYYVGPLARGNSRFAWMTRKSEETITPWNFEEVVDKGASAQSFIERMTNFDKNLPNEKVLPKHSLLYEYFTVYNELTKVKYVTEGMRKPAFLSGEQKKAIVDLLFKTNRKVTVKQLKEDYFKKIECFDSVEISGVEDRFNASLGTYHDLLKIIKDKDFLDNEENEDILEDIVLTLTLFEDREMIEERLKTYAHLFDDKVMKQLKRRRYTGWGRLSRKLINGIRDKQSGKTILDFLKSDGFANRNFMQLIHDDSLTFKEDIQKAQVSGQGDSLHEHIANLAGSPAIKKGILQTVKVVDELVKVMGRHKPENIVIEMARENQTTQKGQKNSRERMKRIEEGIKELGSQILKEHPVENTQLQNEKLYLYYLQNGRDMYVDQELDINRLSDYDVDHIVPQSFLKDDSIDNKVLTRSDKARGKSDNVPSEEVVKKMKNYWRQLLNAKLITQRKFDNLTKAERGGLSELDKAGFIKRQLVETRQITKHVAQILDSRMNTKYDENDKLIREVKVITLKSKLVSDFRKDFQFYKVREINNYHHAHDAYLNAVVGTALIKKYPKLESEFVYGDYKVYDVRKMIAKSEQEIGKATAKYFFYSNIMNFFKTEITLANGEIRKRPLIETNGETGEIVWDKGRDFATVRKVLSMPQVNIVKKTEVQTGGFSKESILPKRNSDKLIARKKDWDPKKYGGFDSPTVAYSVLVVAKVEKGKSKKLKSVKELLGITIMERSSFEKNPIDFLEAKGYKEVKKDLIIKLPKYSLFELENGRKRMLASAGELQKGNELALPSKYVNFLYLASHYEKLKGSPEDNEQKQLFVEQHKHYLDEIIEQISEFSKRVILADANLDKVLSAYNKHRDKPIREQAENIIHLFTLTNLGAPAAFKYFDTTIDRKRYTSTKEVLDATLIHQSITGLYETRIDLSQLGGDGGGSSGGGEAAAKGGTVSLQDEHRLFDIPVTTSLPDVWLQDFPQAWAETGGLGRAKCQAPIIIDLKPTAVPVSIKQYPMSLEAHMGIRQHIIKFLELGVLRPCRSPWNTPLLPVKKPGTQDYRPVQDLREINKRTVDIHPTVPNPYNLLSTLKPDYSWYTVLDLKDAFFCLPLAPQSQELFAFEWKDPERGISGQLTWTRLPQGFKNSPTLFNEALHRDLTDFRTQHPEVTLLQYVDDLLLAAPTKKACTQGTRHLLQELGEKGYRASAKKAQICQTKVTYLGYILSEGKRWLTPGRIETVARIPPPRNPREVREFLGKAGFCRLFIPGFAELAAPLYALTKPSTPFTWQTEHQLAFEALKKALLSAPALGLPDTSKPFTLFLDERQGIAKGVLTQKLGPWKRPVAYLSKKLDPVAAGWPPCLRIMAATAMLVKDSAKLTLGQPLTVITPHTLEAIVRQPPDRWITNARLTHYQALLLDTDRVQFGPPVTLNPATLLPVPENQPSPHDCRQVLAETHGTREDLKDQELPDADHTWYTDGSSYLDSGTRRAGAAVVDGHNTIWAQSLPPGTSAQKAELIALTKALELSKGKKANIYTDSRYAFATAHTHGSIYERRGWLTSEGKEIKNKAEIIALLKALFLPQEVAIIHCPGHQKGQDPVAVGNRQADRVARQAAMAEVLTLATEPDNTSHITAGKRTADGSEFEKRTADGSEFESPKKKAKVE

SEQ ID NO: 1953 - protein, 2098 aa, synthetic construct
MPAAKRVKLDGGDKKYSIGLDIGTNSVGWAVITDEYKVPSKKFKVLGNTDRHSIKKNLIGALLFDSGETAEATRLKRTARRRYTRRKNRICYLQEIFSNEMAKVDDSFFHRLEESFLVEEDKKHERHPIFGNIVDEVAYHEKYPTIYHLRKKLVDSTDKADLRLIYLALAHMIKFRGHFLIEGDLNPDNSDVDKLFIQLVQTYNQLFEENPINASGVDAKAILSARLSKSRRLENLIAQLPGEKKNGLFGNLIALSLGLTPNFKSNFDLAEDAKLQLSKDTYDDDLDNLLAQIGDQYADLFLAAKNLSDAILLSDILRVNTEITKAPLSASMIKRYDEHHQDLTLLKALVRQQLPEKYKEIFFDQSKNGYAGYIDGGASQEEFYKFIKPILEKMDGTEELLVKLNREDLLRKQRTFDNGSIPHQIHLGELHAILRRQEDFYPFLKDNREKIEKILTFRIPYYVGPLARGNSRFAWMTRKSEETITPWNFEEVVDKGASAQSFIERMTNFDKNLPNEKVLPKHSLLYEYFTVYNELTKVKYVTEGMRKPAFLSGEQKKAIVDLLFKTNRKVTVKQLKEDYFKKIECFDSVEISGVEDRFNASLGTYHDLLKIIKDKDFLDNEENEDILEDIVLTLTLFEDREMIEERLKTYAHLFDDKVMKQLKRRRYTGWGRLSRKLINGIRDKQSGKTILDFLKSDGFANRNFMQLIHDDSLTFKEDIQKAQVSGQGDSLHEHIANLAGSPAIKKGILQTVKVVDELVKVMGRHKPENIVIEMARENQTTQKGQKNSRERMKRIEEGIKELGSQILKEHPVENTQLQNEKLYLYYLQNGRDMYVDQELDINRLSDYDVDHIVPQSFLKDDSIDNKVLTRSDKARGKSDNVPSEEVVKKMKNYWRQLLNAKLITQRKFDNLTKAERGGLSELDKAGFIKRQLVETRQITKHVAQILDSRMNTKYDENDKLIREVKVITLKSKLVSDFRKDFQFYKVREINNYHHAHDAYLNAVVGTALIKKYPKLESEFVYGDYKVYDVRKMIAKSEQEIGKATAKYFFYSNIMNFFKTEITLANGEIRKRPLIETNGETGEIVWDKGRDFATVRKVLSMPQVNIVKKTEVQTGGFSKESILPKRNSDKLIARKKDWDPKKYGGFDSPTVAYSVLVVAKVEKGKSKKLKSVKELLGITIMERSSFEKNPIDFLEAKGYKEVKKDLIIKLPKYSLFELENGRKRMLASAGELQKGNELALPSKYVNFLYLASHYEKLKGSPEDNEQKQLFVEQHKHYLDEIIEQISEFSKRVILADANLDKVLSAYNKHRDKPIREQAENIIHLFTLTNLGAPAAFKYFDTTIDRKRYTSTKEVLDATLIHQSITGLYETRIDLSQLGGDGGPAPAPAPGGTVSLQDEHRLFDIPVTTSLPDVWLQDFPQAWAETGGLGRAKCQAPIIIDLKPTAVPVSIKQYPMSLEAHMGIRQHIIKFLELGVLRPCRSPWNTPLLPVKKPGTQDYRPVQDLREINKRTVDIHPTVPNPYNLLSTLKPDYSWYTVLDLKDAFFCLPLAPQSQELFAFEWKDPERGISGQLTWTRLPQGFKNSPTLFNEALHRDLTDFRTQHPEVTLLQYVDDLLLAAPTKKACTQGTRHLLQELGEKGYRASAKKAQICQTKVTYLGYILSEGKRWLTPGRIETVARIPPPRNPREVREFLGKAGFCRLFIPGFAELAAPLYALTKPSTPFTWQTEHQLAFEALKKALLSAPALGLPDTSKPFTLFLDERQGIAKGVLTQKLGPWKRPVAYLSKKLDPVAAGWPPCLRIMAATAMLVKDSAKLTLGQPLTVITPHTLEAIVRQPPDRWITNARLTHYQALLLDTDRVQFGPPVTLNPATLLPVPENQPSPHDCRQVLAETHGTREDLKDQELPDADHTWYTDGSSYLDSGTRRAGAAVVDGHNTIWAQSLPPGTSAQKAELIALTKALELSKGKKANIYTDSRYAFATAHTHGSIYERRGWLTSEGKEIKNKAEIIALLKALFLPQEVAIIHCPGHQKGQDPVAVGNRQADRVARQAAMAEVLTLATEPDNTSHITAGKRTADGSEFEKRTADGSEFESPKKKAKVE

SEQ ID NO: 1954 - protein, 2102 aa, synthetic construct
MPAAKRVKLDGGDKKYSIGLDIGTNSVGWAVITDEYKVPSKKFKVLGNTDRHSIKKNLIGALLFDSGETAEATRLKRTARRRYTRRKNRICYLQEIFSNEMAKVDDSFFHRLEESFLVEEDKKHERHPIFGNIVDEVAYHEKYPTIYHLRKKLVDSTDKADLRLIYLALAHMIKFRGHFLIEGDLNPDNSDVDKLFIQLVQTYNQLFEENPINASGVDAKAILSARLSKSRRLENLIAQLPGEKKNGLFGNLIALSLGLTPNFKSNFDLAEDAKLQLSKDTYDDDLDNLLAQIGDQYADLFLAAKNLSDAILLSDILRVNTEITKAPLSASMIKRYDEHHQDLTLLKALVRQQLPEKYKEIFFDQSKNGYAGYIDGGASQEEFYKFIKPILEKMDGTEELLVKLNREDLLRKQRTFDNGSIPHQIHLGELHAILRRQEDFYPFLKDNREKIEKILTFRIPYYVGPLARGNSRFAWMTRKSEETITPWNFEEVVDKGASAQSFIERMTNFDKNLPNEKVLPKHSLLYEYFTVYNELTKVKYVTEGMRKPAFLSGEQKKAIVDLLFKTNRKVTVKQLKEDYFKKIECFDSVEISGVEDRFNASLGTYHDLLKIIKDKDFLDNEENEDILEDIVLTLTLFEDREMIEERLKTYAHLFDDKVMKQLKRRRYTGWGRLSRKLINGIRDKQSGKTILDFLKSDGFANRNFMQLIHDDSLTFKEDIQKAQVSGQGDSLHEHIANLAGSPAIKKGILQTVKVVDELVKVMGRHKPENIVIEMARENQTTQKGQKNSRERMKRIEEGIKELGSQILKEHPVENTQLQNEKLYLYYLQNGRDMYVDQELDINRLSDYDVDHIVPQSFLKDDSIDNKVLTRSDKARGKSDNVPSEEVVKKMKNYWRQLLNAKLITQRKFDNLTKAERGGLSELDKAGFIKRQLVETRQITKHVAQILDSRMNTKYDENDKLIREVKVITLKSKLVSDFRKDFQFYKVREINNYHHAHDAYLNAVVGTALIKKYPKLESEFVYGDYKVYDVRKMIAKSEQEIGKATAKYFFYSNIMNFFKTEITLANGEIRKRPLIETNGETGEIVWDKGRDFATVRKVLSMPQVNIVKKTEVQTGGFSKESILPKRNSDKLIARKKDWDPKKYGGFDSPTVAYSVLVVAKVEKGKSKKLKSVKELLGITIMERSSFEKNPIDFLEAKGYKEVKKDLIIKLPKYSLFELENGRKRMLASAGELQKGNELALPSKYVNFLYLASHYEKLKGSPEDNEQKQLFVEQHKHYLDEIIEQISEFSKRVILADANLDKVLSAYNKHRDKPIREQAENIIHLFTLTNLGAPAAFKYFDTTIDRKRYTSTKEVLDATLIHQSITGLYETRIDLSQLGGDGGGGSPAPEAAAKGGTVSLQDEHRLFDIPVTTSLPDVWLQDFPQAWAETGGLGRAKCQAPIIIDLKPTAVPVSIKQYPMSLEAHMGIRQHIIKFLELGVLRPCRSPWNTPLLPVKKPGTQDYRPVQDLREINKRTVDIHPTVPNPYNLLSTLKPDYSWYTVLDLKDAFFCLPLAPQSQELFAFEWKDPERGISGQLTWTRLPQGFKNSPTLFNEALHRDLTDFRTQHPEVTLLQYVDDLLLAAPTKKACTQGTRHLLQELGEKGYRASAKKAQICQTKVTYLGYILSEGKRWLTPGRIETVARIPPPRNPREVREFLGKAGFCRLFIPGFAELAAPLYALTKPSTPFTWQTEHQLAFEALKKALLSAPALGLPDTSKPFTLFLDERQGIAKGVLTQKLGPWKRPVAYLSKKLDPVAAGWPPCLRIMAATAMLVKDSAKLTLGQPLTVITPHTLEAIVRQPPDRWITNARLTHYQALLLDTDRVQFGPPVTLNPATLLPVPENQPSPHDCRQVLAETHGTREDLKDQELPDADHTWYTDGSSYLDSGTRRAGAAVVDGHNTIWAQSLPPGTSAQKAELIALTKALELSKGKKANIYTDSRYAFATAHTHGSIYERRGWLTSEGKEIKNKAEIIALLKALFLPQEVAIIHCPGHQKGQDPVAVGNRQADRVARQAAMAEVLTLATEPDNTSHITAGKRTADGSEFEKRTADGSEFESPKKKAKVE

SEQ ID NO: 1955 - protein, 2103 aa, synthetic construct
MPAAKRVKLDGGDKKYSIGLDIGTNSVGWAVITDEYKVPSKKFKVLGNTDRHSIKKNLIGALLFDSGETAEATRLKRTARRRYTRRKNRICYLQEIFSNEMAKVDDSFFHRLEESFLVEEDKKHERHPIFGNIVDEVAYHEKYPTIYHLRKKLVDSTDKADLRLIYLALAHMIKFRGHFLIEGDLNPDNSDVDKLFIQLVQTYNQLFEENPINASGVDAKAILSARLSKSRRLENLIAQLPGEKKNGLFGNLIALSLGLTPNFKSNFDLAEDAKLQLSKDTYDDDLDNLLAQIGDQYADLFLAAKNLSDAILLSDILRVNTEITKAPLSASMIKRYDEHHQDLTLLKALVRQQLPEKYKEIFFDQSKNGYAGYIDGGASQEEFYKFIKPILEKMDGTEELLVKLNREDLLRKQRTFDNGSIPHQIHLGELHAILRRQEDFYPFLKDNREKIEKILTFRIPYYVGPLARGNSRFAWMTRKSEETITPWNFEEVVDKGASAQSFIERMTNFDKNLPNEKVLPKHSLLYEYFTVYNELTKVKYVTEGMRKPAFLSGEQKKAIVDLLFKTNRKVTVKQLKEDYFKKIECFDSVEISGVEDRFNASLGTYHDLLKIIKDKDFLDNEENEDILEDIVLTLTLFEDREMIEERLKTYAHLFDDKVMKQLKRRRYTGWGRLSRKLINGIRDKQSGKTILDFLKSDGFANRNFMQLIHDDSLTFKEDIQKAQVSGQGDSLHEHIANLAGSPAIKKGILQTVKVVDELVKVMGRHKPENIVIEMARENQTTQKGQKNSRERMKRIEEGIKELGSQILKEHPVENTQLQNEKLYLYYLQNGRDMYVDQELDINRLSDYDVDHIVPQSFLKDDSIDNKVLTRSDKARGKSDNVPSEEVVKKMKNYWRQLLNAKLITQRKFDNLTKAERGGLSELDKAGFIKRQLVETRQITKHVAQILDSRMNTKYDENDKLIREVKVITLKSKLVSDFRKDFQFYKVREINNYHHAHDAYLNAVVGTALIKKYPKLESEFVYGDYKVYDVRKMIAKSEQEIGKATAKYFFYSNIMNFFKTEITLANGEIRKRPLIETNGETGEIVWDKGRDFATVRKVLSMPQVNIVKKTEVQTGGFSKESILPKRNSDKLIARKKDWDPKKYGGFDSPTVAYSVLVVAKVEKGKSKKLKSVKELLGITIMERSSFEKNPIDFLEAKGYKEVKKDLIIKLPKYSLFELENGRKRMLASAGELQKGNELALPSKYVNFLYLASHYEKLKGSPEDNEQKQLFVEQHKHYLDEIIEQISEFSKRVILADANLDKVLSAYNKHRDKPIREQAENIIHLFTLTNLGAPAAFKYFDTTIDRKRYTSTKEVLDATLIHQSITGLYETRIDLSQLGGDGGGGSGGSGGSGGSGGTVSLQDEHRLFDIPVTTSLPDVWLQDFPQAWAETGGLGRAKCQAPIIIDLKPTAVPVSIKQYPMSLEAHMGIRQHIIKFLELGVLRPCRSPWNTPLLPVKKPGTQDYRPVQDLREINKRTVDIHPTVPNPYNLLSTLKPDYSWYTVLDLKDAFFCLPLAPQSQELFAFEWKDPERGISGQLTWTRLPQGFKNSPTLFNEALHRDLTDFRTQHPEVTLLQYVDDLLLAAPTKKACTQGTRHLLQELGEKGYRASAKKAQICQTKVTYLGYILSEGKRWLTPGRIETVARIPPPRNPREVREFLGKAGFCRLFIPGFAELAAPLYALTKPSTPFTWQTEHQLAFEALKKALLSAPALGLPDTSKPFTLFLDERQGIAKGVLTQKLGPWKRPVAYLSKKLDPVAAGWPPCLRIMAATAMLVKDSAKLTLGQPLTVITPHTLEAIVRQPPDRWITNARLTHYQALLLDTDRVQFGPPVTLNPATLLPVPENQPSPHDCRQVLAETHGTREDLKDQELPDADHTWYTDGSSYLDSGTRRAGAAVVDGHNTIWAQSLPPGTSAQKAELIALTKALELSKGKKANIYTDSRYAFATAHTHGSIYERRGWLTSEGKEIKNKAEIIALLKALFLPQEVAIIHCPGHQKGQDPVAVGNRQADRVARQAAMAEVLTLATEPDNTSHITAGKRTADGSEFEKRTADGSEFESPKKKAKVE

SEQ ID NO: 1956 - protein, 2097 aa, synthetic construct
MPAAKRVKLDGGDKKYSIGLDIGTNSVGWAVITDEYKVPSKKFKVLGNTDRHSIKKNLIGALLFDSGETAEATRLKRTARRRYTRRKNRICYLQEIFSNEMAKVDDSFFHRLEESFLVEEDKKHERHPIFGNIVDEVAYHEKYPTIYHLRKKLVDSTDKADLRLIYLALAHMIKFRGHFLIEGDLNPDNSDVDKLFIQLVQTYNQLFEENPINASGVDAKAILSARLSKSRRLENLIAQLPGEKKNGLFGNLIALSLGLTPNFKSNFDLAEDAKLQLSKDTYDDDLDNLLAQIGDQYADLFLAAKNLSDAILLSDILRVNTEITKAPLSASMIKRYDEHHQDLTLLKALVRQQLPEKYKEIFFDQSKNGYAGYIDGGASQEEFYKFIKPILEKMDGTEELLVKLNREDLLRKQRTFDNGSIPHQIHLGELHAILRRQEDFYPFLKDNREKIEKILTFRIPYYVGPLARGNSRFAWMTRKSEETITPWNFEEVVDKGASAQSFIERMTNFDKNLPNEKVLPKHSLLYEYFTVYNELTKVKYVTEGMRKPAFLSGEQKKAIVDLLFKTNRKVTVKQLKEDYFKKIECFDSVEISGVEDRFNASLGTYHDLLKIIKDKDFLDNEENEDILEDIVLTLTLFEDREMIEERLKTYAHLFDDKVMKQLKRRRYTGWGRLSRKLINGIRDKQSGKTILDFLKSDGFANRNFMQLIHDDSLTFKEDIQKAQVSGQGDSLHEHIANLAGSPAIKKGILQTVKVVDELVKVMGRHKPENIVIEMARENQTTQKGQKNSRERMKRIEEGIKELGSQILKEHPVENTQLQNEKLYLYYLQNGRDMYVDQELDINRLSDYDVDHIVPQSFLKDDSIDNKVLTRSDKARGKSDNVPSEEVVKKMKNYWRQLLNAKLITQRKFDNLTKAERGGLSELDKAGFIKRQLVETRQITKHVAQILDSRMNTKYDENDKLIREVKVITLKSKLVSDFRKDFQFYKVREINNYHHAHDAYLNAVVGTALIKKYPKLESEFVYGDYKVYDVRKMIAKSEQEIGKATAKYFFYSNIMNFFKTEITLANGEIRKRPLIETNGETGEIVWDKGRDFATVRKVLSMPQVNIVKKTEVQTGGFSKESILPKRNSDKLIARKKDWDPKKYGGFDSPTVAYSVLVVAKVEKGKSKKLKSVKELLGITIMERSSFEKNPIDFLEAKGYKEVKKDLIIKLPKYSLFELENGRKRMLASAGELQKGNELALPSKYVNFLYLASHYEKLKGSPEDNEQKQLFVEQHKHYLDEIIEQISEFSKRVILADANLDKVLSAYNKHRDKPIREQAENIIHLFTLTNLGAPAAFKYFDTTIDRKRYTSTKEVLDATLIHQSITGLYETRIDLSQLGGDGGGGGGGGGGTVSLQDEHRLFDIPVTTSLPDVWLQDFPQAWAETGGLGRAKCQAPIIIDLKPTAVPVSIKQYPMSLEAHMGIRQHIIKFLELGVLRPCRSPWNTPLLPVKKPGTQDYRPVQDLREINKRTVDIHPTVPNPYNLLSTLKPDYSWYTVLDLKDAFFCLPLAPQSQELFAFEWKDPERGISGQLTWTRLPQGFKNSPTLFNEALHRDLTDFRTQHPEVTLLQYVDDLLLAAPTKKACTQGTRHLLQELGEKGYRASAKKAQICQTKVTYLGYILSEGKRWLTPGRIETVARIPPPRNPREVREFLGKAGFCRLFIPGFAELAAPLYALTKPSTPFTWQTEHQLAFEALKKALLSAPALGLPDTSKPFTLFLDERQGIAKGVLTQKLGPWKRPVAYLSKKLDPVAAGWPPCLRIMAATAMLVKDSAKLTLGQPLTVITPHTLEAIVRQPPDRWITNARLTHYQALLLDTDRVQFGPPVTLNPATLLPVPENQPSPHDCRQVLAETHGTREDLKDQELPDADHTWYTDGSSYLDSGTRRAGAAVVDGHNTIWAQSLPPGTSAQKAELIALTKALELSKGKKANIYTDSRYAFATAHTHGSIYERRGWLTSEGKEIKNKAEIIALLKALFLPQEVAIIHCPGHQKGQDPVAVGNRQADRVARQAAMAEVLTLATEPDNTSHITAGKRTADGSEFEKRTADGSEFESPKKKAKVE

SEQ ID NO: 1957 - protein, 2109 aa, synthetic construct
MPAAKRVKLDGGDKKYSIGLDIGTNSVGWAVITDEYKVPSKKFKVLGNTDRHSIKKNLIGALLFDSGETAEATRLKRTARRRYTRRKNRICYLQEIFSNEMAKVDDSFFHRLEESFLVEEDKKHERHPIFGNIVDEVAYHEKYPTIYHLRKKLVDSTDKADLRLIYLALAHMIKFRGHFLIEGDLNPDNSDVDKLFIQLVQTYNQLFEENPINASGVDAKAILSARLSKSRRLENLIAQLPGEKKNGLFGNLIALSLGLTPNFKSNFDLAEDAKLQLSKDTYDDDLDNLLAQIGDQYADLFLAAKNLSDAILLSDILRVNTEITKAPLSASMIKRYDEHHQDLTLLKALVRQQLPEKYKEIFFDQSKNGYAGYIDGGASQEEFYKFIKPILEKMDGTEELLVKLNREDLLRKQRTFDNGSIPHQIHLGELHAILRRQEDFYPFLKDNREKIEKILTFRIPYYVGPLARGNSRFAWMTRKSEETITPWNFEEVVDKGASAQSFIERMTNFDKNLPNEKVLPKHSLLYEYFTVYNELTKVKYVTEGMRKPAFLSGEQKKAIVDLLFKTNRKVTVKQLKEDYFKKIECFDSVEISGVEDRFNASLGTYHDLLKIIKDKDFLDNEENEDILEDIVLTLTLFEDREMIEERLKTYAHLFDDKVMKQLKRRRYTGWGRLSRKLINGIRDKQSGKTILDFLKSDGFANRNFMQLIHDDSLTFKEDIQKAQVSGQGDSLHEHIANLAGSPAIKKGILQTVKVVDELVKVMGRHKPENIVIEMARENQTTQKGQKNSRERMKRIEEGIKELGSQILKEHPVENTQLQNEKLYLYYLQNGRDMYVDQELDINRLSDYDVDHIVPQSFLKDDSIDNKVLTRSDKARGKSDNVPSEEVVKKMKNYWRQLLNAKLITQRKFDNLTKAERGGLSELDKAGFIKRQLVETRQITKHVAQILDSRMNTKYDENDKLIREVKVITLKSKLVSDFRKDFQFYKVREINNYHHAHDAYLNAVVGTALIKKYPKLESEFVYGDYKVYDVRKMIAKSEQEIGKATAKYFFYSNIMNFFKTEITLANGEIRKRPLIETNGETGEIVWDKGRDFATVRKVLSMPQVNIVKKTEVQTGGFSKESILPKRNSDKLIARKKDWDPKKYGGFDSPTVAYSVLVVAKVEKGKSKKLKSVKELLGITIMERSSFEKNPIDFLEAKGYKEVKKDLIIKLPKYSLFELENGRKRMLASAGELQKGNELALPSKYVNFLYLASHYEKLKGSPEDNEQKQLFVEQHKHYLDEIIEQISEFSKRVILADANLDKVLSAYNKHRDKPIREQAENIIHLFTLTNLGAPAAFKYFDTTIDRKRYTSTKEVLDATLIHQSITGLYETRIDLSQLGGDGGGGSGGSGGSGGSGGSGGSGGTVSLQDEHRLFDIPVTTSLPDVWLQDFPQAWAETGGLGRAKCQAPIIIDLKPTAVPVSIKQYPMSLEAHMGIRQHIIKFLELGVLRPCRSPWNTPLLPVKKPGTQDYRPVQDLREINKRTVDIHPTVPNPYNLLSTLKPDYSWYTVLDLKDAFFCLPLAPQSQELFAFEWKDPERGISGQLTWTRLPQGFKNSPTLFNEALHRDLTDFRTQHPEVTLLQYVDDLLLAAPTKKACTQGTRHLLQELGEKGYRASAKKAQICQTKVTYLGYILSEGKRWLTPGRIETVARIPPPRNPREVREFLGKAGFCRLFIPGFAELAAPLYALTKPSTPFTWQTEHQLAFEALKKALLSAPALGLPDTSKPFTLFLDERQGIAKGVLTQKLGPWKRPVAYLSKKLDPVAAGWPPCLRIMAATAMLVKDSAKLTLGQPLTVITPHTLEAIVRQPPDRWITNARLTHYQALLLDTDRVQFGPPVTLNPATLLPVPENQPSPHDCRQVLAETHGTREDLKDQELPDADHTWYTDGSSYLDSGTRRAGAAVVDGHNTIWAQSLPPGTSAQKAELIALTKALELSKGKKANIYTDSRYAFATAHTHGSIYERRGWLTSEGKEIKNKAEIIALLKALFLPQEVAIIHCPGHQKGQDPVAVGNRQADRVARQAAMAEVLTLATEPDNTSHITAGKRTADGSEFEKRTADGSEFESPKKKAKVE

SEQ ID NO: 1958 - protein, 2100 aa, synthetic construct
MPAAKRVKLDGGDKKYSIGLDIGTNSVGWAVITDEYKVPSKKFKVLGNTDRHSIKKNLIGALLFDSGETAEATRLKRTARRRYTRRKNRICYLQEIFSNEMAKVDDSFFHRLEESFLVEEDKKHERHPIFGNIVDEVAYHEKYPTIYHLRKKLVDSTDKADLRLIYLALAHMIKFRGHFLIEGDLNPDNSDVDKLFIQLVQTYNQLFEENPINASGVDAKAILSARLSKSRRLENLIAQLPGEKKNGLFGNLIALSLGLTPNFKSNFDLAEDAKLQLSKDTYDDDLDNLLAQIGDQYADLFLAAKNLSDAILLSDILRVNTEITKAPLSASMIKRYDEHHQDLTLLKALVRQQLPEKYKEIFFDQSKNGYAGYIDGGASQEEFYKFIKPILEKMDGTEELLVKLNREDLLRKQRTFDNGSIPHQIHLGELHAILRRQEDFYPFLKDNREKIEKILTFRIPYYVGPLARGNSRFAWMTRKSEETITPWNFEEVVDKGASAQSFIERMTNFDKNLPNEKVLPKHSLLYEYFTVYNELTKVKYVTEGMRKPAFLSGEQKKAIVDLLFKTNRKVTVKQLKEDYFKKIECFDSVEISGVEDRFNASLGTYHDLLKIIKDKDFLDNEENEDILEDIVLTLTLFEDREMIEERLKTYAHLFDDKVMKQLKRRRYTGWGRLSRKLINGIRDKQSGKTILDFLKSDGFANRNFMQLIHDDSLTFKEDIQKAQVSGQGDSLHEHIANLAGSPAIKKGILQTVKVVDELVKVMGRHKPENIVIEMARENQTTQKGQKNSRERMKRIEEGIKELGSQILKEHPVENTQLQNEKLYLYYLQNGRDMYVDQELDINRLSDYDVDHIVPQSFLKDDSIDNKVLTRSDKARGKSDNVPSEEVVKKMKNYWRQLLNAKLITQRKFDNLTKAERGGLSELDKAGFIKRQLVETRQITKHVAQILDSRMNTKYDENDKLIREVKVITLKSKLVSDFRKDFQFYKVREINNYHHAHDAYLNAVVGTALIKKYPKLESEFVYGDYKVYDVRKMIAKSEQEIGKATAKYFFYSNIMNFFKTEITLANGEIRKRPLIETNGETGEIVWDKGRDFATVRKVLSMPQVNIVKKTEVQTGGFSKESILPKRNSDKLIARKKDWDPKKYGGFDSPTVAYSVLVVAKVEKGKSKKLKSVKELLGITIMERSSFEKNPIDFLEAKGYKEVKKDLIIKLPKYSLFELENGRKRMLASAGELQKGNELALPSKYVNFLYLASHYEKLKGSPEDNEQKQLFVEQHKHYLDEIIEQISEFSKRVILADANLDKVLSAYNKHRDKPIREQAENIIHLFTLTNLGAPAAFKYFDTTIDRKRYTSTKEVLDATLIHQSITGLYETRIDLSQLGGDGGGGSGSSPAPGGTVSLQDEHRLFDIPVTTSLPDVWLQDFPQAWAETGGLGRAKCQAPIIIDLKPTAVPVSIKQYPMSLEAHMGIRQHIIKFLELGVLRPCRSPWNTPLLPVKKPGTQDYRPVQDLREINKRTVDIHPTVPNPYNLLSTLKPDYSWYTVLDLKDAFFCLPLAPQSQELFAFEWKDPERGISGQLTWTRLPQGFKNSPTLFNEALHRDLTDFRTQHPEVTLLQYVDDLLLAAPTKKACTQGTRHLLQELGEKGYRASAKKAQICQTKVTYLGYILSEGKRWLTPGRIETVARIPPPRNPREVREFLGKAGFCRLFIPGFAELAAPLYALTKPSTPFTWQTEHQLAFEALKKALLSAPALGLPDTSKPFTLFLDERQGIAKGVLTQKLGPWKRPVAYLSKKLDPVAAGWPPCLRIMAATAMLVKDSAKLTLGQPLTVITPHTLEAIVRQPPDRWITNARLTHYQALLLDTDRVQFGPPVTLNPATLLPVPENQPSPHDCRQVLAETHGTREDLKDQELPDADHTWYTDGSSYLDSGTRRAGAAVVDGHNTIWAQSLPPGTSAQKAELIALTKALELSKGKKANIYTDSRYAFATAHTHGSIYERRGWLTSEGKEIKNKAEIIALLKALFLPQEVAIIHCPGHQKGQDPVAVGNRQADRVARQAAMAEVLTLATEPDNTSHITAGKRTADGSEFEKRTADGSEFESPKKKAKVE

SEQ ID NO: 1959 - protein, 2102 aa, synthetic construct
MPAAKRVKLDGGDKKYSIGLDIGTNSVGWAVITDEYKVPSKKFKVLGNTDRHSIKKNLIGALLFDSGETAEATRLKRTARRRYTRRKNRICYLQEIFSNEMAKVDDSFFHRLEESFLVEEDKKHERHPIFGNIVDEVAYHEKYPTIYHLRKKLVDSTDKADLRLIYLALAHMIKFRGHFLIEGDLNPDNSDVDKLFIQLVQTYNQLFEENPINASGVDAKAILSARLSKSRRLENLIAQLPGEKKNGLFGNLIALSLGLTPNFKSNFDLAEDAKLQLSKDTYDDDLDNLLAQIGDQYADLFLAAKNLSDAILLSDILRVNTEITKAPLSASMIKRYDEHHQDLTLLKALVRQQLPEKYKEIFFDQSKNGYAGYIDGGASQEEFYKFIKPILEKMDGTEELLVKLNREDLLRKQRTFDNGSIPHQIHLGELHAILRRQEDFYPFLKDNREKIEKILTFRIPYYVGPLARGNSRFAWMTRKSEETITPWNFEEVVDKGASAQSFIERMTNFDKNLPNEKVLPKHSLLYEYFTVYNELTKVKYVTEGMRKPAFLSGEQKKAIVDLLFKTNRKVTVKQLKEDYFKKIECFDSVEISGVEDRFNASLGTYHDLLKIIKDKDFLDNEENEDILEDIVLTLTLFEDREMIEERLKTYAHLFDDKVMKQLKRRRYTGWGRLSRKLINGIRDKQSGKTILDFLKSDGFANRNFMQLIHDDSLTFKEDIQKAQVSGQGDSLHEHIANLAGSPAIKKGILQTVKVVDELVKVMGRHKPENIVIEMARENQTTQKGQKNSRERMKRIEEGIKELGSQILKEHPVENTQLQNEKLYLYYLQNGRDMYVDQELDINRLSDYDVDHIVPQSFLKDDSIDNKVLTRSDKARGKSDNVPSEEVVKKMKNYWRQLLNAKLITQRKFDNLTKAERGGLSELDKAGFIKRQLVETRQITKHVAQILDSRMNTKYDENDKLIREVKVITLKSKLVSDFRKDFQFYKVREINNYHHAHDAYLNAVVGTALIKKYPKLESEFVYGDYKVYDVRKMIAKSEQEIGKATAKYFFYSNIMNFFKTEITLANGEIRKRPLIETNGETGEIVWDKGRDFATVRKVLSMPQVNIVKKTEVQTGGFSKESILPKRNSDKLIARKKDWDPKKYGGFDSPTVAYSVLVVAKVEKGKSKKLKSVKELLGITIMERSSFEKNPIDFLEAKGYKEVKKDLIIKLPKYSLFELENGRKRMLASAGELQKGNELALPSKYVNFLYLASHYEKLKGSPEDNEQKQLFVEQHKHYLDEIIEQISEFSKRVILADANLDKVLSAYNKHRDKPIREQAENIIHLFTLTNLGAPAAFKYFDTTIDRKRYTSTKEVLDATLIHQSITGLYETRIDLSQLGGDGGGSSEAAAKGGSGGTVSLQDEHRLFDIPVTTSLPDVWLQDFPQAWAETGGLGRAKCQAPIIIDLKPTAVPVSIKQYPMSLEAHMGIRQHIIKFLELGVLRPCRSPWNTPLLPVKKPGTQDYRPVQDLREINKRTVDIHPTVPNPYNLLSTLKPDYSWYTVLDLKDAFFCLPLAPQSQELFAFEWKDPERGISGQLTWTRLPQGFKNSPTLFNEALHRDLTDFRTQHPEVTLLQYVDDLLLAAPTKKACTQGTRHLLQELGEKGYRASAKKAQICQTKVTYLGYILSEGKRWLTPGRIETVARIPPPRNPREVREFLGKAGFCRLFIPGFAELAAPLYALTKPSTPFTWQTEHQLAFEALKKALLSAPALGLPDTSKPFTLFLDERQGIAKGVLTQKLGPWKRPVAYLSKKLDPVAAGWPPCLRIMAATAMLVKDSAKLTLGQPLTVITPHTLEAIVRQPPDRWITNARLTHYQALLLDTDRVQFGPPVTLNPATLLPVPENQPSPHDCRQVLAETHGTREDLKDQELPDADHTWYTDGSSYLDSGTRRAGAAVVDGHNTIWAQSLPPGTSAQKAELIALTKALELSKGKKANIYTDSRYAFATAHTHGSIYERRGWLTSEGKEIKNKAEIIALLKALFLPQEVAIIHCPGHQKGQDPVAVGNRQADRVARQAAMAEVLTLATEPDNTSHITAGKRTADGSEFEKRTADGSEFESPKKKAKVE

SEQ ID NO: 1960 - protein, 2099 aa, synthetic construct
MPAAKRVKLDGGDKKYSIGLDIGTNSVGWAVITDEYKVPSKKFKVLGNTDRHSIKKNLIGALLFDSGETAEATRLKRTARRRYTRRKNRICYLQEIFSNEMAKVDDSFFHRLEESFLVEEDKKHERHPIFGNIVDEVAYHEKYPTIYHLRKKLVDSTDKADLRLIYLALAHMIKFRGHFLIEGDLNPDNSDVDKLFIQLVQTYNQLFEENPINASGVDAKAILSARLSKSRRLENLIAQLPGEKKNGLFGNLIALSLGLTPNFKSNFDLAEDAKLQLSKDTYDDDLDNLLAQIGDQYADLFLAAKNLSDAILLSDILRVNTEITKAPLSASMIKRYDEHHQDLTLLKALVRQQLPEKYKEIFFDQSKNGYAGYIDGGASQEEFYKFIKPILEKMDGTEELLVKLNREDLLRKQRTFDNGSIPHQIHLGELHAILRRQEDFYPFLKDNREKIEKILTFRIPYYVGPLARGNSRFAWMTRKSEETITPWNFEEVVDKGASAQSFIERMTNFDKNLPNEKVLPKHSLLYEYFTVYNELTKVKYVTEGMRKPAFLSGEQKKAIVDLLFKTNRKVTVKQLKEDYFKKIECFDSVEISGVEDRFNASLGTYHDLLKIIKDKDFLDNEENEDILEDIVLTLTLFEDREMIEERLKTYAHLFDDKVMKQLKRRRYTGWGRLSRKLINGIRDKQSGKTILDFLKSDGFANRNFMQLIHDDSLTFKEDIQKAQVSGQGDSLHEHIANLAGSPAIKKGILQTVKVVDELVKVMGRHKPENIVIEMARENQTTQKGQKNSRERMKRIEEGIKELGSQILKEHPVENTQLQNEKLYLYYLQNGRDMYVDQELDINRLSDYDVDHIVPQSFLKDDSIDNKVLTRSDKARGKSDNVPSEEVVKKMKNYWRQLLNAKLITQRKFDNLTKAERGGLSELDKAGFIKRQLVETRQITKHVAQILDSRMNTKYDENDKLIREVKVITLKSKLVSDFRKDFQFYKVREINNYHHAHDAYLNAVVGTALIKKYPKLESEFVYGDYKVYDVRKMIAKSEQEIGKATAKYFFYSNIMNFFKTEITLANGEIRKRPLIETNGETGEIVWDKGRDFATVRKVLSMPQVNIVKKTEVQTGGFSKESILPKRNSDKLIARKKDWDPKKYGGFDSPTVAYSVLVVAKVEKGKSKKLKSVKELLGITIMERSSFEKNPIDFLEAKGYKEVKKDLIIKLPKYSLFELENGRKRMLASAGELQKGNELALPSKYVNFLYLASHYEKLKGSPEDNEQKQLFVEQHKHYLDEIIEQISEFSKRVILADANLDKVLSAYNKHRDKPIREQAENIIHLFTLTNLGAPAAFKYFDTTIDRKRYTSTKEVLDATLIHQSITGLYETRIDLSQLGGDGGEAAAKPAPGGTVSLQDEHRLFDIPVTTSLPDVWLQDFPQAWAETGGLGRAKCQAPIIIDLKPTAVPVSIKQYPMSLEAHMGIRQHIIKFLELGVLRPCRSPWNTPLLPVKKPGTQDYRPVQDLREINKRTVDIHPTVPNPYNLLSTLKPDYSWYTVLDLKDAFFCLPLAPQSQELFAFEWKDPERGISGQLTWTRLPQGFKNSPTLFNEALHRDLTDFRTQHPEVTLLQYVDDLLLAAPTKKACTQGTRHLLQELGEKGYRASAKKAQICQTKVTYLGYILSEGKRWLTPGRIETVARIPPPRNPREVREFLGKAGFCRLFIPGFAELAAPLYALTKPSTPFTWQTEHQLAFEALKKALLSAPALGLPDTSKPFTLFLDERQGIAKGVLTQKLGPWKRPVAYLSKKLDPVAAGWPPCLRIMAATAMLVKDSAKLTLGQPLTVITPHTLEAIVRQPPDRWITNARLTHYQALLLDTDRVQFGPPVTLNPATLLPVPENQPSPHDCRQVLAETHGTREDLKDQELPDADHTWYTDGSSYLDSGTRRAGAAVVDGHNTIWAQSLPPGTSAQKAELIALTKALELSKGKKANIYTDSRYAFATAHTHGSIYERRGWLTSEGKEIKNKAEIIALLKALFLPQEVAIIHCPGHQKGQDPVAVGNRQADRVARQAAMAEVLTLATEPDNTSHITAGKRTADGSEFEKRTADGSEFESPKKKAKVE

SEQ ID NO: 1961 - protein, 2100 aa, synthetic construct
MPAAKRVKLDGGDKKYSIGLDIGTNSVGWAVITDEYKVPSKKFKVLGNTDRHSIKKNLIGALLFDSGETAEATRLKRTARRRYTRRKNRICYLQEIFSNEMAKVDDSFFHRLEESFLVEEDKKHERHPIFGNIVDEVAYHEKYPTIYHLRKKLVDSTDKADLRLIYLALAHMIKFRGHFLIEGDLNPDNSDVDKLFIQLVQTYNQLFEENPINASGVDAKAILSARLSKSRRLENLIAQLPGEKKNGLFGNLIALSLGLTPNFKSNFDLAEDAKLQLSKDTYDDDLDNLLAQIGDQYADLFLAAKNLSDAILLSDILRVNTEITKAPLSASMIKRYDEHHQDLTLLKALVRQQLPEKYKEIFFDQSKNGYAGYIDGGASQEEFYKFIKPILEKMDGTEELLVKLNREDLLRKQRTFDNGSIPHQIHLGELHAILRRQEDFYPFLKDNREKIEKILTFRIPYYVGPLARGNSRFAWMTRKSEETITPWNFEEVVDKGASAQSFIERMTNFDKNLPNEKVLPKHSLLYEYFTVYNELTKVKYVTEGMRKPAFLSGEQKKAIVDLLFKTNRKVTVKQLKEDYFKKIECFDSVEISGVEDRFNASLGTYHDLLKIIKDKDFLDNEENEDILEDIVLTLTLFEDREMIEERLKTYAHLFDDKVMKQLKRRRYTGWGRLSRKLINGIRDKQSGKTILDFLKSDGFANRNFMQLIHDDSLTFKEDIQKAQVSGQGDSLHEHIANLAGSPAIKKGILQTVKVVDELVKVMGRHKPENIVIEMARENQTTQKGQKNSRERMKRIEEGIKELGSQILKEHPVENTQLQNEKLYLYYLQNGRDMYVDQELDINRLSDYDVDHIVPQSFLKDDSIDNKVLTRSDKARGKSDNVPSEEVVKKMKNYWRQLLNAKLITQRKFDNLTKAERGGLSELDKAGFIKRQLVETRQITKHVAQILDSRMNTKYDENDKLIREVKVITLKSKLVSDFRKDFQFYKVREINNYHHAHDAYLNAVVGTALIKKYPKLESEFVYGDYKVYDVRKMIAKSEQEIGKATAKYFFYSNIMNFFKTEITLANGEIRKRPLIETNGETGEIVWDKGRDFATVRKVLSMPQVNIVKKTEVQTGGFSKESILPKRNSDKLIARKKDWDPKKYGGFDSPTVAYSVLVVAKVEKGKSKKLKSVKELLGITIMERSSFEKNPIDFLEAKGYKEVKKDLIIKLPKYSLFELENGRKRMLASAGELQKGNELALPSKYVNFLYLASHYEKLKGSPEDNEQKQLFVEQHKHYLDEIIEQISEFSKRVILADANLDKVLSAYNKHRDKPIREQAENIIHLFTLTNLGAPAAFKYFDTTIDRKRYTSTKEVLDATLIHQSITGLYETRIDLSQLGGDGGPAPGSSGGSGGTVSLQDEHRLFDIPVTTSLPDVWLQDFPQAWAETGGLGRAKCQAPIIIDLKPTAVPVSIKQYPMSLEAHMGIRQHIIKFLELGVLRPCRSPWNTPLLPVKKPGTQDYRPVQDLREINKRTVDIHPTVPNPYNLLSTLKPDYSWYTVLDLKDAFFCLPLAPQSQELFAFEWKDPERGISGQLTWTRLPQGFKNSPTLFNEALHRDLTDFRTQHPEVTLLQYVDDLLLAAPTKKACTQGTRHLLQELGEKGYRASAKKAQICQTKVTYLGYILSEGKRWLTPGRIETVARIPPPRNPREVREFLGKAGFCRLFIPGFAELAAPLYALTKPSTPFTWQTEHQLAFEALKKALLSAPALGLPDTSKPFTLFLDERQGIAKGVLTQKLGPWKRPVAYLSKKLDPVAAGWPPCLRIMAATAMLVKDSAKLTLGQPLTVITPHTLEAIVRQPPDRWITNARLTHYQALLLDTDRVQFGPPVTLNPATLLPVPENQPSPHDCRQVLAETHGTREDLKDQELPDADHTWYTDGSSYLDSGTRRAGAAVVDGHNTIWAQSLPPGTSAQKAELIALTKALELSKGKKANIYTDSRYAFATAHTHGSIYERRGWLTSEGKEIKNKAEIIALLKALFLPQEVAIIHCPGHQKGQDPVAVGNRQADRVARQAAMAEVLTLATEPDNTSHITAGKRTADGSEFEKRTADGSEFESPKKKAKVE

SEQ ID NO: 1962 - protein, 2100 aa, synthetic construct
MPAAKRVKLDGGDKKYSIGLDIGTNSVGWAVITDEYKVPSKKFKVLGNTDRHSIKKNLIGALLFDSGETAEATRLKRTARRRYTRRKNRICYLQEIFSNEMAKVDDSFFHRLEESFLVEEDKKHERHPIFGNIVDEVAYHEKYPTIYHLRKKLVDSTDKADLRLIYLALAHMIKFRGHFLIEGDLNPDNSDVDKLFIQLVQTYNQLFEENPINASGVDAKAILSARLSKSRRLENLIAQLPGEKKNGLFGNLIALSLGLTPNFKSNFDLAEDAKLQLSKDTYDDDLDNLLAQIGDQYADLFLAAKNLSDAILLSDILRVNTEITKAPLSASMIKRYDEHHQDLTLLKALVRQQLPEKYKEIFFDQSKNGYAGYIDGGASQEEFYKFIKPILEKMDGTEELLVKLNREDLLRKQRTFDNGSIPHQIHLGELHAILRRQEDFYPFLKDNREKIEKILTFRIPYYVGPLARGNSRFAWMTRKSEETITPWNFEEVVDKGASAQSFIERMTNFDKNLPNEKVLPKHSLLYEYFTVYNELTKVKYVTEGMRKPAFLSGEQKKAIVDLLFKTNRKVTVKQLKEDYFKKIECFDSVEISGVEDRFNASLGTYHDLLKIIKDKDFLDNEENEDILEDIVLTLTLFEDREMIEERLKTYAHLFDDKVMKQLKRRRYTGWGRLSRKLINGIRDKQSGKTILDFLKSDGFANRNFMQLIHDDSLTFKEDIQKAQVSGQGDSLHEHIANLAGSPAIKKGILQTVKVVDELVKVMGRHKPENIVIEMARENQTTQKGQKNSRERMKRIEEGIKELGSQILKEHPVENTQLQNEKLYLYYLQNGRDMYVDQELDINRLSDYDVDHIVPQSFLKDDSIDNKVLTRSDKARGKSDNVPSEEVVKKMKNYWRQLLNAKLITQRKFDNLTKAERGGLSELDKAGFIKRQLVETRQITKHVAQILDSRMNTKYDENDKLIREVKVITLKSKLVSDFRKDFQFYKVREINNYHHAHDAYLNAVVGTALIKKYPKLESEFVYGDYKVYDVRKMIAKSEQEIGKATAKYFFYSNIMNFFKTEITLANGEIRKRPLIETNGETGEIVWDKGRDFATVRKVLSMPQVNIVKKTEVQTGGFSKESILPKRNSDKLIARKKDWDPKKYGGFDSPTVAYSVLVVAKVEKGKSKKLKSVKELLGITIMERSSFEKNPIDFLEAKGYKEVKKDLIIKLPKYSLFELENGRKRMLASAGELQKGNELALPSKYVNFLYLASHYEKLKGSPEDNEQKQLFVEQHKHYLDEIIEQISEFSKRVILADANLDKVLSAYNKHRDKPIREQAENIIHLFTLTNLGAPAAFKYFDTTIDRKRYTSTKEVLDATLIHQSITGLYETRIDLSQLGGDGGGSSPAPGGGGGTVSLQDEHRLFDIPVTTSLPDVWLQDFPQAWAETGGLGRAKCQAPIIIDLKPTAVPVSIKQYPMSLEAHMGIRQHIIKFLELGVLRPCRSPWNTPLLPVKKPGTQDYRPVQDLREINKRTVDIHPTVPNPYNLLSTLKPDYSWYTVLDLKDAFFCLPLAPQSQELFAFEWKDPERGISGQLTWTRLPQGFKNSPTLFNEALHRDLTDFRTQHPEVTLLQYVDDLLLAAPTKKACTQGTRHLLQELGEKGYRASAKKAQICQTKVTYLGYILSEGKRWLTPGRIETVARIPPPRNPREVREFLGKAGFCRLFIPGFAELAAPLYALTKPSTPFTWQTEHQLAFEALKKALLSAPALGLPDTSKPFTLFLDERQGIAKGVLTQKLGPWKRPVAYLSKKLDPVAAGWPPCLRIMAATAMLVKDSAKLTLGQPLTVITPHTLEAIVRQPPDRWITNARLTHYQALLLDTDRVQFGPPVTLNPATLLPVPENQPSPHDCRQVLAETHGTREDLKDQELPDADHTWYTDGSSYLDSGTRRAGAAVVDGHNTIWAQSLPPGTSAQKAELIALTKALELSKGKKANIYTDSRYAFATAHTHGSIYERRGWLTSEGKEIKNKAEIIALLKALFLPQEVAIIHCPGHQKGQDPVAVGNRQADRVARQAAMAEVLTLATEPDNTSHITAGKRTADGSEFEKRTADGSEFESPKKKAKVE

SEQ ID NO: 1963 - protein, 2101 aa, synthetic construct
MPAAKRVKLDGGDKKYSIGLDIGTNSVGWAVITDEYKVPSKKFKVLGNTDRHSIKKNLIGALLFDSGETAEATRLKRTARRRYTRRKNRICYLQEIFSNEMAKVDDSFFHRLEESFLVEEDKKHERHPIFGNIVDEVAYHEKYPTIYHLRKKLVDSTDKADLRLIYLALAHMIKFRGHFLIEGDLNPDNSDVDKLFIQLVQTYNQLFEENPINASGVDAKAILSARLSKSRRLENLIAQLPGEKKNGLFGNLIALSLGLTPNFKSNFDLAEDAKLQLSKDTYDDDLDNLLAQIGDQYADLFLAAKNLSDAILLSDILRVNTEITKAPLSASMIKRYDEHHQDLTLLKALVRQQLPEKYKEIFFDQSKNGYAGYIDGGASQEEFYKFIKPILEKMDGTEELLVKLNREDLLRKQRTFDNGSIPHQIHLGELHAILRRQEDFYPFLKDNREKIEKILTFRIPYYVGPLARGNSRFAWMTRKSEETITPWNFEEVVDKGASAQSFIERMTNFDKNLPNEKVLPKHSLLYEYFTVYNELTKVKYVTEGMRKPAFLSGEQKKAIVDLLFKTNRKVTVKQLKEDYFKKIECFDSVEISGVEDRFNASLGTYHDLLKIIKDKDFLDNEENEDILEDIVLTLTLFEDREMIEERLKTYAHLFDDKVMKQLKRRRYTGWGRLSRKLINGIRDKQSGKTILDFLKSDGFANRNFMQLIHDDSLTFKEDIQKAQVSGQGDSLHEHIANLAGSPAIKKGILQTVKVVDELVKVMGRHKPENIVIEMARENQTTQKGQKNSRERMKRIEEGIKELGSQILKEHPVENTQLQNEKLYLYYLQNGRDMYVDQELDINRLSDYDVDHIVPQSFLKDDSIDNKVLTRSDKARGKSDNVPSEEVVKKMKNYWRQLLNAKLITQRKFDNLTKAERGGLSELDKAGFIKRQLVETRQITKHVAQILDSRMNTKYDENDKLIREVKVITLKSKLVSDFRKDFQFYKVREINNYHHAHDAYLNAVVGTALIKKYPKLESEFVYGDYKVYDVRKMIAKSEQEIGKATAKYFFYSNIMNFFKTEITLANGEIRKRPLIETNGETGEIVWDKGRDFATVRKVLSMPQVNIVKKTEVQTGGFSKESILPKRNSDKLIARKKDWDPKKYGGFDSPTVAYSVLVVAKVEKGKSKKLKSVKELLGITIMERSSFEKNPIDFLEAKGYKEVKKDLIIKLPKYSLFELENGRKRMLASAGELQKGNELALPSKYVNFLYLASHYEKLKGSPEDNEQKQLFVEQHKHYLDEIIEQISEFSKRVILADANLDKVLSAYNKHRDKPIREQAENIIHLFTLTNLGAPAAFKYFDTTIDRKRYTSTKEVLDATLIHQSITGLYETRIDLSQLGGDGGEAAAKEAAAKGGTVSLQDEHRLFDIPVTTSLPDVWLQDFPQAWAETGGLGRAKCQAPIIIDLKPTAVPVSIKQYPMSLEAHMGIRQHIIKFLELGVLRPCRSPWNTPLLPVKKPGTQDYRPVQDLREINKRTVDIHPTVPNPYNLLSTLKPDYSWYTVLDLKDAFFCLPLAPQSQELFAFEWKDPERGISGQLTWTRLPQGFKNSPTLFNEALHRDLTDFRTQHPEVTLLQYVDDLLLAAPTKKACTQGTRHLLQELGEKGYRASAKKAQICQTKVTYLGYILSEGKRWLTPGRIETVARIPPPRNPREVREFLGKAGFCRLFIPGFAELAAPLYALTKPSTPFTWQTEHQLAFEALKKALLSAPALGLPDTSKPFTLFLDERQGIAKGVLTQKLGPWKRPVAYLSKKLDPVAAGWPPCLRIMAATAMLVKDSAKLTLGQPLTVITPHTLEAIVRQPPDRWITNARLTHYQALLLDTDRVQFGPPVTLNPATLLPVPENQPSPHDCRQVLAETHGTREDLKDQELPDADHTWYTDGSSYLDSGTRRAGAAVVDGHNTIWAQSLPPGTSAQKAELIALTKALELSKGKKANIYTDSRYAFATAHTHGSIYERRGWLTSEGKEIKNKAEIIALLKALFLPQEVAIIHCPGHQKGQDPVAVGNRQADRVARQAAMAEVLTLATEPDNTSHITAGKRTADGSEFEKRTADGSEFESPKKKAKVE

SEQ ID NO: 1964 - protein, 2100 aa, synthetic construct
MPAAKRVKLDGGDKKYSIGLDIGTNSVGWAVITDEYKVPSKKFKVLGNTDRHSIKKNLIGALLFDSGETAEATRLKRTARRRYTRRKNRICYLQEIFSNEMAKVDDSFFHRLEESFLVEEDKKHERHPIFGNIVDEVAYHEKYPTIYHLRKKLVDSTDKADLRLIYLALAHMIKFRGHFLIEGDLNPDNSDVDKLFIQLVQTYNQLFEENPINASGVDAKAILSARLSKSRRLENLIAQLPGEKKNGLFGNLIALSLGLTPNFKSNFDLAEDAKLQLSKDTYDDDLDNLLAQIGDQYADLFLAAKNLSDAILLSDILRVNTEITKAPLSASMIKRYDEHHQDLTLLKALVRQQLPEKYKEIFFDQSKNGYAGYIDGGASQEEFYKFIKPILEKMDGTEELLVKLNREDLLRKQRTFDNGSIPHQIHLGELHAILRRQEDFYPFLKDNREKIEKILTFRIPYYVGPLARGNSRFAWMTRKSEETITPWNFEEVVDKGASAQSFIERMTNFDKNLPNEKVLPKHSLLYEYFTVYNELTKVKYVTEGMRKPAFLSGEQKKAIVDLLFKTNRKVTVKQLKEDYFKKIECFDSVEISGVEDRFNASLGTYHDLLKIIKDKDFLDNEENEDILEDIVLTLTLFEDREMIEERLKTYAHLFDDKVMKQLKRRRYTGWGRLSRKLINGIRDKQSGKTILDFLKSDGFANRNFMQLIHDDSLTFKEDIQKAQVSGQGDSLHEHIANLAGSPAIKKGILQTVKVVDELVKVMGRHKPENIVIEMARENQTTQKGQKNSRERMKRIEEGIKELGSQILKEHPVENTQLQNEKLYLYYLQNGRDMYVDQELDINRLSDYDVDHIVPQSFLKDDSIDNKVLTRSDKARGKSDNVPSEEVVKKMKNYWRQLLNAKLITQRKFDNLTKAERGGLSELDKAGFIKRQLVETRQITKHVAQILDSRMNTKYDENDKLIREVKVITLKSKLVSDFRKDFQFYKVREINNYHHAHDAYLNAVVGTALIKKYPKLESEFVYGDYKVYDVRKMIAKSEQEIGKATAKYFFYSNIMNFFKTEITLANGEIRKRPLIETNGETGEIVWDKGRDFATVRKVLSMPQVNIVKKTEVQTGGFSKESILPKRNSDKLIARKKDWDPKKYGGFDSPTVAYSVLVVAKVEKGKSKKLKSVKELLGITIMERSSFEKNPIDFLEAKGYKEVKKDLIIKLPKYSLFELENGRKRMLASAGELQKGNELALPSKYVNFLYLASHYEKLKGSPEDNEQKQLFVEQHKHYLDEIIEQISEFSKRVILADANLDKVLSAYNKHRDKPIREQAENIIHLFTLTNLGAPAAFKYFDTTIDRKRYTSTKEVLDATLIHQSITGLYETRIDLSQLGGDGGGGSPAPGSSGGTVSLQDEHRLFDIPVTTSLPDVWLQDFPQAWAETGGLGRAKCQAPIIIDLKPTAVPVSIKQYPMSLEAHMGIRQHIIKFLELGVLRPCRSPWNTPLLPVKKPGTQDYRPVQDLREINKRTVDIHPTVPNPYNLLSTLKPDYSWYTVLDLKDAFFCLPLAPQSQELFAFEWKDPERGISGQLTWTRLPQGFKNSPTLFNEALHRDLTDFRTQHPEVTLLQYVDDLLLAAPTKKACTQGTRHLLQELGEKGYRASAKKAQICQTKVTYLGYILSEGKRWLTPGRIETVARIPPPRNPREVREFLGKAGFCRLFIPGFAELAAPLYALTKPSTPFTWQTEHQLAFEALKKALLSAPALGLPDTSKPFTLFLDERQGIAKGVLTQKLGPWKRPVAYLSKKLDPVAAGWPPCLRIMAATAMLVKDSAKLTLGQPLTVITPHTLEAIVRQPPDRWITNARLTHYQALLLDTDRVQFGPPVTLNPATLLPVPENQPSPHDCRQVLAETHGTREDLKDQELPDADHTWYTDGSSYLDSGTRRAGAAVVDGHNTIWAQSLPPGTSAQKAELIALTKALELSKGKKANIYTDSRYAFATAHTHGSIYERRGWLTSEGKEIKNKAEIIALLKALFLPQEVAIIHCPGHQKGQDPVAVGNRQADRVARQAAMAEVLTLATEPDNTSHITAGKRTADGSEFEKRTADGSEFESPKKKAKVE

SEQ ID NO: 1965 - protein, 2099 aa, synthetic construct
MPAAKRVKLDGGDKKYSIGLDIGTNSVGWAVITDEYKVPSKKFKVLGNTDRHSIKKNLIGALLFDSGETAEATRLKRTARRRYTRRKNRICYLQEIFSNEMAKVDDSFFHRLEESFLVEEDKKHERHPIFGNIVDEVAYHEKYPTIYHLRKKLVDSTDKADLRLIYLALAHMIKFRGHFLIEGDLNPDNSDVDKLFIQLVQTYNQLFEENPINASGVDAKAILSARLSKSRRLENLIAQLPGEKKNGLFGNLIALSLGLTPNFKSNFDLAEDAKLQLSKDTYDDDLDNLLAQIGDQYADLFLAAKNLSDAILLSDILRVNTEITKAPLSASMIKRYDEHHQDLTLLKALVRQQLPEKYKEIFFDQSKNGYAGYIDGGASQEEFYKFIKPILEKMDGTEELLVKLNREDLLRKQRTFDNGSIPHQIHLGELHAILRRQEDFYPFLKDNREKIEKILTFRIPYYVGPLARGNSRFAWMTRKSEETITPWNFEEVVDKGASAQSFIERMTNFDKNLPNEKVLPKHSLLYEYFTVYNELTKVKYVTEGMRKPAFLSGEQKKAIVDLLFKTNRKVTVKQLKEDYFKKIECFDSVEISGVEDRFNASLGTYHDLLKIIKDKDFLDNEENEDILEDIVLTLTLFEDREMIEERLKTYAHLFDDKVMKQLKRRRYTGWGRLSRKLINGIRDKQSGKTILDFLKSDGFANRNFMQLIHDDSLTFKEDIQKAQVSGQGDSLHEHIANLAGSPAIKKGILQTVKVVDELVKVMGRHKPENIVIEMARENQTTQKGQKNSRERMKRIEEGIKELGSQILKEHPVENTQLQNEKLYLYYLQNGRDMYVDQELDINRLSDYDVDHIVPQSFLKDDSIDNKVLTRSDKARGKSDNVPSEEVVKKMKNYWRQLLNAKLITQRKFDNLTKAERGGLSELDKAGFIKRQLVETRQITKHVAQILDSRMNTKYDENDKLIREVKVITLKSKLVSDFRKDFQFYKVREINNYHHAHDAYLNAVVGTALIKKYPKLESEFVYGDYKVYDVRKMIAKSEQEIGKATAKYFFYSNIMNFFKTEITLANGEIRKRPLIETNGETGEIVWDKGRDFATVRKVLSMPQVNIVKKTEVQTGGFSKESILPKRNSDKLIARKKDWDPKKYGGFDSPTVAYSVLVVAKVEKGKSKKLKSVKELLGITIMERSSFEKNPIDFLEAKGYKEVKKDLIIKLPKYSLFELENGRKRMLASAGELQKGNELALPSKYVNFLYLASHYEKLKGSPEDNEQKQLFVEQHKHYLDEIIEQISEFSKRVILADANLDKVLSAYNKHRDKPIREQAENIIHLFTLTNLGAPAAFKYFDTTIDRKRYTSTKEVLDATLIHQSITGLYETRIDLSQLGGDGGGSSEAAAKGGTVSLQDEHRLFDIPVTTSLPDVWLQDFPQAWAETGGLGRAKCQAPIIIDLKPTAVPVSIKQYPMSLEAHMGIRQHIIKFLELGVLRPCRSPWNTPLLPVKKPGTQDYRPVQDLREINKRTVDIHPTVPNPYNLLSTLKPDYSWYTVLDLKDAFFCLPLAPQSQELFAFEWKDPERGISGQLTWTRLPQGFKNSPTLFNEALHRDLTDFRTQHPEVTLLQYVDDLLLAAPTKKACTQGTRHLLQELGEKGYRASAKKAQICQTKVTYLGYILSEGKRWLTPGRIETVARIPPPRNPREVREFLGKAGFCRLFIPGFAELAAPLYALTKPSTPFTWQTEHQLAFEALKKALLSAPALGLPDTSKPFTLFLDERQGIAKGVLTQKLGPWKRPVAYLSKKLDPVAAGWPPCLRIMAATAMLVKDSAKLTLGQPLTVITPHTLEAIVRQPPDRWITNARLTHYQALLLDTDRVQFGPPVTLNPATLLPVPENQPSPHDCRQVLAETHGTREDLKDQELPDADHTWYTDGSSYLDSGTRRAGAAVVDGHNTIWAQSLPPGTSAQKAELIALTKALELSKGKKANIYTDSRYAFATAHTHGSIYERRGWLTSEGKEIKNKAEIIALLKALFLPQEVAIIHCPGHQKGQDPVAVGNRQADRVARQAAMAEVLTLATEPDNTSHITAGKRTADGSEFEKRTADGSEFESPKKKAKVE

SEQ ID NO: 1966 - protein, 2111 aa, synthetic construct
MPAAKRVKLDGGDKKYSIGLDIGTNSVGWAVITDEYKVPSKKFKVLGNTDRHSIKKNLIGALLFDSGETAEATRLKRTARRRYTRRKNRICYLQEIFSNEMAKVDDSFFHRLEESFLVEEDKKHERHPIFGNIVDEVAYHEKYPTIYHLRKKLVDSTDKADLRLIYLALAHMIKFRGHFLIEGDLNPDNSDVDKLFIQLVQTYNQLFEENPINASGVDAKAILSARLSKSRRLENLIAQLPGEKKNGLFGNLIALSLGLTPNFKSNFDLAEDAKLQLSKDTYDDDLDNLLAQIGDQYADLFLAAKNLSDAILLSDILRVNTEITKAPLSASMIKRYDEHHQDLTLLKALVRQQLPEKYKEIFFDQSKNGYAGYIDGGASQEEFYKFIKPILEKMDGTEELLVKLNREDLLRKQRTFDNGSIPHQIHLGELHAILRRQEDFYPFLKDNREKIEKILTFRIPYYVGPLARGNSRFAWMTRKSEETITPWNFEEVVDKGASAQSFIERMTNFDKNLPNEKVLPKHSLLYEYFTVYNELTKVKYVTEGMRKPAFLSGEQKKAIVDLLFKTNRKVTVKQLKEDYFKKIECFDSVEISGVEDRFNASLGTYHDLLKIIKDKDFLDNEENEDILEDIVLTLTLFEDREMIEERLKTYAHLFDDKVMKQLKRRRYTGWGRLSRKLINGIRDKQSGKTILDFLKSDGFANRNFMQLIHDDSLTFKEDIQKAQVSGQGDSLHEHIANLAGSPAIKKGILQTVKVVDELVKVMGRHKPENIVIEMARENQTTQKGQKNSRERMKRIEEGIKELGSQILKEHPVENTQLQNEKLYLYYLQNGRDMYVDQELDINRLSDYDVDHIVPQSFLKDDSIDNKVLTRSDKARGKSDNVPSEEVVKKMKNYWRQLLNAKLITQRKFDNLTKAERGGLSELDKAGFIKRQLVETRQITKHVAQILDSRMNTKYDENDKLIREVKVITLKSKLVSDFRKDFQFYKVREINNYHHAHDAYLNAVVGTALIKKYPKLESEFVYGDYKVYDVRKMIAKSEQEIGKATAKYFFYSNIMNFFKTEITLANGEIRKRPLIETNGETGEIVWDKGRDFATVRKVLSMPQVNIVKKTEVQTGGFSKESILPKRNSDKLIARKKDWDPKKYGGFDSPTVAYSVLVVAKVEKGKSKKLKSVKELLGITIMERSSFEKNPIDFLEAKGYKEVKKDLIIKLPKYSLFELENGRKRMLASAGELQKGNELALPSKYVNFLYLASHYEKLKGSPEDNEQKQLFVEQHKHYLDEIIEQISEFSKRVILADANLDKVLSAYNKHRDKPIREQAENIIHLFTLTNLGAPAAFKYFDTTIDRKRYTSTKEVLDATLIHQSITGLYETRIDLSQLGGDGGGGGGSGGGGSGGGGSGGGGSGGTVSLQDEHRLFDIPVTTSLPDVWLQDFPQAWAETGGLGRAKCQAPIIIDLKPTAVPVSIKQYPMSLEAHMGIRQHIIKFLELGVLRPCRSPWNTPLLPVKKPGTQDYRPVQDLREINKRTVDIHPTVPNPYNLLSTLKPDYSWYTVLDLKDAFFCLPLAPQSQELFAFEWKDPERGISGQLTWTRLPQGFKNSPTLFNEALHRDLTDFRTQHPEVTLLQYVDDLLLAAPTKKACTQGTRHLLQELGEKGYRASAKKAQICQTKVTYLGYILSEGKRWLTPGRIETVARIPPPRNPREVREFLGKAGFCRLFIPGFAELAAPLYALTKPSTPFTWQTEHQLAFEALKKALLSAPALGLPDTSKPFTLFLDERQGIAKGVLTQKLGPWKRPVAYLSKKLDPVAAGWPPCLRIMAATAMLVKDSAKLTLGQPLTVITPHTLEAIVRQPPDRWITNARLTHYQALLLDTDRVQFGPPVTLNPATLLPVPENQPSPHDCRQVLAETHGTREDLKDQELPDADHTWYTDGSSYLDSGTRRAGAAVVDGHNTIWAQSLPPGTSAQKAELIALTKALELSKGKKANIYTDSRYAFATAHTHGSIYERRGWLTSEGKEIKNKAEIIALLKALFLPQEVAIIHCPGHQKGQDPVAVGNRQADRVARQAAMAEVLTLATEPDNTSHITAGKRTADGSEFEKRTADGSEFESPKKKAKVE

SEQ ID NO: 1967 - protein, 2137 aa, synthetic construct
MPAAKRVKLDGGDKKYSIGLDIGTNSVGWAVITDEYKVPSKKFKVLGNTDRHSIKKNLIGALLFDSGETAEATRLKRTARRRYTRRKNRICYLQEIFSNEMAKVDDSFFHRLEESFLVEEDKKHERHPIFGNIVDEVAYHEKYPTIYHLRKKLVDSTDKADLRLIYLALAHMIKFRGHFLIEGDLNPDNSDVDKLFIQLVQTYNQLFEENPINASGVDAKAILSARLSKSRRLENLIAQLPGEKKNGLFGNLIALSLGLTPNFKSNFDLAEDAKLQLSKDTYDDDLDNLLAQIGDQYADLFLAAKNLSDAILLSDILRVNTEITKAPLSASMIKRYDEHHQDLTLLKALVRQQLPEKYKEIFFDQSKNGYAGYIDGGASQEEFYKFIKPILEKMDGTEELLVKLNREDLLRKQRTFDNGSIPHQIHLGELHAILRRQEDFYPFLKDNREKIEKILTFRIPYYVGPLARGNSRFAWMTRKSEETITPWNFEEVVDKGASAQSFIERMTNFDKNLPNEKVLPKHSLLYEYFTVYNELTKVKYVTEGMRKPAFLSGEQKKAIVDLLFKTNRKVTVKQLKEDYFKKIECFDSVEISGVEDRFNASLGTYHDLLKIIKDKDFLDNEENEDILEDIVLTLTLFEDREMIEERLKTYAHLFDDKVMKQLKRRRYTGWGRLSRKLINGIRDKQSGKTILDFLKSDGFANRNFMQLIHDDSLTFKEDIQKAQVSGQGDSLHEHIANLAGSPAIKKGILQTVKVVDELVKVMGRHKPENIVIEMARENQTTQKGQKNSRERMKRIEEGIKELGSQILKEHPVENTQLQNEKLYLYYLQNGRDMYVDQELDINRLSDYDVDHIVPQSFLKDDSIDNKVLTRSDKARGKSDNVPSEEVVKKMKNYWRQLLNAKLITQRKFDNLTKAERGGLSELDKAGFIKRQLVETRQITKHVAQILDSRMNTKYDENDKLIREVKVITLKSKLVSDFRKDFQFYKVREINNYHHAHDAYLNAVVGTALIKKYPKLESEFVYGDYKVYDVRKMIAKSEQEIGKATAKYFFYSNIMNFFKTEITLANGEIRKRPLIETNGETGEIVWDKGRDFATVRKVLSMPQVNIVKKTEVQTGGFSKESILPKRNSDKLIARKKDWDPKKYGGFDSPTVAYSVLVVAKVEKGKSKKLKSVKELLGITIMERSSFEKNPIDFLEAKGYKEVKKDLIIKLPKYSLFELENGRKRMLASAGELQKGNELALPSKYVNFLYLASHYEKLKGSPEDNEQKQLFVEQHKHYLDEIIEQISEFSKRVILADANLDKVLSAYNKHRDKPIREQAENIIHLFTLTNLGAPAAFKYFDTTIDRKRYTSTKEVLDATLIHQSITGLYETRIDLSQLGGDGGAEAAAKEAAAKEAAAKEAAAKALEAEAAAKEAAAKEAAAKEAAAKAGGTVSLQDEHRLFDIPVTTSLPDVWLQDFPQAWAETGGLGRAKCQAPIIIDLKPTAVPVSIKQYPMSLEAHMGIRQHIIKFLELGVLRPCRSPWNTPLLPVKKPGTQDYRPVQDLREINKRTVDIHPTVPNPYNLLSTLKPDYSWYTVLDLKDAFFCLPLAPQSQELFAFEWKDPERGISGQLTWTRLPQGFKNSPTLFNEALHRDLTDFRTQHPEVTLLQYVDDLLLAAPTKKACTQGTRHLLQELGEKGYRASAKKAQICQTKVTYLGYILSEGKRWLTPGRIETVARIPPPRNPREVREFLGKAGFCRLFIPGFAELAAPLYALTKPSTPFTWQTEHQLAFEALKKALLSAPALGLPDTSKPFTLFLDERQGIAKGVLTQKLGPWKRPVAYLSKKLDPVAAGWPPCLRIMAATAMLVKDSAKLTLGQPLTVITPHTLEAIVRQPPDRWITNARLTHYQALLLDTDRVQFGPPVTLNPATLLPVPENQPSPHDCRQVLAETHGTREDLKDQELPDADHTWYTDGSSYLDSGTRRAGAAVVDGHNTIWAQSLPPGTSAQKAELIALTKALELSKGKKANIYTDSRYAFATAHTHGSIYERRGWLTSEGKEIKNKAEIIALLKALFLPQEVAIIHCPGHQKGQDPVAVGNRQADRVARQAAMAEVLTLATEPDNTSHITAGKRTADGSEFEKRTADGSEFESPKKKAKVE

SEQ ID NO: 1968 - protein, 2102 aa, synthetic construct
MPAAKRVKLDGGDKKYSIGLDIGTNSVGWAVITDEYKVPSKKFKVLGNTDRHSIKKNLIGALLFDSGETAEATRLKRTARRRYTRRKNRICYLQEIFSNEMAKVDDSFFHRLEESFLVEEDKKHERHPIFGNIVDEVAYHEKYPTIYHLRKKLVDSTDKADLRLIYLALAHMIKFRGHFLIEGDLNPDNSDVDKLFIQLVQTYNQLFEENPINASGVDAKAILSARLSKSRRLENLIAQLPGEKKNGLFGNLIALSLGLTPNFKSNFDLAEDAKLQLSKDTYDDDLDNLLAQIGDQYADLFLAAKNLSDAILLSDILRVNTEITKAPLSASMIKRYDEHHQDLTLLKALVRQQLPEKYKEIFFDQSKNGYAGYIDGGASQEEFYKFIKPILEKMDGTEELLVKLNREDLLRKQRTFDNGSIPHQIHLGELHAILRRQEDFYPFLKDNREKIEKILTFRIPYYVGPLARGNSRFAWMTRKSEETITPWNFEEVVDKGASAQSFIERMTNFDKNLPNEKVLPKHSLLYEYFTVYNELTKVKYVTEGMRKPAFLSGEQKKAIVDLLFKTNRKVTVKQLKEDYFKKIECFDSVEISGVEDRFNASLGTYHDLLKIIKDKDFLDNEENEDILEDIVLTLTLFEDREMIEERLKTYAHLFDDKVMKQLKRRRYTGWGRLSRKLINGIRDKQSGKTILDFLKSDGFANRNFMQLIHDDSLTFKEDIQKAQVSGQGDSLHEHIANLAGSPAIKKGILQTVKVVDELVKVMGRHKPENIVIEMARENQTTQKGQKNSRERMKRIEEGIKELGSQILKEHPVENTQLQNEKLYLYYLQNGRDMYVDQELDINRLSDYDVDHIVPQSFLKDDSIDNKVLTRSDKARGKSDNVPSEEVVKKMKNYWRQLLNAKLITQRKFDNLTKAERGGLSELDKAGFIKRQLVETRQITKHVAQILDSRMNTKYDENDKLIREVKVITLKSKLVSDFRKDFQFYKVREINNYHHAHDAYLNAVVGTALIKKYPKLESEFVYGDYKVYDVRKMIAKSEQEIGKATAKYFFYSNIMNFFKTEITLANGEIRKRPLIETNGETGEIVWDKGRDFATVRKVLSMPQVNIVKKTEVQTGGFSKESILPKRNSDKLIARKKDWDPKKYGGFDSPTVAYSVLVVAKVEKGKSKKLKSVKELLGITIMERSSFEKNPIDFLEAKGYKEVKKDLIIKLPKYSLFELENGRKRMLASAGELQKGNELALPSKYVNFLYLASHYEKLKGSPEDNEQKQLFVEQHKHYLDEIIEQISEFSKRVILADANLDKVLSAYNKHRDKPIREQAENIIHLFTLTNLGAPAAFKYFDTTIDRKRYTSTKEVLDATLIHQSITGLYETRIDLSQLGGDGGPAPGSSEAAAKGGTVSLQDEHRLFDIPVTTSLPDVWLQDFPQAWAETGGLGRAKCQAPIIIDLKPTAVPVSIKQYPMSLEAHMGIRQHIIKFLELGVLRPCRSPWNTPLLPVKKPGTQDYRPVQDLREINKRTVDIHPTVPNPYNLLSTLKPDYSWYTVLDLKDAFFCLPLAPQSQELFAFEWKDPERGISGQLTWTRLPQGFKNSPTLFNEALHRDLTDFRTQHPEVTLLQYVDDLLLAAPTKKACTQGTRHLLQELGEKGYRASAKKAQICQTKVTYLGYILSEGKRWLTPGRIETVARIPPPRNPREVREFLGKAGFCRLFIPGFAELAAPLYALTKPSTPFTWQTEHQLAFEALKKALLSAPALGLPDTSKPFTLFLDERQGIAKGVLTQKLGPWKRPVAYLSKKLDPVAAGWPPCLRIMAATAMLVKDSAKLTLGQPLTVITPHTLEAIVRQPPDRWITNARLTHYQALLLDTDRVQFGPPVTLNPATLLPVPENQPSPHDCRQVLAETHGTREDLKDQELPDADHTWYTDGSSYLDSGTRRAGAAVVDGHNTIWAQSLPPGTSAQKAELIALTKALELSKGKKANIYTDSRYAFATAHTHGSIYERRGWLTSEGKEIKNKAEIIALLKALFLPQEVAIIHCPGHQKGQDPVAVGNRQADRVARQAAMAEVLTLATEPDNTSHITAGKRTADGSEFEKRTADGSEFESPKKKAKVE

SEQ ID NO: 1969 - protein, 2102 aa, synthetic construct
MPAAKRVKLDGGDKKYSIGLDIGTNSVGWAVITDEYKVPSKKFKVLGNTDRHSIKKNLIGALLFDSGETAEATRLKRTARRRYTRRKNRICYLQEIFSNEMAKVDDSFFHRLEESFLVEEDKKHERHPIFGNIVDEVAYHEKYPTIYHLRKKLVDSTDKADLRLIYLALAHMIKFRGHFLIEGDLNPDNSDVDKLFIQLVQTYNQLFEENPINASGVDAKAILSARLSKSRRLENLIAQLPGEKKNGLFGNLIALSLGLTPNFKSNFDLAEDAKLQLSKDTYDDDLDNLLAQIGDQYADLFLAAKNLSDAILLSDILRVNTEITKAPLSASMIKRYDEHHQDLTLLKALVRQQLPEKYKEIFFDQSKNGYAGYIDGGASQEEFYKFIKPILEKMDGTEELLVKLNREDLLRKQRTFDNGSIPHQIHLGELHAILRRQEDFYPFLKDNREKIEKILTFRIPYYVGPLARGNSRFAWMTRKSEETITPWNFEEVVDKGASAQSFIERMTNFDKNLPNEKVLPKHSLLYEYFTVYNELTKVKYVTEGMRKPAFLSGEQKKAIVDLLFKTNRKVTVKQLKEDYFKKIECFDSVEISGVEDRFNASLGTYHDLLKIIKDKDFLDNEENEDILEDIVLTLTLFEDREMIEERLKTYAHLFDDKVMKQLKRRRYTGWGRLSRKLINGIRDKQSGKTILDFLKSDGFANRNFMQLIHDDSLTFKEDIQKAQVSGQGDSLHEHIANLAGSPAIKKGILQTVKVVDELVKVMGRHKPENIVIEMARENQTTQKGQKNSRERMKRIEEGIKELGSQILKEHPVENTQLQNEKLYLYYLQNGRDMYVDQELDINRLSDYDVDHIVPQSFLKDDSIDNKVLTRSDKARGKSDNVPSEEVVKKMKNYWRQLLNAKLITQRKFDNLTKAERGGLSELDKAGFIKRQLVETRQITKHVAQILDSRMNTKYDENDKLIREVKVITLKSKLVSDFRKDFQFYKVREINNYHHAHDAYLNAVVGTALIKKYPKLESEFVYGDYKVYDVRKMIAKSEQEIGKATAKYFFYSNIMNFFKTEITLANGEIRKRPLIETNGETGEIVWDKGRDFATVRKVLSMPQVNIVKKTEVQTGGFSKESILPKRNSDKLIARKKDWDPKKYGGFDSPTVAYSVLVVAKVEKGKSKKLKSVKELLGITIMERSSFEKNPIDFLEAKGYKEVKKDLIIKLPKYSLFELENGRKRMLASAGELQKGNELALPSKYVNFLYLASHYEKLKGSPEDNEQKQLFVEQHKHYLDEIIEQISEFSKRVILADANLDKVLSAYNKHRDKPIREQAENIIHLFTLTNLGAPAAFKYFDTTIDRKRYTSTKEVLDATLIHQSITGLYETRIDLSQLGGDGGGGGEAAAKPAPGGTVSLQDEHRLFDIPVTTSLPDVWLQDFPQAWAETGGLGRAKCQAPIIIDLKPTAVPVSIKQYPMSLEAHMGIRQHIIKFLELGVLRPCRSPWNTPLLPVKKPGTQDYRPVQDLREINKRTVDIHPTVPNPYNLLSTLKPDYSWYTVLDLKDAFFCLPLAPQSQELFAFEWKDPERGISGQLTWTRLPQGFKNSPTLFNEALHRDLTDFRTQHPEVTLLQYVDDLLLAAPTKKACTQGTRHLLQELGEKGYRASAKKAQICQTKVTYLGYILSEGKRWLTPGRIETVARIPPPRNPREVREFLGKAGFCRLFIPGFAELAAPLYALTKPSTPFTWQTEHQLAFEALKKALLSAPALGLPDTSKPFTLFLDERQGIAKGVLTQKLGPWKRPVAYLSKKLDPVAAGWPPCLRIMAATAMLVKDSAKLTLGQPLTVITPHTLEAIVRQPPDRWITNARLTHYQALLLDTDRVQFGPPVTLNPATLLPVPENQPSPHDCRQVLAETHGTREDLKDQELPDADHTWYTDGSSYLDSGTRRAGAAVVDGHNTIWAQSLPPGTSAQKAELIALTKALELSKGKKANIYTDSRYAFATAHTHGSIYERRGWLTSEGKEIKNKAEIIALLKALFLPQEVAIIHCPGHQKGQDPVAVGNRQADRVARQAAMAEVLTLATEPDNTSHITAGKRTADGSEFEKRTADGSEFESPKKKAKVE

SEQ ID NO: 1970 - protein, 2097 aa, synthetic construct
MPAAKRVKLDGGDKKYSIGLDIGTNSVGWAVITDEYKVPSKKFKVLGNTDRHSIKKNLIGALLFDSGETAEATRLKRTARRRYTRRKNRICYLQEIFSNEMAKVDDSFFHRLEESFLVEEDKKHERHPIFGNIVDEVAYHEKYPTIYHLRKKLVDSTDKADLRLIYLALAHMIKFRGHFLIEGDLNPDNSDVDKLFIQLVQTYNQLFEENPINASGVDAKAILSARLSKSRRLENLIAQLPGEKKNGLFGNLIALSLGLTPNFKSNFDLAEDAKLQLSKDTYDDDLDNLLAQIGDQYADLFLAAKNLSDAILLSDILRVNTEITKAPLSASMIKRYDEHHQDLTLLKALVRQQLPEKYKEIFFDQSKNGYAGYIDGGASQEEFYKFIKPILEKMDGTEELLVKLNREDLLRKQRTFDNGSIPHQIHLGELHAILRRQEDFYPFLKDNREKIEKILTFRIPYYVGPLARGNSRFAWMTRKSEETITPWNFEEVVDKGASAQSFIERMTNFDKNLPNEKVLPKHSLLYEYFTVYNELTKVKYVTEGMRKPAFLSGEQKKAIVDLLFKTNRKVTVKQLKEDYFKKIECFDSVEISGVEDRFNASLGTYHDLLKIIKDKDFLDNEENEDILEDIVLTLTLFEDREMIEERLKTYAHLFDDKVMKQLKRRRYTGWGRLSRKLINGIRDKQSGKTILDFLKSDGFANRNFMQLIHDDSLTFKEDIQKAQVSGQGDSLHEHIANLAGSPAIKKGILQTVKVVDELVKVMGRHKPENIVIEMARENQTTQKGQKNSRERMKRIEEGIKELGSQILKEHPVENTQLQNEKLYLYYLQNGRDMYVDQELDINRLSDYDVDHIVPQSFLKDDSIDNKVLTRSDKARGKSDNVPSEEVVKKMKNYWRQLLNAKLITQRKFDNLTKAERGGLSELDKAGFIKRQLVETRQITKHVAQILDSRMNTKYDENDKLIREVKVITLKSKLVSDFRKDFQFYKVREINNYHHAHDAYLNAVVGTALIKKYPKLESEFVYGDYKVYDVRKMIAKSEQEIGKATAKYFFYSNIMNFFKTEITLANGEIRKRPLIETNGETGEIVWDKGRDFATVRKVLSMPQVNIVKKTEVQTGGFSKESILPKRNSDKLIARKKDWDPKKYGGFDSPTVAYSVLVVAKVEKGKSKKLKSVKELLGITIMERSSFEKNPIDFLEAKGYKEVKKDLIIKLPKYSLFELENGRKRMLASAGELQKGNELALPSKYVNFLYLASHYEKLKGSPEDNEQKQLFVEQHKHYLDEIIEQISEFSKRVILADANLDKVLSAYNKHRDKPIREQAENIIHLFTLTNLGAPAAFKYFDTTIDRKRYTSTKEVLDATLIHQSITGLYETRIDLSQLGGDGGGSSGSSGGTVSLQDEHRLFDIPVTTSLPDVWLQDFPQAWAETGGLGRAKCQAPIIIDLKPTAVPVSIKQYPMSLEAHMGIRQHIIKFLELGVLRPCRSPWNTPLLPVKKPGTQDYRPVQDLREINKRTVDIHPTVPNPYNLLSTLKPDYSWYTVLDLKDAFFCLPLAPQSQELFAFEWKDPERGISGQLTWTRLPQGFKNSPTLFNEALHRDLTDFRTQHPEVTLLQYVDDLLLAAPTKKACTQGTRHLLQELGEKGYRASAKKAQICQTKVTYLGYILSEGKRWLTPGRIETVARIPPPRNPREVREFLGKAGFCRLFIPGFAELAAPLYALTKPSTPFTWQTEHQLAFEALKKALLSAPALGLPDTSKPFTLFLDERQGIAKGVLTQKLGPWKRPVAYLSKKLDPVAAGWPPCLRIMAATAMLVKDSAKLTLGQPLTVITPHTLEAIVRQPPDRWITNARLTHYQALLLDTDRVQFGPPVTLNPATLLPVPENQPSPHDCRQVLAETHGTREDLKDQELPDADHTWYTDGSSYLDSGTRRAGAAVVDGHNTIWAQSLPPGTSAQKAELIALTKALELSKGKKANIYTDSRYAFATAHTHGSIYERRGWLTSEGKEIKNKAEIIALLKALFLPQEVAIIHCPGHQKGQDPVAVGNRQADRVARQAAMAEVLTLATEPDNTSHITAGKRTADGSEFEKRTADGSEFESPKKKAKVE

SEQ ID NO: 1971 - protein, 2099 aa, synthetic construct
MPAAKRVKLDGGDKKYSIGLDIGTNSVGWAVITDEYKVPSKKFKVLGNTDRHSIKKNLIGALLFDSGETAEATRLKRTARRRYTRRKNRICYLQEIFSNEMAKVDDSFFHRLEESFLVEEDKKHERHPIFGNIVDEVAYHEKYPTIYHLRKKLVDSTDKADLRLIYLALAHMIKFRGHFLIEGDLNPDNSDVDKLFIQLVQTYNQLFEENPINASGVDAKAILSARLSKSRRLENLIAQLPGEKKNGLFGNLIALSLGLTPNFKSNFDLAEDAKLQLSKDTYDDDLDNLLAQIGDQYADLFLAAKNLSDAILLSDILRVNTEITKAPLSASMIKRYDEHHQDLTLLKALVRQQLPEKYKEIFFDQSKNGYAGYIDGGASQEEFYKFIKPILEKMDGTEELLVKLNREDLLRKQRTFDNGSIPHQIHLGELHAILRRQEDFYPFLKDNREKIEKILTFRIPYYVGPLARGNSRFAWMTRKSEETITPWNFEEVVDKGASAQSFIERMTNFDKNLPNEKVLPKHSLLYEYFTVYNELTKVKYVTEGMRKPAFLSGEQKKAIVDLLFKTNRKVTVKQLKEDYFKKIECFDSVEISGVEDRFNASLGTYHDLLKIIKDKDFLDNEENEDILEDIVLTLTLFEDREMIEERLKTYAHLFDDKVMKQLKRRRYTGWGRLSRKLINGIRDKQSGKTILDFLKSDGFANRNFMQLIHDDSLTFKEDIQKAQVSGQGDSLHEHIANLAGSPAIKKGILQTVKVVDELVKVMGRHKPENIVIEMARENQTTQKGQKNSRERMKRIEEGIKELGSQILKEHPVENTQLQNEKLYLYYLQNGRDMYVDQELDINRLSDYDVDHIVPQSFLKDDSIDNKVLTRSDKARGKSDNVPSEEVVKKMKNYWRQLLNAKLITQRKFDNLTKAERGGLSELDKAGFIKRQLVETRQITKHVAQILDSRMNTKYDENDKLIREVKVITLKSKLVSDFRKDFQFYKVREINNYHHAHDAYLNAVVGTALIKKYPKLESEFVYGDYKVYDVRKMIAKSEQEIGKATAKYFFYSNIMNFFKTEITLANGEIRKRPLIETNGETGEIVWDKGRDFATVRKVLSMPQVNIVKKTEVQTGGFSKESILPKRNSDKLIARKKDWDPKKYGGFDSPTVAYSVLVVAKVEKGKSKKLKSVKELLGITIMERSSFEKNPIDFLEAKGYKEVKKDLIIKLPKYSLFELENGRKRMLASAGELQKGNELALPSKYVNFLYLASHYEKLKGSPEDNEQKQLFVEQHKHYLDEIIEQISEFSKRVILADANLDKVLSAYNKHRDKPIREQAENIIHLFTLTNLGAPAAFKYFDTTIDRKRYTSTKEVLDATLIHQSITGLYETRIDLSQLGGDGGEAAAKGSSGGTVSLQDEHRLFDIPVTTSLPDVWLQDFPQAWAETGGLGRAKCQAPIIIDLKPTAVPVSIKQYPMSLEAHMGIRQHIIKFLELGVLRPCRSPWNTPLLPVKKPGTQDYRPVQDLREINKRTVDIHPTVPNPYNLLSTLKPDYSWYTVLDLKDAFFCLPLAPQSQELFAFEWKDPERGISGQLTWTRLPQGFKNSPTLFNEALHRDLTDFRTQHPEVTLLQYVDDLLLAAPTKKACTQGTRHLLQELGEKGYRASAKKAQICQTKVTYLGYILSEGKRWLTPGRIETVARIPPPRNPREVREFLGKAGFCRLFIPGFAELAAPLYALTKPSTPFTWQTEHQLAFEALKKALLSAPALGLPDTSKPFTLFLDERQGIAKGVLTQKLGPWKRPVAYLSKKLDPVAAGWPPCLRIMAATAMLVKDSAKLTLGQPLTVITPHTLEAIVRQPPDRWITNARLTHYQALLLDTDRVQFGPPVTLNPATLLPVPENQPSPHDCRQVLAETHGTREDLKDQELPDADHTWYTDGSSYLDSGTRRAGAAVVDGHNTIWAQSLPPGTSAQKAELIALTKALELSKGKKANIYTDSRYAFATAHTHGSIYERRGWLTSEGKEIKNKAEIIALLKALFLPQEVAIIHCPGHQKGQDPVAVGNRQADRVARQAAMAEVLTLATEPDNTSHITAGKRTADGSEFEKRTADGSEFESPKKKAKVE

SEQ ID NO: 1972 - protein, 2102 aa, synthetic construct
MPAAKRVKLDGGDKKYSIGLDIGTNSVGWAVITDEYKVPSKKFKVLGNTDRHSIKKNLIGALLFDSGETAEATRLKRTARRRYTRRKNRICYLQEIFSNEMAKVDDSFFHRLEESFLVEEDKKHERHPIFGNIVDEVAYHEKYPTIYHLRKKLVDSTDKADLRLIYLALAHMIKFRGHFLIEGDLNPDNSDVDKLFIQLVQTYNQLFEENPINASGVDAKAILSARLSKSRRLENLIAQLPGEKKNGLFGNLIALSLGLTPNFKSNFDLAEDAKLQLSKDTYDDDLDNLLAQIGDQYADLFLAAKNLSDAILLSDILRVNTEITKAPLSASMIKRYDEHHQDLTLLKALVRQQLPEKYKEIFFDQSKNGYAGYIDGGASQEEFYKFIKPILEKMDGTEELLVKLNREDLLRKQRTFDNGSIPHQIHLGELHAILRRQEDFYPFLKDNREKIEKILTFRIPYYVGPLARGNSRFAWMTRKSEETITPWNFEEVVDKGASAQSFIERMTNFDKNLPNEKVLPKHSLLYEYFTVYNELTKVKYVTEGMRKPAFLSGEQKKAIVDLLFKTNRKVTVKQLKEDYFKKIECFDSVEISGVEDRFNASLGTYHDLLKIIKDKDFLDNEENEDILEDIVLTLTLFEDREMIEERLKTYAHLFDDKVMKQLKRRRYTGWGRLSRKLINGIRDKQSGKTILDFLKSDGFANRNFMQLIHDDSLTFKEDIQKAQVSGQGDSLHEHIANLAGSPAIKKGILQTVKVVDELVKVMGRHKPENIVIEMARENQTTQKGQKNSRERMKRIEEGIKELGSQILKEHPVENTQLQNEKLYLYYLQNGRDMYVDQELDINRLSDYDVDHIVPQSFLKDDSIDNKVLTRSDKARGKSDNVPSEEVVKKMKNYWRQLLNAKLITQRKFDNLTKAERGGLSELDKAGFIKRQLVETRQITKHVAQILDSRMNTKYDENDKLIREVKVITLKSKLVSDFRKDFQFYKVREINNYHHAHDAYLNAVVGTALIKKYPKLESEFVYGDYKVYDVRKMIAKSEQEIGKATAKYFFYSNIMNFFKTEITLANGEIRKRPLIETNGETGEIVWDKGRDFATVRKVLSMPQVNIVKKTEVQTGGFSKESILPKRNSDKLIARKKDWDPKKYGGFDSPTVAYSVLVVAKVEKGKSKKLKSVKELLGITIMERSSFEKNPIDFLEAKGYKEVKKDLIIKLPKYSLFELENGRKRMLASAGELQKGNELALPSKYVNFLYLASHYEKLKGSPEDNEQKQLFVEQHKHYLDEIIEQISEFSKRVILADANLDKVLSAYNKHRDKPIREQAENIIHLFTLTNLGAPAAFKYFDTTIDRKRYTSTKEVLDATLIHQSITGLYETRIDLSQLGGDGGGSSEAAAKGGGGGTVSLQDEHRLFDIPVTTSLPDVWLQDFPQAWAETGGLGRAKCQAPIIIDLKPTAVPVSIKQYPMSLEAHMGIRQHIIKFLELGVLRPCRSPWNTPLLPVKKPGTQDYRPVQDLREINKRTVDIHPTVPNPYNLLSTLKPDYSWYTVLDLKDAFFCLPLAPQSQELFAFEWKDPERGISGQLTWTRLPQGFKNSPTLFNEALHRDLTDFRTQHPEVTLLQYVDDLLLAAPTKKACTQGTRHLLQELGEKGYRASAKKAQICQTKVTYLGYILSEGKRWLTPGRIETVARIPPPRNPREVREFLGKAGFCRLFIPGFAELAAPLYALTKPSTPFTWQTEHQLAFEALKKALLSAPALGLPDTSKPFTLFLDERQGIAKGVLTQKLGPWKRPVAYLSKKLDPVAAGWPPCLRIMAATAMLVKDSAKLTLGQPLTVITPHTLEAIVRQPPDRWITNARLTHYQALLLDTDRVQFGPPVTLNPATLLPVPENQPSPHDCRQVLAETHGTREDLKDQELPDADHTWYTDGSSYLDSGTRRAGAAVVDGHNTIWAQSLPPGTSAQKAELIALTKALELSKGKKANIYTDSRYAFATAHTHGSIYERRGWLTSEGKEIKNKAEIIALLKALFLPQEVAIIHCPGHQKGQDPVAVGNRQADRVARQAAMAEVLTLATEPDNTSHITAGKRTADGSEFEKRTADGSEFESPKKKAKVE

SEQ ID NO: 1973 - protein, 2102 aa, synthetic construct
MPAAKRVKLDGGDKKYSIGLDIGTNSVGWAVITDEYKVPSKKFKVLGNTDRHSIKKNLIGALLFDSGETAEATRLKRTARRRYTRRKNRICYLQEIFSNEMAKVDDSFFHRLEESFLVEEDKKHERHPIFGNIVDEVAYHEKYPTIYHLRKKLVDSTDKADLRLIYLALAHMIKFRGHFLIEGDLNPDNSDVDKLFIQLVQTYNQLFEENPINASGVDAKAILSARLSKSRRLENLIAQLPGEKKNGLFGNLIALSLGLTPNFKSNFDLAEDAKLQLSKDTYDDDLDNLLAQIGDQYADLFLAAKNLSDAILLSDILRVNTEITKAPLSASMIKRYDEHHQDLTLLKALVRQQLPEKYKEIFFDQSKNGYAGYIDGGASQEEFYKFIKPILEKMDGTEELLVKLNREDLLRKQRTFDNGSIPHQIHLGELHAILRRQEDFYPFLKDNREKIEKILTFRIPYYVGPLARGNSRFAWMTRKSEETITPWNFEEVVDKGASAQSFIERMTNFDKNLPNEKVLPKHSLLYEYFTVYNELTKVKYVTEGMRKPAFLSGEQKKAIVDLLFKTNRKVTVKQLKEDYFKKIECFDSVEISGVEDRFNASLGTYHDLLKIIKDKDFLDNEENEDILEDIVLTLTLFEDREMIEERLKTYAHLFDDKVMKQLKRRRYTGWGRLSRKLINGIRDKQSGKTILDFLKSDGFANRNFMQLIHDDSLTFKEDIQKAQVSGQGDSLHEHIANLAGSPAIKKGILQTVKVVDELVKVMGRHKPENIVIEMARENQTTQKGQKNSRERMKRIEEGIKELGSQILKEHPVENTQLQNEKLYLYYLQNGRDMYVDQELDINRLSDYDVDHIVPQSFLKDDSIDNKVLTRSDKARGKSDNVPSEEVVKKMKNYWRQLLNAKLITQRKFDNLTKAERGGLSELDKAGFIKRQLVETRQITKHVAQILDSRMNTKYDENDKLIREVKVITLKSKLVSDFRKDFQFYKVREINNYHHAHDAYLNAVVGTALIKKYPKLESEFVYGDYKVYDVRKMIAKSEQEIGKATAKYFFYSNIMNFFKTEITLANGEIRKRPLIETNGETGEIVWDKGRDFATVRKVLSMPQVNIVKKTEVQTGGFSKESILPKRNSDKLIARKKDWDPKKYGGFDSPTVAYSVLVVAKVEKGKSKKLKSVKELLGITIMERSSFEKNPIDFLEAKGYKEVKKDLIIKLPKYSLFELENGRKRMLASAGELQKGNELALPSKYVNFLYLASHYEKLKGSPEDNEQKQLFVEQHKHYLDEIIEQISEFSKRVILADANLDKVLSAYNKHRDKPIREQAENIIHLFTLTNLGAPAAFKYFDTTIDRKRYTSTKEVLDATLIHQSITGLYETRIDLSQLGGDGGPAPEAAAKGGGGGTVSLQDEHRLFDIPVTTSLPDVWLQDFPQAWAETGGLGRAKCQAPIIIDLKPTAVPVSIKQYPMSLEAHMGIRQHIIKFLELGVLRPCRSPWNTPLLPVKKPGTQDYRPVQDLREINKRTVDIHPTVPNPYNLLSTLKPDYSWYTVLDLKDAFFCLPLAPQSQELFAFEWKDPERGISGQLTWTRLPQGFKNSPTLFNEALHRDLTDFRTQHPEVTLLQYVDDLLLAAPTKKACTQGTRHLLQELGEKGYRASAKKAQICQTKVTYLGYILSEGKRWLTPGRIETVARIPPPRNPREVREFLGKAGFCRLFIPGFAELAAPLYALTKPSTPFTWQTEHQLAFEALKKALLSAPALGLPDTSKPFTLFLDERQGIAKGVLTQKLGPWKRPVAYLSKKLDPVAAGWPPCLRIMAATAMLVKDSAKLTLGQPLTVITPHTLEAIVRQPPDRWITNARLTHYQALLLDTDRVQFGPPVTLNPATLLPVPENQPSPHDCRQVLAETHGTREDLKDQELPDADHTWYTDGSSYLDSGTRRAGAAVVDGHNTIWAQSLPPGTSAQKAELIALTKALELSKGKKANIYTDSRYAFATAHTHGSIYERRGWLTSEGKEIKNKAEIIALLKALFLPQEVAIIHCPGHQKGQDPVAVGNRQADRVARQAAMAEVLTLATEPDNTSHITAGKRTADGSEFEKRTADGSEFESPKKKAKVE

SEQ ID NO: 1974 - protein, 2100 aa, synthetic construct
MPAAKRVKLDGGDKKYSIGLDIGTNSVGWAVITDEYKVPSKKFKVLGNTDRHSIKKNLIGALLFDSGETAEATRLKRTARRRYTRRKNRICYLQEIFSNEMAKVDDSFFHRLEESFLVEEDKKHERHPIFGNIVDEVAYHEKYPTIYHLRKKLVDSTDKADLRLIYLALAHMIKFRGHFLIEGDLNPDNSDVDKLFIQLVQTYNQLFEENPINASGVDAKAILSARLSKSRRLENLIAQLPGEKKNGLFGNLIALSLGLTPNFKSNFDLAEDAKLQLSKDTYDDDLDNLLAQIGDQYADLFLAAKNLSDAILLSDILRVNTEITKAPLSASMIKRYDEHHQDLTLLKALVRQQLPEKYKEIFFDQSKNGYAGYIDGGASQEEFYKFIKPILEKMDGTEELLVKLNREDLLRKQRTFDNGSIPHQIHLGELHAILRRQEDFYPFLKDNREKIEKILTFRIPYYVGPLARGNSRFAWMTRKSEETITPWNFEEVVDKGASAQSFIERMTNFDKNLPNEKVLPKHSLLYEYFTVYNELTKVKYVTEGMRKPAFLSGEQKKAIVDLLFKTNRKVTVKQLKEDYFKKIECFDSVEISGVEDRFNASLGTYHDLLKIIKDKDFLDNEENEDILEDIVLTLTLFEDREMIEERLKTYAHLFDDKVMKQLKRRRYTGWGRLSRKLINGIRDKQSGKTILDFLKSDGFANRNFMQLIHDDSLTFKEDIQKAQVSGQGDSLHEHIANLAGSPAIKKGILQTVKVVDELVKVMGRHKPENIVIEMARENQTTQKGQKNSRERMKRIEEGIKELGSQILKEHPVENTQLQNEKLYLYYLQNGRDMYVDQELDINRLSDYDVDHIVPQSFLKDDSIDNKVLTRSDKARGKSDNVPSEEVVKKMKNYWRQLLNAKLITQRKFDNLTKAERGGLSELDKAGFIKRQLVETRQITKHVAQILDSRMNTKYDENDKLIREVKVITLKSKLVSDFRKDFQFYKVREINNYHHAHDAYLNAVVGTALIKKYPKLESEFVYGDYKVYDVRKMIAKSEQEIGKATAKYFFYSNIMNFFKTEITLANGEIRKRPLIETNGETGEIVWDKGRDFATVRKVLSMPQVNIVKKTEVQTGGFSKESILPKRNSDKLIARKKDWDPKKYGGFDSPTVAYSVLVVAKVEKGKSKKLKSVKELLGITIMERSSFEKNPIDFLEAKGYKEVKKDLIIKLPKYSLFELENGRKRMLASAGELQKGNELALPSKYVNFLYLASHYEKLKGSPEDNEQKQLFVEQHKHYLDEIIEQISEFSKRVILADANLDKVLSAYNKHRDKPIREQAENIIHLFTLTNLGAPAAFKYFDTTIDRKRYTSTKEVLDATLIHQSITGLYETRIDLSQLGGDGGGGSGSSGGGGGTVSLQDEHRLFDIPVTTSLPDVWLQDFPQAWAETGGLGRAKCQAPIIIDLKPTAVPVSIKQYPMSLEAHMGIRQHIIKFLELGVLRPCRSPWNTPLLPVKKPGTQDYRPVQDLREINKRTVDIHPTVPNPYNLLSTLKPDYSWYTVLDLKDAFFCLPLAPQSQELFAFEWKDPERGISGQLTWTRLPQGFKNSPTLFNEALHRDLTDFRTQHPEVTLLQYVDDLLLAAPTKKACTQGTRHLLQELGEKGYRASAKKAQICQTKVTYLGYILSEGKRWLTPGRIETVARIPPPRNPREVREFLGKAGFCRLFIPGFAELAAPLYALTKPSTPFTWQTEHQLAFEALKKALLSAPALGLPDTSKPFTLFLDERQGIAKGVLTQKLGPWKRPVAYLSKKLDPVAAGWPPCLRIMAATAMLVKDSAKLTLGQPLTVITPHTLEAIVRQPPDRWITNARLTHYQALLLDTDRVQFGPPVTLNPATLLPVPENQPSPHDCRQVLAETHGTREDLKDQELPDADHTWYTDGSSYLDSGTRRAGAAVVDGHNTIWAQSLPPGTSAQKAELIALTKALELSKGKKANIYTDSRYAFATAHTHGSIYERRGWLTSEGKEIKNKAEIIALLKALFLPQEVAIIHCPGHQKGQDPVAVGNRQADRVARQAAMAEVLTLATEPDNTSHITAGKRTADGSEFEKRTADGSEFESPKKKAKVE

SEQ ID NO: 1975 - protein, 2102 aa, synthetic construct
MPAAKRVKLDGGDKKYSIGLDIGTNSVGWAVITDEYKVPSKKFKVLGNTDRHSIKKNLIGALLFDSGETAEATRLKRTARRRYTRRKNRICYLQEIFSNEMAKVDDSFFHRLEESFLVEEDKKHERHPIFGNIVDEVAYHEKYPTIYHLRKKLVDSTDKADLRLIYLALAHMIKFRGHFLIEGDLNPDNSDVDKLFIQLVQTYNQLFEENPINASGVDAKAILSARLSKSRRLENLIAQLPGEKKNGLFGNLIALSLGLTPNFKSNFDLAEDAKLQLSKDTYDDDLDNLLAQIGDQYADLFLAAKNLSDAILLSDILRVNTEITKAPLSASMIKRYDEHHQDLTLLKALVRQQLPEKYKEIFFDQSKNGYAGYIDGGASQEEFYKFIKPILEKMDGTEELLVKLNREDLLRKQRTFDNGSIPHQIHLGELHAILRRQEDFYPFLKDNREKIEKILTFRIPYYVGPLARGNSRFAWMTRKSEETITPWNFEEVVDKGASAQSFIERMTNFDKNLPNEKVLPKHSLLYEYFTVYNELTKVKYVTEGMRKPAFLSGEQKKAIVDLLFKTNRKVTVKQLKEDYFKKIECFDSVEISGVEDRFNASLGTYHDLLKIIKDKDFLDNEENEDILEDIVLTLTLFEDREMIEERLKTYAHLFDDKVMKQLKRRRYTGWGRLSRKLINGIRDKQSGKTILDFLKSDGFANRNFMQLIHDDSLTFKEDIQKAQVSGQGDSLHEHIANLAGSPAIKKGILQTVKVVDELVKVMGRHKPENIVIEMARENQTTQKGQKNSRERMKRIEEGIKELGSQILKEHPVENTQLQNEKLYLYYLQNGRDMYVDQELDINRLSDYDVDHIVPQSFLKDDSIDNKVLTRSDKARGKSDNVPSEEVVKKMKNYWRQLLNAKLITQRKFDNLTKAERGGLSELDKAGFIKRQLVETRQITKHVAQILDSRMNTKYDENDKLIREVKVITLKSKLVSDFRKDFQFYKVREINNYHHAHDAYLNAVVGTALIKKYPKLESEFVYGDYKVYDVRKMIAKSEQEIGKATAKYFFYSNIMNFFKTEITLANGEIRKRPLIETNGETGEIVWDKGRDFATVRKVLSMPQVNIVKKTEVQTGGFSKESILPKRNSDKLIARKKDWDPKKYGGFDSPTVAYSVLVVAKVEKGKSKKLKSVKELLGITIMERSSFEKNPIDFLEAKGYKEVKKDLIIKLPKYSLFELENGRKRMLASAGELQKGNELALPSKYVNFLYLASHYEKLKGSPEDNEQKQLFVEQHKHYLDEIIEQISEFSKRVILADANLDKVLSAYNKHRDKPIREQAENIIHLFTLTNLGAPAAFKYFDTTIDRKRYTSTKEVLDATLIHQSITGLYETRIDLSQLGGDGGGGGGSSEAAAKGGTVSLQDEHRLFDIPVTTSLPDVWLQDFPQAWAETGGLGRAKCQAPIIIDLKPTAVPVSIKQYPMSLEAHMGIRQHIIKFLELGVLRPCRSPWNTPLLPVKKPGTQDYRPVQDLREINKRTVDIHPTVPNPYNLLSTLKPDYSWYTVLDLKDAFFCLPLAPQSQELFAFEWKDPERGISGQLTWTRLPQGFKNSPTLFNEALHRDLTDFRTQHPEVTLLQYVDDLLLAAPTKKACTQGTRHLLQELGEKGYRASAKKAQICQTKVTYLGYILSEGKRWLTPGRIETVARIPPPRNPREVREFLGKAGFCRLFIPGFAELAAPLYALTKPSTPFTWQTEHQLAFEALKKALLSAPALGLPDTSKPFTLFLDERQGIAKGVLTQKLGPWKRPVAYLSKKLDPVAAGWPPCLRIMAATAMLVKDSAKLTLGQPLTVITPHTLEAIVRQPPDRWITNARLTHYQALLLDTDRVQFGPPVTLNPATLLPVPENQPSPHDCRQVLAETHGTREDLKDQELPDADHTWYTDGSSYLDSGTRRAGAAVVDGHNTIWAQSLPPGTSAQKAELIALTKALELSKGKKANIYTDSRYAFATAHTHGSIYERRGWLTSEGKEIKNKAEIIALLKALFLPQEVAIIHCPGHQKGQDPVAVGNRQADRVARQAAMAEVLTLATEPDNTSHITAGKRTADGSEFEKRTADGSEFESPKKKAKVE

SEQ ID NO: 1976 - protein, 2100 aa, synthetic construct
MPAAKRVKLDGGDKKYSIGLDIGTNSVGWAVITDEYKVPSKKFKVLGNTDRHSIKKNLIGALLFDSGETAEATRLKRTARRRYTRRKNRICYLQEIFSNEMAKVDDSFFHRLEESFLVEEDKKHERHPIFGNIVDEVAYHEKYPTIYHLRKKLVDSTDKADLRLIYLALAHMIKFRGHFLIEGDLNPDNSDVDKLFIQLVQTYNQLFEENPINASGVDAKAILSARLSKSRRLENLIAQLPGEKKNGLFGNLIALSLGLTPNFKSNFDLAEDAKLQLSKDTYDDDLDNLLAQIGDQYADLFLAAKNLSDAILLSDILRVNTEITKAPLSASMIKRYDEHHQDLTLLKALVRQQLPEKYKEIFFDQSKNGYAGYIDGGASQEEFYKFIKPILEKMDGTEELLVKLNREDLLRKQRTFDNGSIPHQIHLGELHAILRRQEDFYPFLKDNREKIEKILTFRIPYYVGPLARGNSRFAWMTRKSEETITPWNFEEVVDKGASAQSFIERMTNFDKNLPNEKVLPKHSLLYEYFTVYNELTKVKYVTEGMRKPAFLSGEQKKAIVDLLFKTNRKVTVKQLKEDYFKKIECFDSVEISGVEDRFNASLGTYHDLLKIIKDKDFLDNEENEDILEDIVLTLTLFEDREMIEERLKTYAHLFDDKVMKQLKRRRYTGWGRLSRKLINGIRDKQSGKTILDFLKSDGFANRNFMQLIHDDSLTFKEDIQKAQVSGQGDSLHEHIANLAGSPAIKKGILQTVKVVDELVKVMGRHKPENIVIEMARENQTTQKGQKNSRERMKRIEEGIKELGSQILKEHPVENTQLQNEKLYLYYLQNGRDMYVDQELDINRLSDYDVDHIVPQSFLKDDSIDNKVLTRSDKARGKSDNVPSEEVVKKMKNYWRQLLNAKLITQRKFDNLTKAERGGLSELDKAGFIKRQLVETRQITKHVAQILDSRMNTKYDENDKLIREVKVITLKSKLVSDFRKDFQFYKVREINNYHHAHDAYLNAVVGTALIKKYPKLESEFVYGDYKVYDVRKMIAKSEQEIGKATAKYFFYSNIMNFFKTEITLANGEIRKRPLIETNGETGEIVWDKGRDFATVRKVLSMPQVNIVKKTEVQTGGFSKESILPKRNSDKLIARKKDWDPKKYGGFDSPTVAYSVLVVAKVEKGKSKKLKSVKELLGITIMERSSFEKNPIDFLEAKGYKEVKKDLIIKLPKYSLFELENGRKRMLASAGELQKGNELALPSKYVNFLYLASHYEKLKGSPEDNEQKQLFVEQHKHYLDEIIEQISEFSKRVILADANLDKVLSAYNKHRDKPIREQAENIIHLFTLTNLGAPAAFKYFDTTIDRKRYTSTKEVLDATLIHQSITGLYETRIDLSQLGGDGGGGSPAPGGGGGTVSLQDEHRLFDIPVTTSLPDVWLQDFPQAWAETGGLGRAKCQAPIIIDLKPTAVPVSIKQYPMSLEAHMGIRQHIIKFLELGVLRPCRSPWNTPLLPVKKPGTQDYRPVQDLREINKRTVDIHPTVPNPYNLLSTLKPDYSWYTVLDLKDAFFCLPLAPQSQELFAFEWKDPERGISGQLTWTRLPQGFKNSPTLFNEALHRDLTDFRTQHPEVTLLQYVDDLLLAAPTKKACTQGTRHLLQELGEKGYRASAKKAQICQTKVTYLGYILSEGKRWLTPGRIETVARIPPPRNPREVREFLGKAGFCRLFIPGFAELAAPLYALTKPSTPFTWQTEHQLAFEALKKALLSAPALGLPDTSKPFTLFLDERQGIAKGVLTQKLGPWKRPVAYLSKKLDPVAAGWPPCLRIMAATAMLVKDSAKLTLGQPLTVITPHTLEAIVRQPPDRWITNARLTHYQALLLDTDRVQFGPPVTLNPATLLPVPENQPSPHDCRQVLAETHGTREDLKDQELPDADHTWYTDGSSYLDSGTRRAGAAVVDGHNTIWAQSLPPGTSAQKAELIALTKALELSKGKKANIYTDSRYAFATAHTHGSIYERRGWLTSEGKEIKNKAEIIALLKALFLPQEVAIIHCPGHQKGQDPVAVGNRQADRVARQAAMAEVLTLATEPDNTSHITAGKRTADGSEFEKRTADGSEFESPKKKAKVE

SEQ ID NO: 1977 - protein, 2102 aa, synthetic construct
MPAAKRVKLDGGDKKYSIGLDIGTNSVGWAVITDEYKVPSKKFKVLGNTDRHSIKKNLIGALLFDSGETAEATRLKRTARRRYTRRKNRICYLQEIFSNEMAKVDDSFFHRLEESFLVEEDKKHERHPIFGNIVDEVAYHEKYPTIYHLRKKLVDSTDKADLRLIYLALAHMIKFRGHFLIEGDLNPDNSDVDKLFIQLVQTYNQLFEENPINASGVDAKAILSARLSKSRRLENLIAQLPGEKKNGLFGNLIALSLGLTPNFKSNFDLAEDAKLQLSKDTYDDDLDNLLAQIGDQYADLFLAAKNLSDAILLSDILRVNTEITKAPLSASMIKRYDEHHQDLTLLKALVRQQLPEKYKEIFFDQSKNGYAGYIDGGASQEEFYKFIKPILEKMDGTEELLVKLNREDLLRKQRTFDNGSIPHQIHLGELHAILRRQEDFYPFLKDNREKIEKILTFRIPYYVGPLARGNSRFAWMTRKSEETITPWNFEEVVDKGASAQSFIERMTNFDKNLPNEKVLPKHSLLYEYFTVYNELTKVKYVTEGMRKPAFLSGEQKKAIVDLLFKTNRKVTVKQLKEDYFKKIECFDSVEISGVEDRFNASLGTYHDLLKIIKDKDFLDNEENEDILEDIVLTLTLFEDREMIEERLKTYAHLFDDKVMKQLKRRRYTGWGRLSRKLINGIRDKQSGKTILDFLKSDGFANRNFMQLIHDDSLTFKEDIQKAQVSGQGDSLHEHIANLAGSPAIKKGILQTVKVVDELVKVMGRHKPENIVIEMARENQTTQKGQKNSRERMKRIEEGIKELGSQILKEHPVENTQLQNEKLYLYYLQNGRDMYVDQELDINRLSDYDVDHIVPQSFLKDDSIDNKVLTRSDKARGKSDNVPSEEVVKKMKNYWRQLLNAKLITQRKFDNLTKAERGGLSELDKAGFIKRQLVETRQITKHVAQILDSRMNTKYDENDKLIREVKVITLKSKLVSDFRKDFQFYKVREINNYHHAHDAYLNAVVGTALIKKYPKLESEFVYGDYKVYDVRKMIAKSEQEIGKATAKYFFYSNIMNFFKTEITLANGEIRKRPLIETNGETGEIVWDKGRDFATVRKVLSMPQVNIVKKTEVQTGGFSKESILPKRNSDKLIARKKDWDPKKYGGFDSPTVAYSVLVVAKVEKGKSKKLKSVKELLGITIMERSSFEKNPIDFLEAKGYKEVKKDLIIKLPKYSLFELENGRKRMLASAGELQKGNELALPSKYVNFLYLASHYEKLKGSPEDNEQKQLFVEQHKHYLDEIIEQISEFSKRVILADANLDKVLSAYNKHRDKPIREQAENIIHLFTLTNLGAPAAFKYFDTTIDRKRYTSTKEVLDATLIHQSITGLYETRIDLSQLGGDGGPAPGGGEAAAKGGTVSLQDEHRLFDIPVTTSLPDVWLQDFPQAWAETGGLGRAKCQAPIIIDLKPTAVPVSIKQYPMSLEAHMGIRQHIIKFLELGVLRPCRSPWNTPLLPVKKPGTQDYRPVQDLREINKRTVDIHPTVPNPYNLLSTLKPDYSWYTVLDLKDAFFCLPLAPQSQELFAFEWKDPERGISGQLTWTRLPQGFKNSPTLFNEALHRDLTDFRTQHPEVTLLQYVDDLLLAAPTKKACTQGTRHLLQELGEKGYRASAKKAQICQTKVTYLGYILSEGKRWLTPGRIETVARIPPPRNPREVREFLGKAGFCRLFIPGFAELAAPLYALTKPSTPFTWQTEHQLAFEALKKALLSAPALGLPDTSKPFTLFLDERQGIAKGVLTQKLGPWKRPVAYLSKKLDPVAAGWPPCLRIMAATAMLVKDSAKLTLGQPLTVITPHTLEAIVRQPPDRWITNARLTHYQALLLDTDRVQFGPPVTLNPATLLPVPENQPSPHDCRQVLAETHGTREDLKDQELPDADHTWYTDGSSYLDSGTRRAGAAVVDGHNTIWAQSLPPGTSAQKAELIALTKALELSKGKKANIYTDSRYAFATAHTHGSIYERRGWLTSEGKEIKNKAEIIALLKALFLPQEVAIIHCPGHQKGQDPVAVGNRQADRVARQAAMAEVLTLATEPDNTSHITAGKRTADGSEFEKRTADGSEFESPKKKAKVE

SEQ ID NO: 1978 - protein, 2100 aa, synthetic construct
MPAAKRVKLDGGDKKYSIGLDIGTNSVGWAVITDEYKVPSKKFKVLGNTDRHSIKKNLIGALLFDSGETAEATRLKRTARRRYTRRKNRICYLQEIFSNEMAKVDDSFFHRLEESFLVEEDKKHERHPIFGNIVDEVAYHEKYPTIYHLRKKLVDSTDKADLRLIYLALAHMIKFRGHFLIEGDLNPDNSDVDKLFIQLVQTYNQLFEENPINASGVDAKAILSARLSKSRRLENLIAQLPGEKKNGLFGNLIALSLGLTPNFKSNFDLAEDAKLQLSKDTYDDDLDNLLAQIGDQYADLFLAAKNLSDAILLSDILRVNTEITKAPLSASMIKRYDEHHQDLTLLKALVRQQLPEKYKEIFFDQSKNGYAGYIDGGASQEEFYKFIKPILEKMDGTEELLVKLNREDLLRKQRTFDNGSIPHQIHLGELHAILRRQEDFYPFLKDNREKIEKILTFRIPYYVGPLARGNSRFAWMTRKSEETITPWNFEEVVDKGASAQSFIERMTNFDKNLPNEKVLPKHSLLYEYFTVYNELTKVKYVTEGMRKPAFLSGEQKKAIVDLLFKTNRKVTVKQLKEDYFKKIECFDSVEISGVEDRFNASLGTYHDLLKIIKDKDFLDNEENEDILEDIVLTLTLFEDREMIEERLKTYAHLFDDKVMKQLKRRRYTGWGRLSRKLINGIRDKQSGKTILDFLKSDGFANRNFMQLIHDDSLTFKEDIQKAQVSGQGDSLHEHIANLAGSPAIKKGILQTVKVVDELVKVMGRHKPENIVIEMARENQTTQKGQKNSRERMKRIEEGIKELGSQILKEHPVENTQLQNEKLYLYYLQNGRDMYVDQELDINRLSDYDVDHIVPQSFLKDDSIDNKVLTRSDKARGKSDNVPSEEVVKKMKNYWRQLLNAKLITQRKFDNLTKAERGGLSELDKAGFIKRQLVETRQITKHVAQILDSRMNTKYDENDKLIREVKVITLKSKLVSDFRKDFQFYKVREINNYHHAHDAYLNAVVGTALIKKYPKLESEFVYGDYKVYDVRKMIAKSEQEIGKATAKYFFYSNIMNFFKTEITLANGEIRKRPLIETNGETGEIVWDKGRDFATVRKVLSMPQVNIVKKTEVQTGGFSKESILPKRNSDKLIARKKDWDPKKYGGFDSPTVAYSVLVVAKVEKGKSKKLKSVKELLGITIMERSSFEKNPIDFLEAKGYKEVKKDLIIKLPKYSLFELENGRKRMLASAGELQKGNELALPSKYVNFLYLASHYEKLKGSPEDNEQKQLFVEQHKHYLDEIIEQISEFSKRVILADANLDKVLSAYNKHRDKPIREQAENIIHLFTLTNLGAPAAFKYFDTTIDRKRYTSTKEVLDATLIHQSITGLYETRIDLSQLGGDGGPAPAPAPAPGGTVSLQDEHRLFDIPVTTSLPDVWLQDFPQAWAETGGLGRAKCQAPIIIDLKPTAVPVSIKQYPMSLEAHMGIRQHIIKFLELGVLRPCRSPWNTPLLPVKKPGTQDYRPVQDLREINKRTVDIHPTVPNPYNLLSTLKPDYSWYTVLDLKDAFFCLPLAPQSQELFAFEWKDPERGISGQLTWTRLPQGFKNSPTLFNEALHRDLTDFRTQHPEVTLLQYVDDLLLAAPTKKACTQGTRHLLQELGEKGYRASAKKAQICQTKVTYLGYILSEGKRWLTPGRIETVARIPPPRNPREVREFLGKAGFCRLFIPGFAELAAPLYALTKPSTPFTWQTEHQLAFEALKKALLSAPALGLPDTSKPFTLFLDERQGIAKGVLTQKLGPWKRPVAYLSKKLDPVAAGWPPCLRIMAATAMLVKDSAKLTLGQPLTVITPHTLEAIVRQPPDRWITNARLTHYQALLLDTDRVQFGPPVTLNPATLLPVPENQPSPHDCRQVLAETHGTREDLKDQELPDADHTWYTDGSSYLDSGTRRAGAAVVDGHNTIWAQSLPPGTSAQKAELIALTKALELSKGKKANIYTDSRYAFATAHTHGSIYERRGWLTSEGKEIKNKAEIIALLKALFLPQEVAIIHCPGHQKGQDPVAVGNRQADRVARQAAMAEVLTLATEPDNTSHITAGKRTADGSEFEKRTADGSEFESPKKKAKVE

SEQ ID NO: 1979 - protein, 2099 aa, synthetic construct
MPAAKRVKLDGGDKKYSIGLDIGTNSVGWAVITDEYKVPSKKFKVLGNTDRHSIKKNLIGALLFDSGETAEATRLKRTARRRYTRRKNRICYLQEIFSNEMAKVDDSFFHRLEESFLVEEDKKHERHPIFGNIVDEVAYHEKYPTIYHLRKKLVDSTDKADLRLIYLALAHMIKFRGHFLIEGDLNPDNSDVDKLFIQLVQTYNQLFEENPINASGVDAKAILSARLSKSRRLENLIAQLPGEKKNGLFGNLIALSLGLTPNFKSNFDLAEDAKLQLSKDTYDDDLDNLLAQIGDQYADLFLAAKNLSDAILLSDILRVNTEITKAPLSASMIKRYDEHHQDLTLLKALVRQQLPEKYKEIFFDQSKNGYAGYIDGGASQEEFYKFIKPILEKMDGTEELLVKLNREDLLRKQRTFDNGSIPHQIHLGELHAILRRQEDFYPFLKDNREKIEKILTFRIPYYVGPLARGNSRFAWMTRKSEETITPWNFEEVVDKGASAQSFIERMTNFDKNLPNEKVLPKHSLLYEYFTVYNELTKVKYVTEGMRKPAFLSGEQKKAIVDLLFKTNRKVTVKQLKEDYFKKIECFDSVEISGVEDRFNASLGTYHDLLKIIKDKDFLDNEENEDILEDIVLTLTLFEDREMIEERLKTYAHLFDDKVMKQLKRRRYTGWGRLSRKLINGIRDKQSGKTILDFLKSDGFANRNFMQLIHDDSLTFKEDIQKAQVSGQGDSLHEHIANLAGSPAIKKGILQTVKVVDELVKVMGRHKPENIVIEMARENQTTQKGQKNSRERMKRIEEGIKELGSQILKEHPVENTQLQNEKLYLYYLQNGRDMYVDQELDINRLSDYDVDHIVPQSFLKDDSIDNKVLTRSDKARGKSDNVPSEEVVKKMKNYWRQLLNAKLITQRKFDNLTKAERGGLSELDKAGFIKRQLVETRQITKHVAQILDSRMNTKYDENDKLIREVKVITLKSKLVSDFRKDFQFYKVREINNYHHAHDAYLNAVVGTALIKKYPKLESEFVYGDYKVYDVRKMIAKSEQEIGKATAKYFFYSNIMNFFKTEITLANGEIRKRPLIETNGETGEIVWDKGRDFATVRKVLSMPQVNIVKKTEVQTGGFSKESILPKRNSDKLIARKKDWDPKKYGGFDSPTVAYSVLVVAKVEKGKSKKLKSVKELLGITIMERSSFEKNPIDFLEAKGYKEVKKDLIIKLPKYSLFELENGRKRMLASAGELQKGNELALPSKYVNFLYLASHYEKLKGSPEDNEQKQLFVEQHKHYLDEIIEQISEFSKRVILADANLDKVLSAYNKHRDKPIREQAENIIHLFTLTNLGAPAAFKYFDTTIDRKRYTSTKEVLDATLIHQSITGLYETRIDLSQLGGDGGGGGGGGGGGGTVSLQDEHRLFDIPVTTSLPDVWLQDFPQAWAETGGLGRAKCQAPIIIDLKPTAVPVSIKQYPMSLEAHMGIRQHIIKFLELGVLRPCRSPWNTPLLPVKKPGTQDYRPVQDLREINKRTVDIHPTVPNPYNLLSTLKPDYSWYTVLDLKDAFFCLPLAPQSQELFAFEWKDPERGISGQLTWTRLPQGFKNSPTLFNEALHRDLTDFRTQHPEVTLLQYVDDLLLAAPTKKACTQGTRHLLQELGEKGYRASAKKAQICQTKVTYLGYILSEGKRWLTPGRIETVARIPPPRNPREVREFLGKAGFCRLFIPGFAELAAPLYALTKPSTPFTWQTEHQLAFEALKKALLSAPALGLPDTSKPFTLFLDERQGIAKGVLTQKLGPWKRPVAYLSKKLDPVAAGWPPCLRIMAATAMLVKDSAKLTLGQPLTVITPHTLEAIVRQPPDRWITNARLTHYQALLLDTDRVQFGPPVTLNPATLLPVPENQPSPHDCRQVLAETHGTREDLKDQELPDADHTWYTDGSSYLDSGTRRAGAAVVDGHNTIWAQSLPPGTSAQKAELIALTKALELSKGKKANIYTDSRYAFATAHTHGSIYERRGWLTSEGKEIKNKAEIIALLKALFLPQEVAIIHCPGHQKGQDPVAVGNRQADRVARQAAMAEVLTLATEPDNTSHITAGKRTADGSEFEKRTADGSEFESPKKKAKVE

SEQ ID NO: 1980 - protein, 2107 aa, synthetic construct
MPAAKRVKLDGGDKKYSIGLDIGTNSVGWAVITDEYKVPSKKFKVLGNTDRHSIKKNLIGALLFDSGETAEATRLKRTARRRYTRRKNRICYLQEIFSNEMAKVDDSFFHRLEESFLVEEDKKHERHPIFGNIVDEVAYHEKYPTIYHLRKKLVDSTDKADLRLIYLALAHMIKFRGHFLIEGDLNPDNSDVDKLFIQLVQTYNQLFEENPINASGVDAKAILSARLSKSRRLENLIAQLPGEKKNGLFGNLIALSLGLTPNFKSNFDLAEDAKLQLSKDTYDDDLDNLLAQIGDQYADLFLAAKNLSDAILLSDILRVNTEITKAPLSASMIKRYDEHHQDLTLLKALVRQQLPEKYKEIFFDQSKNGYAGYIDGGASQEEFYKFIKPILEKMDGTEELLVKLNREDLLRKQRTFDNGSIPHQIHLGELHAILRRQEDFYPFLKDNREKIEKILTFRIPYYVGPLARGNSRFAWMTRKSEETITPWNFEEVVDKGASAQSFIERMTNFDKNLPNEKVLPKHSLLYEYFTVYNELTKVKYVTEGMRKPAFLSGEQKKAIVDLLFKTNRKVTVKQLKEDYFKKIECFDSVEISGVEDRFNASLGTYHDLLKIIKDKDFLDNEENEDILEDIVLTLTLFEDREMIEERLKTYAHLFDDKVMKQLKRRRYTGWGRLSRKLINGIRDKQSGKTILDFLKSDGFANRNFMQLIHDDSLTFKEDIQKAQVSGQGDSLHEHIANLAGSPAIKKGILQTVKVVDELVKVMGRHKPENIVIEMARENQTTQKGQKNSRERMKRIEEGIKELGSQILKEHPVENTQLQNEKLYLYYLQNGRDMYVDQELDINRLSDYDVDHIVPQSFLKDDSIDNKVLTRSDKARGKSDNVPSEEVVKKMKNYWRQLLNAKLITQRKFDNLTKAERGGLSELDKAGFIKRQLVETRQITKHVAQILDSRMNTKYDENDKLIREVKVITLKSKLVSDFRKDFQFYKVREINNYHHAHDAYLNAVVGTALIKKYPKLESEFVYGDYKVYDVRKMIAKSEQEIGKATAKYFFYSNIMNFFKTEITLANGEIRKRPLIETNGETGEIVWDKGRDFATVRKVLSMPQVNIVKKTEVQTGGFSKESILPKRNSDKLIARKKDWDPKKYGGFDSPTVAYSVLVVAKVEKGKSKKLKSVKELLGITIMERSSFEKNPIDFLEAKGYKEVKKDLIIKLPKYSLFELENGRKRMLASAGELQKGNELALPSKYVNFLYLASHYEKLKGSPEDNEQKQLFVEQHKHYLDEIIEQISEFSKRVILADANLDKVLSAYNKHRDKPIREQAENIIHLFTLTNLGAPAAFKYFDTTIDRKRYTSTKEVLDATLIHQSITGLYETRIDLSQLGGDGGSGSETPGTSESATPESGGTVSLQDEHRLFDIPVTTSLPDVWLQDFPQAWAETGGLGRAKCQAPIIIDLKPTAVPVSIKQYPMSLEAHMGIRQHIIKFLELGVLRPCRSPWNTPLLPVKKPGTQDYRPVQDLREINKRTVDIHPTVPNPYNLLSTLKPDYSWYTVLDLKDAFFCLPLAPQSQELFAFEWKDPERGISGQLTWTRLPQGFKNSPTLFNEALHRDLTDFRTQHPEVTLLQYVDDLLLAAPTKKACTQGTRHLLQELGEKGYRASAKKAQICQTKVTYLGYILSEGKRWLTPGRIETVARIPPPRNPREVREFLGKAGFCRLFIPGFAELAAPLYALTKPSTPFTWQTEHQLAFEALKKALLSAPALGLPDTSKPFTLFLDERQGIAKGVLTQKLGPWKRPVAYLSKKLDPVAAGWPPCLRIMAATAMLVKDSAKLTLGQPLTVITPHTLEAIVRQPPDRWITNARLTHYQALLLDTDRVQFGPPVTLNPATLLPVPENQPSPHDCRQVLAETHGTREDLKDQELPDADHTWYTDGSSYLDSGTRRAGAAVVDGHNTIWAQSLPPGTSAQKAELIALTKALELSKGKKANIYTDSRYAFATAHTHGSIYERRGWLTSEGKEIKNKAEIIALLKALFLPQEVAIIHCPGHQKGQDPVAVGNRQADRVARQAAMAEVLTLATEPDNTSHITAGKRTADGSEFEKRTADGSEFESPKKKAKVE

SEQ ID NO: 1981 - protein, 2102 aa, synthetic construct
MPAAKRVKLDGGDKKYSIGLDIGTNSVGWAVITDEYKVPSKKFKVLGNTDRHSIKKNLIGALLFDSGETAEATRLKRTARRRYTRRKNRICYLQEIFSNEMAKVDDSFFHRLEESFLVEEDKKHERHPIFGNIVDEVAYHEKYPTIYHLRKKLVDSTDKADLRLIYLALAHMIKFRGHFLIEGDLNPDNSDVDKLFIQLVQTYNQLFEENPINASGVDAKAILSARLSKSRRLENLIAQLPGEKKNGLFGNLIALSLGLTPNFKSNFDLAEDAKLQLSKDTYDDDLDNLLAQIGDQYADLFLAAKNLSDAILLSDILRVNTEITKAPLSASMIKRYDEHHQDLTLLKALVRQQLPEKYKEIFFDQSKNGYAGYIDGGASQEEFYKFIKPILEKMDGTEELLVKLNREDLLRKQRTFDNGSIPHQIHLGELHAILRRQEDFYPFLKDNREKIEKILTFRIPYYVGPLARGNSRFAWMTRKSEETITPWNFEEVVDKGASAQSFIERMTNFDKNLPNEKVLPKHSLLYEYFTVYNELTKVKYVTEGMRKPAFLSGEQKKAIVDLLFKTNRKVTVKQLKEDYFKKIECFDSVEISGVEDRFNASLGTYHDLLKIIKDKDFLDNEENEDILEDIVLTLTLFEDREMIEERLKTYAHLFDDKVMKQLKRRRYTGWGRLSRKLINGIRDKQSGKTILDFLKSDGFANRNFMQLIHDDSLTFKEDIQKAQVSGQGDSLHEHIANLAGSPAIKKGILQTVKVVDELVKVMGRHKPENIVIEMARENQTTQKGQKNSRERMKRIEEGIKELGSQILKEHPVENTQLQNEKLYLYYLQNGRDMYVDQELDINRLSDYDVDHIVPQSFLKDDSIDNKVLTRSDKARGKSDNVPSEEVVKKMKNYWRQLLNAKLITQRKFDNLTKAERGGLSELDKAGFIKRQLVETRQITKHVAQILDSRMNTKYDENDKLIREVKVITLKSKLVSDFRKDFQFYKVREINNYHHAHDAYLNAVVGTALIKKYPKLESEFVYGDYKVYDVRKMIAKSEQEIGKATAKYFFYSNIMNFFKTEITLANGEIRKRPLIETNGETGEIVWDKGRDFATVRKVLSMPQVNIVKKTEVQTGGFSKESILPKRNSDKLIARKKDWDPKKYGGFDSPTVAYSVLVVAKVEKGKSKKLKSVKELLGITIMERSSFEKNPIDFLEAKGYKEVKKDLIIKLPKYSLFELENGRKRMLASAGELQKGNELALPSKYVNFLYLASHYEKLKGSPEDNEQKQLFVEQHKHYLDEIIEQISEFSKRVILADANLDKVLSAYNKHRDKPIREQAENIIHLFTLTNLGAPAAFKYFDTTIDRKRYTSTKEVLDATLIHQSITGLYETRIDLSQLGGDGGGSSPAPEAAAKGGTVSLQDEHRLFDIPVTTSLPDVWLQDFPQAWAETGGLGRAKCQAPIIIDLKPTAVPVSIKQYPMSLEAHMGIRQHIIKFLELGVLRPCRSPWNTPLLPVKKPGTQDYRPVQDLREINKRTVDIHPTVPNPYNLLSTLKPDYSWYTVLDLKDAFFCLPLAPQSQELFAFEWKDPERGISGQLTWTRLPQGFKNSPTLFNEALHRDLTDFRTQHPEVTLLQYVDDLLLAAPTKKACTQGTRHLLQELGEKGYRASAKKAQICQTKVTYLGYILSEGKRWLTPGRIETVARIPPPRNPREVREFLGKAGFCRLFIPGFAELAAPLYALTKPSTPFTWQTEHQLAFEALKKALLSAPALGLPDTSKPFTLFLDERQGIAKGVLTQKLGPWKRPVAYLSKKLDPVAAGWPPCLRIMAATAMLVKDSAKLTLGQPLTVITPHTLEAIVRQPPDRWITNARLTHYQALLLDTDRVQFGPPVTLNPATLLPVPENQPSPHDCRQVLAETHGTREDLKDQELPDADHTWYTDGSSYLDSGTRRAGAAVVDGHNTIWAQSLPPGTSAQKAELIALTKALELSKGKKANIYTDSRYAFATAHTHGSIYERRGWLTSEGKEIKNKAEIIALLKALFLPQEVAIIHCPGHQKGQDPVAVGNRQADRVARQAAMAEVLTLATEPDNTSHITAGKRTADGSEFEKRTADGSEFESPKKKAKVE

SEQ ID NO: 1982 - protein, 2100 aa, synthetic construct
MPAAKRVKLDGGDKKYSIGLDIGTNSVGWAVITDEYKVPSKKFKVLGNTDRHSIKKNLIGALLFDSGETAEATRLKRTARRRYTRRKNRICYLQEIFSNEMAKVDDSFFHRLEESFLVEEDKKHERHPIFGNIVDEVAYHEKYPTIYHLRKKLVDSTDKADLRLIYLALAHMIKFRGHFLIEGDLNPDNSDVDKLFIQLVQTYNQLFEENPINASGVDAKAILSARLSKSRRLENLIAQLPGEKKNGLFGNLIALSLGLTPNFKSNFDLAEDAKLQLSKDTYDDDLDNLLAQIGDQYADLFLAAKNLSDAILLSDILRVNTEITKAPLSASMIKRYDEHHQDLTLLKALVRQQLPEKYKEIFFDQSKNGYAGYIDGGASQEEFYKFIKPILEKMDGTEELLVKLNREDLLRKQRTFDNGSIPHQIHLGELHAILRRQEDFYPFLKDNREKIEKILTFRIPYYVGPLARGNSRFAWMTRKSEETITPWNFEEVVDKGASAQSFIERMTNFDKNLPNEKVLPKHSLLYEYFTVYNELTKVKYVTEGMRKPAFLSGEQKKAIVDLLFKTNRKVTVKQLKEDYFKKIECFDSVEISGVEDRFNASLGTYHDLLKIIKDKDFLDNEENEDILEDIVLTLTLFEDREMIEERLKTYAHLFDDKVMKQLKRRRYTGWGRLSRKLINGIRDKQSGKTILDFLKSDGFANRNFMQLIHDDSLTFKEDIQKAQVSGQGDSLHEHIANLAGSPAIKKGILQTVKVVDELVKVMGRHKPENIVIEMARENQTTQKGQKNSRERMKRIEEGIKELGSQILKEHPVENTQLQNEKLYLYYLQNGRDMYVDQELDINRLSDYDVDHIVPQSFLKDDSIDNKVLTRSDKARGKSDNVPSEEVVKKMKNYWRQLLNAKLITQRKFDNLTKAERGGLSELDKAGFIKRQLVETRQITKHVAQILDSRMNTKYDENDKLIREVKVITLKSKLVSDFRKDFQFYKVREINNYHHAHDAYLNAVVGTALIKKYPKLESEFVYGDYKVYDVRKMIAKSEQEIGKATAKYFFYSNIMNFFKTEITLANGEIRKRPLIETNGETGEIVWDKGRDFATVRKVLSMPQVNIVKKTEVQTGGFSKESILPKRNSDKLIARKKDWDPKKYGGFDSPTVAYSVLVVAKVEKGKSKKLKSVKELLGITIMERSSFEKNPIDFLEAKGYKEVKKDLIIKLPKYSLFELENGRKRMLASAGELQKGNELALPSKYVNFLYLASHYEKLKGSPEDNEQKQLFVEQHKHYLDEIIEQISEFSKRVILADANLDKVLSAYNKHRDKPIREQAENIIHLFTLTNLGAPAAFKYFDTTIDRKRYTSTKEVLDATLIHQSITGLYETRIDLSQLGGDGGGSSGGGGGSGGTVSLQDEHRLFDIPVTTSLPDVWLQDFPQAWAETGGLGRAKCQAPIIIDLKPTAVPVSIKQYPMSLEAHMGIRQHIIKFLELGVLRPCRSPWNTPLLPVKKPGTQDYRPVQDLREINKRTVDIHPTVPNPYNLLSTLKPDYSWYTVLDLKDAFFCLPLAPQSQELFAFEWKDPERGISGQLTWTRLPQGFKNSPTLFNEALHRDLTDFRTQHPEVTLLQYVDDLLLAAPTKKACTQGTRHLLQELGEKGYRASAKKAQICQTKVTYLGYILSEGKRWLTPGRIETVARIPPPRNPREVREFLGKAGFCRLFIPGFAELAAPLYALTKPSTPFTWQTEHQLAFEALKKALLSAPALGLPDTSKPFTLFLDERQGIAKGVLTQKLGPWKRPVAYLSKKLDPVAAGWPPCLRIMAATAMLVKDSAKLTLGQPLTVITPHTLEAIVRQPPDRWITNARLTHYQALLLDTDRVQFGPPVTLNPATLLPVPENQPSPHDCRQVLAETHGTREDLKDQELPDADHTWYTDGSSYLDSGTRRAGAAVVDGHNTIWAQSLPPGTSAQKAELIALTKALELSKGKKANIYTDSRYAFATAHTHGSIYERRGWLTSEGKEIKNKAEIIALLKALFLPQEVAIIHCPGHQKGQDPVAVGNRQADRVARQAAMAEVLTLATEPDNTSHITAGKRTADGSEFEKRTADGSEFESPKKKAKVE

SEQ ID NO: 1983 - protein, 2097 aa, synthetic construct
MPAAKRVKLDGGDKKYSIGLDIGTNSVGWAVITDEYKVPSKKFKVLGNTDRHSIKKNLIGALLFDSGETAEATRLKRTARRRYTRRKNRICYLQEIFSNEMAKVDDSFFHRLEESFLVEEDKKHERHPIFGNIVDEVAYHEKYPTIYHLRKKLVDSTDKADLRLIYLALAHMIKFRGHFLIEGDLNPDNSDVDKLFIQLVQTYNQLFEENPINASGVDAKAILSARLSKSRRLENLIAQLPGEKKNGLFGNLIALSLGLTPNFKSNFDLAEDAKLQLSKDTYDDDLDNLLAQIGDQYADLFLAAKNLSDAILLSDILRVNTEITKAPLSASMIKRYDEHHQDLTLLKALVRQQLPEKYKEIFFDQSKNGYAGYIDGGASQEEFYKFIKPILEKMDGTEELLVKLNREDLLRKQRTFDNGSIPHQIHLGELHAILRRQEDFYPFLKDNREKIEKILTFRIPYYVGPLARGNSRFAWMTRKSEETITPWNFEEVVDKGASAQSFIERMTNFDKNLPNEKVLPKHSLLYEYFTVYNELTKVKYVTEGMRKPAFLSGEQKKAIVDLLFKTNRKVTVKQLKEDYFKKIECFDSVEISGVEDRFNASLGTYHDLLKIIKDKDFLDNEENEDILEDIVLTLTLFEDREMIEERLKTYAHLFDDKVMKQLKRRRYTGWGRLSRKLINGIRDKQSGKTILDFLKSDGFANRNFMQLIHDDSLTFKEDIQKAQVSGQGDSLHEHIANLAGSPAIKKGILQTVKVVDELVKVMGRHKPENIVIEMARENQTTQKGQKNSRERMKRIEEGIKELGSQILKEHPVENTQLQNEKLYLYYLQNGRDMYVDQELDINRLSDYDVDHIVPQSFLKDDSIDNKVLTRSDKARGKSDNVPSEEVVKKMKNYWRQLLNAKLITQRKFDNLTKAERGGLSELDKAGFIKRQLVETRQITKHVAQILDSRMNTKYDENDKLIREVKVITLKSKLVSDFRKDFQFYKVREINNYHHAHDAYLNAVVGTALIKKYPKLESEFVYGDYKVYDVRKMIAKSEQEIGKATAKYFFYSNIMNFFKTEITLANGEIRKRPLIETNGETGEIVWDKGRDFATVRKVLSMPQVNIVKKTEVQTGGFSKESILPKRNSDKLIARKKDWDPKKYGGFDSPTVAYSVLVVAKVEKGKSKKLKSVKELLGITIMERSSFEKNPIDFLEAKGYKEVKKDLIIKLPKYSLFELENGRKRMLASAGELQKGNELALPSKYVNFLYLASHYEKLKGSPEDNEQKQLFVEQHKHYLDEIIEQISEFSKRVILADANLDKVLSAYNKHRDKPIREQAENIIHLFTLTNLGAPAAFKYFDTTIDRKRYTSTKEVLDATLIHQSITGLYETRIDLSQLGGDGGPAPGGGGGTVSLQDEHRLFDIPVTTSLPDVWLQDFPQAWAETGGLGRAKCQAPIIIDLKPTAVPVSIKQYPMSLEAHMGIRQHIIKFLELGVLRPCRSPWNTPLLPVKKPGTQDYRPVQDLREINKRTVDIHPTVPNPYNLLSTLKPDYSWYTVLDLKDAFFCLPLAPQSQELFAFEWKDPERGISGQLTWTRLPQGFKNSPTLFNEALHRDLTDFRTQHPEVTLLQYVDDLLLAAPTKKACTQGTRHLLQELGEKGYRASAKKAQICQTKVTYLGYILSEGKRWLTPGRIETVARIPPPRNPREVREFLGKAGFCRLFIPGFAELAAPLYALTKPSTPFTWQTEHQLAFEALKKALLSAPALGLPDTSKPFTLFLDERQGIAKGVLTQKLGPWKRPVAYLSKKLDPVAAGWPPCLRIMAATAMLVKDSAKLTLGQPLTVITPHTLEAIVRQPPDRWITNARLTHYQALLLDTDRVQFGPPVTLNPATLLPVPENQPSPHDCRQVLAETHGTREDLKDQELPDADHTWYTDGSSYLDSGTRRAGAAVVDGHNTIWAQSLPPGTSAQKAELIALTKALELSKGKKANIYTDSRYAFATAHTHGSIYERRGWLTSEGKEIKNKAEIIALLKALFLPQEVAIIHCPGHQKGQDPVAVGNRQADRVARQAAMAEVLTLATEPDNTSHITAGKRTADGSEFEKRTADGSEFESPKKKAKVE

SEQ ID NO: 1984 - protein, 2102 aa, synthetic construct
MPAAKRVKLDGGDKKYSIGLDIGTNSVGWAVITDEYKVPSKKFKVLGNTDRHSIKKNLIGALLFDSGETAEATRLKRTARRRYTRRKNRICYLQEIFSNEMAKVDDSFFHRLEESFLVEEDKKHERHPIFGNIVDEVAYHEKYPTIYHLRKKLVDSTDKADLRLIYLALAHMIKFRGHFLIEGDLNPDNSDVDKLFIQLVQTYNQLFEENPINASGVDAKAILSARLSKSRRLENLIAQLPGEKKNGLFGNLIALSLGLTPNFKSNFDLAEDAKLQLSKDTYDDDLDNLLAQIGDQYADLFLAAKNLSDAILLSDILRVNTEITKAPLSASMIKRYDEHHQDLTLLKALVRQQLPEKYKEIFFDQSKNGYAGYIDGGASQEEFYKFIKPILEKMDGTEELLVKLNREDLLRKQRTFDNGSIPHQIHLGELHAILRRQEDFYPFLKDNREKIEKILTFRIPYYVGPLARGNSRFAWMTRKSEETITPWNFEEVVDKGASAQSFIERMTNFDKNLPNEKVLPKHSLLYEYFTVYNELTKVKYVTEGMRKPAFLSGEQKKAIVDLLFKTNRKVTVKQLKEDYFKKIECFDSVEISGVEDRFNASLGTYHDLLKIIKDKDFLDNEENEDILEDIVLTLTLFEDREMIEERLKTYAHLFDDKVMKQLKRRRYTGWGRLSRKLINGIRDKQSGKTILDFLKSDGFANRNFMQLIHDDSLTFKEDIQKAQVSGQGDSLHEHIANLAGSPAIKKGILQTVKVVDELVKVMGRHKPENIVIEMARENQTTQKGQKNSRERMKRIEEGIKELGSQILKEHPVENTQLQNEKLYLYYLQNGRDMYVDQELDINRLSDYDVDHIVPQSFLKDDSIDNKVLTRSDKARGKSDNVPSEEVVKKMKNYWRQLLNAKLITQRKFDNLTKAERGGLSELDKAGFIKRQLVETRQITKHVAQILDSRMNTKYDENDKLIREVKVITLKSKLVSDFRKDFQFYKVREINNYHHAHDAYLNAVVGTALIKKYPKLESEFVYGDYKVYDVRKMIAKSEQEIGKATAKYFFYSNIMNFFKTEITLANGEIRKRPLIETNGETGEIVWDKGRDFATVRKVLSMPQVNIVKKTEVQTGGFSKESILPKRNSDKLIARKKDWDPKKYGGFDSPTVAYSVLVVAKVEKGKSKKLKSVKELLGITIMERSSFEKNPIDFLEAKGYKEVKKDLIIKLPKYSLFELENGRKRMLASAGELQKGNELALPSKYVNFLYLASHYEKLKGSPEDNEQKQLFVEQHKHYLDEIIEQISEFSKRVILADANLDKVLSAYNKHRDKPIREQAENIIHLFTLTNLGAPAAFKYFDTTIDRKRYTSTKEVLDATLIHQSITGLYETRIDLSQLGGDGGGGSEAAAKGGGGGTVSLQDEHRLFDIPVTTSLPDVWLQDFPQAWAETGGLGRAKCQAPIIIDLKPTAVPVSIKQYPMSLEAHMGIRQHIIKFLELGVLRPCRSPWNTPLLPVKKPGTQDYRPVQDLREINKRTVDIHPTVPNPYNLLSTLKPDYSWYTVLDLKDAFFCLPLAPQSQELFAFEWKDPERGISGQLTWTRLPQGFKNSPTLFNEALHRDLTDFRTQHPEVTLLQYVDDLLLAAPTKKACTQGTRHLLQELGEKGYRASAKKAQICQTKVTYLGYILSEGKRWLTPGRIETVARIPPPRNPREVREFLGKAGFCRLFIPGFAELAAPLYALTKPSTPFTWQTEHQLAFEALKKALLSAPALGLPDTSKPFTLFLDERQGIAKGVLTQKLGPWKRPVAYLSKKLDPVAAGWPPCLRIMAATAMLVKDSAKLTLGQPLTVITPHTLEAIVRQPPDRWITNARLTHYQALLLDTDRVQFGPPVTLNPATLLPVPENQPSPHDCRQVLAETHGTREDLKDQELPDADHTWYTDGSSYLDSGTRRAGAAVVDGHNTIWAQSLPPGTSAQKAELIALTKALELSKGKKANIYTDSRYAFATAHTHGSIYERRGWLTSEGKEIKNKAEIIALLKALFLPQEVAIIHCPGHQKGQDPVAVGNRQADRVARQAAMAEVLTLATEPDNTSHITAGKRTADGSEFEKRTADGSEFESPKKKAKVE

SEQ ID NO: 1985 - protein, 2100 aa, synthetic construct
MPAAKRVKLDGGDKKYSIGLDIGTNSVGWAVITDEYKVPSKKFKVLGNTDRHSIKKNLIGALLFDSGETAEATRLKRTARRRYTRRKNRICYLQEIFSNEMAKVDDSFFHRLEESFLVEEDKKHERHPIFGNIVDEVAYHEKYPTIYHLRKKLVDSTDKADLRLIYLALAHMIKFRGHFLIEGDLNPDNSDVDKLFIQLVQTYNQLFEENPINASGVDAKAILSARLSKSRRLENLIAQLPGEKKNGLFGNLIALSLGLTPNFKSNFDLAEDAKLQLSKDTYDDDLDNLLAQIGDQYADLFLAAKNLSDAILLSDILRVNTEITKAPLSASMIKRYDEHHQDLTLLKALVRQQLPEKYKEIFFDQSKNGYAGYIDGGASQEEFYKFIKPILEKMDGTEELLVKLNREDLLRKQRTFDNGSIPHQIHLGELHAILRRQEDFYPFLKDNREKIEKILTFRIPYYVGPLARGNSRFAWMTRKSEETITPWNFEEVVDKGASAQSFIERMTNFDKNLPNEKVLPKHSLLYEYFTVYNELTKVKYVTEGMRKPAFLSGEQKKAIVDLLFKTNRKVTVKQLKEDYFKKIECFDSVEISGVEDRFNASLGTYHDLLKIIKDKDFLDNEENEDILEDIVLTLTLFEDREMIEERLKTYAHLFDDKVMKQLKRRRYTGWGRLSRKLINGIRDKQSGKTILDFLKSDGFANRNFMQLIHDDSLTFKEDIQKAQVSGQGDSLHEHIANLAGSPAIKKGILQTVKVVDELVKVMGRHKPENIVIEMARENQTTQKGQKNSRERMKRIEEGIKELGSQILKEHPVENTQLQNEKLYLYYLQNGRDMYVDQELDINRLSDYDVDHIVPQSFLKDDSIDNKVLTRSDKARGKSDNVPSEEVVKKMKNYWRQLLNAKLITQRKFDNLTKAERGGLSELDKAGFIKRQLVETRQITKHVAQILDSRMNTKYDENDKLIREVKVITLKSKLVSDFRKDFQFYKVREINNYHHAHDAYLNAVVGTALIKKYPKLESEFVYGDYKVYDVRKMIAKSEQEIGKATAKYFFYSNIMNFFKTEITLANGEIRKRPLIETNGETGEIVWDKGRDFATVRKVLSMPQVNIVKKTEVQTGGFSKESILPKRNSDKLIARKKDWDPKKYGGFDSPTVAYSVLVVAKVEKGKSKKLKSVKELLGITIMERSSFEKNPIDFLEAKGYKEVKKDLIIKLPKYSLFELENGRKRMLASAGELQKGNELALPSKYVNFLYLASHYEKLKGSPEDNEQKQLFVEQHKHYLDEIIEQISEFSKRVILADANLDKVLSAYNKHRDKPIREQAENIIHLFTLTNLGAPAAFKYFDTTIDRKRYTSTKEVLDATLIHQSITGLYETRIDLSQLGGDGGGSSPAPGGSGGTVSLQDEHRLFDIPVTTSLPDVWLQDFPQAWAETGGLGRAKCQAPIIIDLKPTAVPVSIKQYPMSLEAHMGIRQHIIKFLELGVLRPCRSPWNTPLLPVKKPGTQDYRPVQDLREINKRTVDIHPTVPNPYNLLSTLKPDYSWYTVLDLKDAFFCLPLAPQSQELFAFEWKDPERGISGQLTWTRLPQGFKNSPTLFNEALHRDLTDFRTQHPEVTLLQYVDDLLLAAPTKKACTQGTRHLLQELGEKGYRASAKKAQICQTKVTYLGYILSEGKRWLTPGRIETVARIPPPRNPREVREFLGKAGFCRLFIPGFAELAAPLYALTKPSTPFTWQTEHQLAFEALKKALLSAPALGLPDTSKPFTLFLDERQGIAKGVLTQKLGPWKRPVAYLSKKLDPVAAGWPPCLRIMAATAMLVKDSAKLTLGQPLTVITPHTLEAIVRQPPDRWITNARLTHYQALLLDTDRVQFGPPVTLNPATLLPVPENQPSPHDCRQVLAETHGTREDLKDQELPDADHTWYTDGSSYLDSGTRRAGAAVVDGHNTIWAQSLPPGTSAQKAELIALTKALELSKGKKANIYTDSRYAFATAHTHGSIYERRGWLTSEGKEIKNKAEIIALLKALFLPQEVAIIHCPGHQKGQDPVAVGNRQADRVARQAAMAEVLTLATEPDNTSHITAGKRTADGSEFEKRTADGSEFESPKKKAKVE

SEQ ID NO: 1986 - protein, 2099 aa, synthetic construct
MPAAKRVKLDGGDKKYSIGLDIGTNSVGWAVITDEYKVPSKKFKVLGNTDRHSIKKNLIGALLFDSGETAEATRLKRTARRRYTRRKNRICYLQEIFSNEMAKVDDSFFHRLEESFLVEEDKKHERHPIFGNIVDEVAYHEKYPTIYHLRKKLVDSTDKADLRLIYLALAHMIKFRGHFLIEGDLNPDNSDVDKLFIQLVQTYNQLFEENPINASGVDAKAILSARLSKSRRLENLIAQLPGEKKNGLFGNLIALSLGLTPNFKSNFDLAEDAKLQLSKDTYDDDLDNLLAQIGDQYADLFLAAKNLSDAILLSDILRVNTEITKAPLSASMIKRYDEHHQDLTLLKALVRQQLPEKYKEIFFDQSKNGYAGYIDGGASQEEFYKFIKPILEKMDGTEELLVKLNREDLLRKQRTFDNGSIPHQIHLGELHAILRRQEDFYPFLKDNREKIEKILTFRIPYYVGPLARGNSRFAWMTRKSEETITPWNFEEVVDKGASAQSFIERMTNFDKNLPNEKVLPKHSLLYEYFTVYNELTKVKYVTEGMRKPAFLSGEQKKAIVDLLFKTNRKVTVKQLKEDYFKKIECFDSVEISGVEDRFNASLGTYHDLLKIIKDKDFLDNEENEDILEDIVLTLTLFEDREMIEERLKTYAHLFDDKVMKQLKRRRYTGWGRLSRKLINGIRDKQSGKTILDFLKSDGFANRNFMQLIHDDSLTFKEDIQKAQVSGQGDSLHEHIANLAGSPAIKKGILQTVKVVDELVKVMGRHKPENIVIEMARENQTTQKGQKNSRERMKRIEEGIKELGSQILKEHPVENTQLQNEKLYLYYLQNGRDMYVDQELDINRLSDYDVDHIVPQSFLKDDSIDNKVLTRSDKARGKSDNVPSEEVVKKMKNYWRQLLNAKLITQRKFDNLTKAERGGLSELDKAGFIKRQLVETRQITKHVAQILDSRMNTKYDENDKLIREVKVITLKSKLVSDFRKDFQFYKVREINNYHHAHDAYLNAVVGTALIKKYPKLESEFVYGDYKVYDVRKMIAKSEQEIGKATAKYFFYSNIMNFFKTEITLANGEIRKRPLIETNGETGEIVWDKGRDFATVRKVLSMPQVNIVKKTEVQTGGFSKESILPKRNSDKLIARKKDWDPKKYGGFDSPTVAYSVLVVAKVEKGKSKKLKSVKELLGITIMERSSFEKNPIDFLEAKGYKEVKKDLIIKLPKYSLFELENGRKRMLASAGELQKGNELALPSKYVNFLYLASHYEKLKGSPEDNEQKQLFVEQHKHYLDEIIEQISEFSKRVILADANLDKVLSAYNKHRDKPIREQAENIIHLFTLTNLGAPAAFKYFDTTIDRKRYTSTKEVLDATLIHQSITGLYETRIDLSQLGGDGGEAAAKGGGGGTVSLQDEHRLFDIPVTTSLPDVWLQDFPQAWAETGGLGRAKCQAPIIIDLKPTAVPVSIKQYPMSLEAHMGIRQHIIKFLELGVLRPCRSPWNTPLLPVKKPGTQDYRPVQDLREINKRTVDIHPTVPNPYNLLSTLKPDYSWYTVLDLKDAFFCLPLAPQSQELFAFEWKDPERGISGQLTWTRLPQGFKNSPTLFNEALHRDLTDFRTQHPEVTLLQYVDDLLLAAPTKKACTQGTRHLLQELGEKGYRASAKKAQICQTKVTYLGYILSEGKRWLTPGRIETVARIPPPRNPREVREFLGKAGFCRLFIPGFAELAAPLYALTKPSTPFTWQTEHQLAFEALKKALLSAPALGLPDTSKPFTLFLDERQGIAKGVLTQKLGPWKRPVAYLSKKLDPVAAGWPPCLRIMAATAMLVKDSAKLTLGQPLTVITPHTLEAIVRQPPDRWITNARLTHYQALLLDTDRVQFGPPVTLNPATLLPVPENQPSPHDCRQVLAETHGTREDLKDQELPDADHTWYTDGSSYLDSGTRRAGAAVVDGHNTIWAQSLPPGTSAQKAELIALTKALELSKGKKANIYTDSRYAFATAHTHGSIYERRGWLTSEGKEIKNKAEIIALLKALFLPQEVAIIHCPGHQKGQDPVAVGNRQADRVARQAAMAEVLTLATEPDNTSHITAGKRTADGSEFEKRTADGSEFESPKKKAKVE

SEQ ID NO: 1987 - protein, 2106 aa, synthetic construct
MPAAKRVKLDGGDKKYSIGLDIGTNSVGWAVITDEYKVPSKKFKVLGNTDRHSIKKNLIGALLFDSGETAEATRLKRTARRRYTRRKNRICYLQEIFSNEMAKVDDSFFHRLEESFLVEEDKKHERHPIFGNIVDEVAYHEKYPTIYHLRKKLVDSTDKADLRLIYLALAHMIKFRGHFLIEGDLNPDNSDVDKLFIQLVQTYNQLFEENPINASGVDAKAILSARLSKSRRLENLIAQLPGEKKNGLFGNLIALSLGLTPNFKSNFDLAEDAKLQLSKDTYDDDLDNLLAQIGDQYADLFLAAKNLSDAILLSDILRVNTEITKAPLSASMIKRYDEHHQDLTLLKALVRQQLPEKYKEIFFDQSKNGYAGYIDGGASQEEFYKFIKPILEKMDGTEELLVKLNREDLLRKQRTFDNGSIPHQIHLGELHAILRRQEDFYPFLKDNREKIEKILTFRIPYYVGPLARGNSRFAWMTRKSEETITPWNFEEVVDKGASAQSFIERMTNFDKNLPNEKVLPKHSLLYEYFTVYNELTKVKYVTEGMRKPAFLSGEQKKAIVDLLFKTNRKVTVKQLKEDYFKKIECFDSVEISGVEDRFNASLGTYHDLLKIIKDKDFLDNEENEDILEDIVLTLTLFEDREMIEERLKTYAHLFDDKVMKQLKRRRYTGWGRLSRKLINGIRDKQSGKTILDFLKSDGFANRNFMQLIHDDSLTFKEDIQKAQVSGQGDSLHEHIANLAGSPAIKKGILQTVKVVDELVKVMGRHKPENIVIEMARENQTTQKGQKNSRERMKRIEEGIKELGSQILKEHPVENTQLQNEKLYLYYLQNGRDMYVDQELDINRLSDYDVDHIVPQSFLKDDSIDNKVLTRSDKARGKSDNVPSEEVVKKMKNYWRQLLNAKLITQRKFDNLTKAERGGLSELDKAGFIKRQLVETRQITKHVAQILDSRMNTKYDENDKLIREVKVITLKSKLVSDFRKDFQFYKVREINNYHHAHDAYLNAVVGTALIKKYPKLESEFVYGDYKVYDVRKMIAKSEQEIGKATAKYFFYSNIMNFFKTEITLANGEIRKRPLIETNGETGEIVWDKGRDFATVRKVLSMPQVNIVKKTEVQTGGFSKESILPKRNSDKLIARKKDWDPKKYGGFDSPTVAYSVLVVAKVEKGKSKKLKSVKELLGITIMERSSFEKNPIDFLEAKGYKEVKKDLIIKLPKYSLFELENGRKRMLASAGELQKGNELALPSKYVNFLYLASHYEKLKGSPEDNEQKQLFVEQHKHYLDEIIEQISEFSKRVILADANLDKVLSAYNKHRDKPIREQAENIIHLFTLTNLGAPAAFKYFDTTIDRKRYTSTKEVLDATLIHQSITGLYETRIDLSQLGGDGGGGGGSGGGGSGGGGSGGTVSLQDEHRLFDIPVTTSLPDVWLQDFPQAWAETGGLGRAKCQAPIIIDLKPTAVPVSIKQYPMSLEAHMGIRQHIIKFLELGVLRPCRSPWNTPLLPVKKPGTQDYRPVQDLREINKRTVDIHPTVPNPYNLLSTLKPDYSWYTVLDLKDAFFCLPLAPQSQELFAFEWKDPERGISGQLTWTRLPQGFKNSPTLFNEALHRDLTDFRTQHPEVTLLQYVDDLLLAAPTKKACTQGTRHLLQELGEKGYRASAKKAQICQTKVTYLGYILSEGKRWLTPGRIETVARIPPPRNPREVREFLGKAGFCRLFIPGFAELAAPLYALTKPSTPFTWQTEHQLAFEALKKALLSAPALGLPDTSKPFTLFLDERQGIAKGVLTQKLGPWKRPVAYLSKKLDPVAAGWPPCLRIMAATAMLVKDSAKLTLGQPLTVITPHTLEAIVRQPPDRWITNARLTHYQALLLDTDRVQFGPPVTLNPATLLPVPENQPSPHDCRQVLAETHGTREDLKDQELPDADHTWYTDGSSYLDSGTRRAGAAVVDGHNTIWAQSLPPGTSAQKAELIALTKALELSKGKKANIYTDSRYAFATAHTHGSIYERRGWLTSEGKEIKNKAEIIALLKALFLPQEVAIIHCPGHQKGQDPVAVGNRQADRVARQAAMAEVLTLATEPDNTSHITAGKRTADGSEFEKRTADGSEFESPKKKAKVE

SEQ ID NO: 1988 - protein, 2100 aa, synthetic construct
MPAAKRVKLDGGDKKYSIGLDIGTNSVGWAVITDEYKVPSKKFKVLGNTDRHSIKKNLIGALLFDSGETAEATRLKRTARRRYTRRKNRICYLQEIFSNEMAKVDDSFFHRLEESFLVEEDKKHERHPIFGNIVDEVAYHEKYPTIYHLRKKLVDSTDKADLRLIYLALAHMIKFRGHFLIEGDLNPDNSDVDKLFIQLVQTYNQLFEENPINASGVDAKAILSARLSKSRRLENLIAQLPGEKKNGLFGNLIALSLGLTPNFKSNFDLAEDAKLQLSKDTYDDDLDNLLAQIGDQYADLFLAAKNLSDAILLSDILRVNTEITKAPLSASMIKRYDEHHQDLTLLKALVRQQLPEKYKEIFFDQSKNGYAGYIDGGASQEEFYKFIKPILEKMDGTEELLVKLNREDLLRKQRTFDNGSIPHQIHLGELHAILRRQEDFYPFLKDNREKIEKILTFRIPYYVGPLARGNSRFAWMTRKSEETITPWNFEEVVDKGASAQSFIERMTNFDKNLPNEKVLPKHSLLYEYFTVYNELTKVKYVTEGMRKPAFLSGEQKKAIVDLLFKTNRKVTVKQLKEDYFKKIECFDSVEISGVEDRFNASLGTYHDLLKIIKDKDFLDNEENEDILEDIVLTLTLFEDREMIEERLKTYAHLFDDKVMKQLKRRRYTGWGRLSRKLINGIRDKQSGKTILDFLKSDGFANRNFMQLIHDDSLTFKEDIQKAQVSGQGDSLHEHIANLAGSPAIKKGILQTVKVVDELVKVMGRHKPENIVIEMARENQTTQKGQKNSRERMKRIEEGIKELGSQILKEHPVENTQLQNEKLYLYYLQNGRDMYVDQELDINRLSDYDVDHIVPQSFLKDDSIDNKVLTRSDKARGKSDNVPSEEVVKKMKNYWRQLLNAKLITQRKFDNLTKAERGGLSELDKAGFIKRQLVETRQITKHVAQILDSRMNTKYDENDKLIREVKVITLKSKLVSDFRKDFQFYKVREINNYHHAHDAYLNAVVGTALIKKYPKLESEFVYGDYKVYDVRKMIAKSEQEIGKATAKYFFYSNIMNFFKTEITLANGEIRKRPLIETNGETGEIVWDKGRDFATVRKVLSMPQVNIVKKTEVQTGGFSKESILPKRNSDKLIARKKDWDPKKYGGFDSPTVAYSVLVVAKVEKGKSKKLKSVKELLGITIMERSSFEKNPIDFLEAKGYKEVKKDLIIKLPKYSLFELENGRKRMLASAGELQKGNELALPSKYVNFLYLASHYEKLKGSPEDNEQKQLFVEQHKHYLDEIIEQISEFSKRVILADANLDKVLSAYNKHRDKPIREQAENIIHLFTLTNLGAPAAFKYFDTTIDRKRYTSTKEVLDATLIHQSITGLYETRIDLSQLGGDGGGGGPAPGSSGGTVSLQDEHRLFDIPVTTSLPDVWLQDFPQAWAETGGLGRAKCQAPIIIDLKPTAVPVSIKQYPMSLEAHMGIRQHIIKFLELGVLRPCRSPWNTPLLPVKKPGTQDYRPVQDLREINKRTVDIHPTVPNPYNLLSTLKPDYSWYTVLDLKDAFFCLPLAPQSQELFAFEWKDPERGISGQLTWTRLPQGFKNSPTLFNEALHRDLTDFRTQHPEVTLLQYVDDLLLAAPTKKACTQGTRHLLQELGEKGYRASAKKAQICQTKVTYLGYILSEGKRWLTPGRIETVARIPPPRNPREVREFLGKAGFCRLFIPGFAELAAPLYALTKPSTPFTWQTEHQLAFEALKKALLSAPALGLPDTSKPFTLFLDERQGIAKGVLTQKLGPWKRPVAYLSKKLDPVAAGWPPCLRIMAATAMLVKDSAKLTLGQPLTVITPHTLEAIVRQPPDRWITNARLTHYQALLLDTDRVQFGPPVTLNPATLLPVPENQPSPHDCRQVLAETHGTREDLKDQELPDADHTWYTDGSSYLDSGTRRAGAAVVDGHNTIWAQSLPPGTSAQKAELIALTKALELSKGKKANIYTDSRYAFATAHTHGSIYERRGWLTSEGKEIKNKAEIIALLKALFLPQEVAIIHCPGHQKGQDPVAVGNRQADRVARQAAMAEVLTLATEPDNTSHITAGKRTADGSEFEKRTADGSEFESPKKKAKVE

SEQ ID NO: 1989 - protein, 2102 aa, synthetic construct
MPAAKRVKLDGGDKKYSIGLDIGTNSVGWAVITDEYKVPSKKFKVLGNTDRHSIKKNLIGALLFDSGETAEATRLKRTARRRYTRRKNRICYLQEIFSNEMAKVDDSFFHRLEESFLVEEDKKHERHPIFGNIVDEVAYHEKYPTIYHLRKKLVDSTDKADLRLIYLALAHMIKFRGHFLIEGDLNPDNSDVDKLFIQLVQTYNQLFEENPINASGVDAKAILSARLSKSRRLENLIAQLPGEKKNGLFGNLIALSLGLTPNFKSNFDLAEDAKLQLSKDTYDDDLDNLLAQIGDQYADLFLAAKNLSDAILLSDILRVNTEITKAPLSASMIKRYDEHHQDLTLLKALVRQQLPEKYKEIFFDQSKNGYAGYIDGGASQEEFYKFIKPILEKMDGTEELLVKLNREDLLRKQRTFDNGSIPHQIHLGELHAILRRQEDFYPFLKDNREKIEKILTFRIPYYVGPLARGNSRFAWMTRKSEETITPWNFEEVVDKGASAQSFIERMTNFDKNLPNEKVLPKHSLLYEYFTVYNELTKVKYVTEGMRKPAFLSGEQKKAIVDLLFKTNRKVTVKQLKEDYFKKIECFDSVEISGVEDRFNASLGTYHDLLKIIKDKDFLDNEENEDILEDIVLTLTLFEDREMIEERLKTYAHLFDDKVMKQLKRRRYTGWGRLSRKLINGIRDKQSGKTILDFLKSDGFANRNFMQLIHDDSLTFKEDIQKAQVSGQGDSLHEHIANLAGSPAIKKGILQTVKVVDELVKVMGRHKPENIVIEMARENQTTQKGQKNSRERMKRIEEGIKELGSQILKEHPVENTQLQNEKLYLYYLQNGRDMYVDQELDINRLSDYDVDHIVPQSFLKDDSIDNKVLTRSDKARGKSDNVPSEEVVKKMKNYWRQLLNAKLITQRKFDNLTKAERGGLSELDKAGFIKRQLVETRQITKHVAQILDSRMNTKYDENDKLIREVKVITLKSKLVSDFRKDFQFYKVREINNYHHAHDAYLNAVVGTALIKKYPKLESEFVYGDYKVYDVRKMIAKSEQEIGKATAKYFFYSNIMNFFKTEITLANGEIRKRPLIETNGETGEIVWDKGRDFATVRKVLSMPQVNIVKKTEVQTGGFSKESILPKRNSDKLIARKKDWDPKKYGGFDSPTVAYSVLVVAKVEKGKSKKLKSVKELLGITIMERSSFEKNPIDFLEAKGYKEVKKDLIIKLPKYSLFELENGRKRMLASAGELQKGNELALPSKYVNFLYLASHYEKLKGSPEDNEQKQLFVEQHKHYLDEIIEQISEFSKRVILADANLDKVLSAYNKHRDKPIREQAENIIHLFTLTNLGAPAAFKYFDTTIDRKRYTSTKEVLDATLIHQSITGLYETRIDLSQLGGDGGGGSEAAAKPAPGGTVSLQDEHRLFDIPVTTSLPDVWLQDFPQAWAETGGLGRAKCQAPIIIDLKPTAVPVSIKQYPMSLEAHMGIRQHIIKFLELGVLRPCRSPWNTPLLPVKKPGTQDYRPVQDLREINKRTVDIHPTVPNPYNLLSTLKPDYSWYTVLDLKDAFFCLPLAPQSQELFAFEWKDPERGISGQLTWTRLPQGFKNSPTLFNEALHRDLTDFRTQHPEVTLLQYVDDLLLAAPTKKACTQGTRHLLQELGEKGYRASAKKAQICQTKVTYLGYILSEGKRWLTPGRIETVARIPPPRNPREVREFLGKAGFCRLFIPGFAELAAPLYALTKPSTPFTWQTEHQLAFEALKKALLSAPALGLPDTSKPFTLFLDERQGIAKGVLTQKLGPWKRPVAYLSKKLDPVAAGWPPCLRIMAATAMLVKDSAKLTLGQPLTVITPHTLEAIVRQPPDRWITNARLTHYQALLLDTDRVQFGPPVTLNPATLLPVPENQPSPHDCRQVLAETHGTREDLKDQELPDADHTWYTDGSSYLDSGTRRAGAAVVDGHNTIWAQSLPPGTSAQKAELIALTKALELSKGKKANIYTDSRYAFATAHTHGSIYERRGWLTSEGKEIKNKAEIIALLKALFLPQEVAIIHCPGHQKGQDPVAVGNRQADRVARQAAMAEVLTLATEPDNTSHITAGKRTADGSEFEKRTADGSEFESPKKKAKVE

SEQ ID NO: 1990 - protein, 2100 aa, synthetic construct
MPAAKRVKLDGGDKKYSIGLDIGTNSVGWAVITDEYKVPSKKFKVLGNTDRHSIKKNLIGALLFDSGETAEATRLKRTARRRYTRRKNRICYLQEIFSNEMAKVDDSFFHRLEESFLVEEDKKHERHPIFGNIVDEVAYHEKYPTIYHLRKKLVDSTDKADLRLIYLALAHMIKFRGHFLIEGDLNPDNSDVDKLFIQLVQTYNQLFEENPINASGVDAKAILSARLSKSRRLENLIAQLPGEKKNGLFGNLIALSLGLTPNFKSNFDLAEDAKLQLSKDTYDDDLDNLLAQIGDQYADLFLAAKNLSDAILLSDILRVNTEITKAPLSASMIKRYDEHHQDLTLLKALVRQQLPEKYKEIFFDQSKNGYAGYIDGGASQEEFYKFIKPILEKMDGTEELLVKLNREDLLRKQRTFDNGSIPHQIHLGELHAILRRQEDFYPFLKDNREKIEKILTFRIPYYVGPLARGNSRFAWMTRKSEETITPWNFEEVVDKGASAQSFIERMTNFDKNLPNEKVLPKHSLLYEYFTVYNELTKVKYVTEGMRKPAFLSGEQKKAIVDLLFKTNRKVTVKQLKEDYFKKIECFDSVEISGVEDRFNASLGTYHDLLKIIKDKDFLDNEENEDILEDIVLTLTLFEDREMIEERLKTYAHLFDDKVMKQLKRRRYTGWGRLSRKLINGIRDKQSGKTILDFLKSDGFANRNFMQLIHDDSLTFKEDIQKAQVSGQGDSLHEHIANLAGSPAIKKGILQTVKVVDELVKVMGRHKPENIVIEMARENQTTQKGQKNSRERMKRIEEGIKELGSQILKEHPVENTQLQNEKLYLYYLQNGRDMYVDQELDINRLSDYDVDHIVPQSFLKDDSIDNKVLTRSDKARGKSDNVPSEEVVKKMKNYWRQLLNAKLITQRKFDNLTKAERGGLSELDKAGFIKRQLVETRQITKHVAQILDSRMNTKYDENDKLIREVKVITLKSKLVSDFRKDFQFYKVREINNYHHAHDAYLNAVVGTALIKKYPKLESEFVYGDYKVYDVRKMIAKSEQEIGKATAKYFFYSNIMNFFKTEITLANGEIRKRPLIETNGETGEIVWDKGRDFATVRKVLSMPQVNIVKKTEVQTGGFSKESILPKRNSDKLIARKKDWDPKKYGGFDSPTVAYSVLVVAKVEKGKSKKLKSVKELLGITIMERSSFEKNPIDFLEAKGYKEVKKDLIIKLPKYSLFELENGRKRMLASAGELQKGNELALPSKYVNFLYLASHYEKLKGSPEDNEQKQLFVEQHKHYLDEIIEQISEFSKRVILADANLDKVLSAYNKHRDKPIREQAENIIHLFTLTNLGAPAAFKYFDTTIDRKRYTSTKEVLDATLIHQSITGLYETRIDLSQLGGDGGPAPGGSGSSGGTVSLQDEHRLFDIPVTTSLPDVWLQDFPQAWAETGGLGRAKCQAPIIIDLKPTAVPVSIKQYPMSLEAHMGIRQHIIKFLELGVLRPCRSPWNTPLLPVKKPGTQDYRPVQDLREINKRTVDIHPTVPNPYNLLSTLKPDYSWYTVLDLKDAFFCLPLAPQSQELFAFEWKDPERGISGQLTWTRLPQGFKNSPTLFNEALHRDLTDFRTQHPEVTLLQYVDDLLLAAPTKKACTQGTRHLLQELGEKGYRASAKKAQICQTKVTYLGYILSEGKRWLTPGRIETVARIPPPRNPREVREFLGKAGFCRLFIPGFAELAAPLYALTKPSTPFTWQTEHQLAFEALKKALLSAPALGLPDTSKPFTLFLDERQGIAKGVLTQKLGPWKRPVAYLSKKLDPVAAGWPPCLRIMAATAMLVKDSAKLTLGQPLTVITPHTLEAIVRQPPDRWITNARLTHYQALLLDTDRVQFGPPVTLNPATLLPVPENQPSPHDCRQVLAETHGTREDLKDQELPDADHTWYTDGSSYLDSGTRRAGAAVVDGHNTIWAQSLPPGTSAQKAELIALTKALELSKGKKANIYTDSRYAFATAHTHGSIYERRGWLTSEGKEIKNKAEIIALLKALFLPQEVAIIHCPGHQKGQDPVAVGNRQADRVARQAAMAEVLTLATEPDNTSHITAGKRTADGSEFEKRTADGSEFESPKKKAKVE

SEQ ID NO: 1991 - protein, 2100 aa, synthetic construct
MPAAKRVKLDGGDKKYSIGLDIGTNSVGWAVITDEYKVPSKKFKVLGNTDRHSIKKNLIGALLFDSGETAEATRLKRTARRRYTRRKNRICYLQEIFSNEMAKVDDSFFHRLEESFLVEEDKKHERHPIFGNIVDEVAYHEKYPTIYHLRKKLVDSTDKADLRLIYLALAHMIKFRGHFLIEGDLNPDNSDVDKLFIQLVQTYNQLFEENPINASGVDAKAILSARLSKSRRLENLIAQLPGEKKNGLFGNLIALSLGLTPNFKSNFDLAEDAKLQLSKDTYDDDLDNLLAQIGDQYADLFLAAKNLSDAILLSDILRVNTEITKAPLSASMIKRYDEHHQDLTLLKALVRQQLPEKYKEIFFDQSKNGYAGYIDGGASQEEFYKFIKPILEKMDGTEELLVKLNREDLLRKQRTFDNGSIPHQIHLGELHAILRRQEDFYPFLKDNREKIEKILTFRIPYYVGPLARGNSRFAWMTRKSEETITPWNFEEVVDKGASAQSFIERMTNFDKNLPNEKVLPKHSLLYEYFTVYNELTKVKYVTEGMRKPAFLSGEQKKAIVDLLFKTNRKVTVKQLKEDYFKKIECFDSVEISGVEDRFNASLGTYHDLLKIIKDKDFLDNEENEDILEDIVLTLTLFEDREMIEERLKTYAHLFDDKVMKQLKRRRYTGWGRLSRKLINGIRDKQSGKTILDFLKSDGFANRNFMQLIHDDSLTFKEDIQKAQVSGQGDSLHEHIANLAGSPAIKKGILQTVKVVDELVKVMGRHKPENIVIEMARENQTTQKGQKNSRERMKRIEEGIKELGSQILKEHPVENTQLQNEKLYLYYLQNGRDMYVDQELDINRLSDYDVDHIVPQSFLKDDSIDNKVLTRSDKARGKSDNVPSEEVVKKMKNYWRQLLNAKLITQRKFDNLTKAERGGLSELDKAGFIKRQLVETRQITKHVAQILDSRMNTKYDENDKLIREVKVITLKSKLVSDFRKDFQFYKVREINNYHHAHDAYLNAVVGTALIKKYPKLESEFVYGDYKVYDVRKMIAKSEQEIGKATAKYFFYSNIMNFFKTEITLANGEIRKRPLIETNGETGEIVWDKGRDFATVRKVLSMPQVNIVKKTEVQTGGFSKESILPKRNSDKLIARKKDWDPKKYGGFDSPTVAYSVLVVAKVEKGKSKKLKSVKELLGITIMERSSFEKNPIDFLEAKGYKEVKKDLIIKLPKYSLFELENGRKRMLASAGELQKGNELALPSKYVNFLYLASHYEKLKGSPEDNEQKQLFVEQHKHYLDEIIEQISEFSKRVILADANLDKVLSAYNKHRDKPIREQAENIIHLFTLTNLGAPAAFKYFDTTIDRKRYTSTKEVLDATLIHQSITGLYETRIDLSQLGGDGGGGGGSSGGSGGTVSLQDEHRLFDIPVTTSLPDVWLQDFPQAWAETGGLGRAKCQAPIIIDLKPTAVPVSIKQYPMSLEAHMGIRQHIIKFLELGVLRPCRSPWNTPLLPVKKPGTQDYRPVQDLREINKRTVDIHPTVPNPYNLLSTLKPDYSWYTVLDLKDAFFCLPLAPQSQELFAFEWKDPERGISGQLTWTRLPQGFKNSPTLFNEALHRDLTDFRTQHPEVTLLQYVDDLLLAAPTKKACTQGTRHLLQELGEKGYRASAKKAQICQTKVTYLGYILSEGKRWLTPGRIETVARIPPPRNPREVREFLGKAGFCRLFIPGFAELAAPLYALTKPSTPFTWQTEHQLAFEALKKALLSAPALGLPDTSKPFTLFLDERQGIAKGVLTQKLGPWKRPVAYLSKKLDPVAAGWPPCLRIMAATAMLVKDSAKLTLGQPLTVITPHTLEAIVRQPPDRWITNARLTHYQALLLDTDRVQFGPPVTLNPATLLPVPENQPSPHDCRQVLAETHGTREDLKDQELPDADHTWYTDGSSYLDSGTRRAGAAVVDGHNTIWAQSLPPGTSAQKAELIALTKALELSKGKKANIYTDSRYAFATAHTHGSIYERRGWLTSEGKEIKNKAEIIALLKALFLPQEVAIIHCPGHQKGQDPVAVGNRQADRVARQAAMAEVLTLATEPDNTSHITAGKRTADGSEFEKRTADGSEFESPKKKAKVE

SEQ ID NO: 1992 - protein, 2106 aa, synthetic construct
MPAAKRVKLDGGDKKYSIGLDIGTNSVGWAVITDEYKVPSKKFKVLGNTDRHSIKKNLIGALLFDSGETAEATRLKRTARRRYTRRKNRICYLQEIFSNEMAKVDDSFFHRLEESFLVEEDKKHERHPIFGNIVDEVAYHEKYPTIYHLRKKLVDSTDKADLRLIYLALAHMIKFRGHFLIEGDLNPDNSDVDKLFIQLVQTYNQLFEENPINASGVDAKAILSARLSKSRRLENLIAQLPGEKKNGLFGNLIALSLGLTPNFKSNFDLAEDAKLQLSKDTYDDDLDNLLAQIGDQYADLFLAAKNLSDAILLSDILRVNTEITKAPLSASMIKRYDEHHQDLTLLKALVRQQLPEKYKEIFFDQSKNGYAGYIDGGASQEEFYKFIKPILEKMDGTEELLVKLNREDLLRKQRTFDNGSIPHQIHLGELHAILRRQEDFYPFLKDNREKIEKILTFRIPYYVGPLARGNSRFAWMTRKSEETITPWNFEEVVDKGASAQSFIERMTNFDKNLPNEKVLPKHSLLYEYFTVYNELTKVKYVTEGMRKPAFLSGEQKKAIVDLLFKTNRKVTVKQLKEDYFKKIECFDSVEISGVEDRFNASLGTYHDLLKIIKDKDFLDNEENEDILEDIVLTLTLFEDREMIEERLKTYAHLFDDKVMKQLKRRRYTGWGRLSRKLINGIRDKQSGKTILDFLKSDGFANRNFMQLIHDDSLTFKEDIQKAQVSGQGDSLHEHIANLAGSPAIKKGILQTVKVVDELVKVMGRHKPENIVIEMARENQTTQKGQKNSRERMKRIEEGIKELGSQILKEHPVENTQLQNEKLYLYYLQNGRDMYVDQELDINRLSDYDVDHIVPQSFLKDDSIDNKVLTRSDKARGKSDNVPSEEVVKKMKNYWRQLLNAKLITQRKFDNLTKAERGGLSELDKAGFIKRQLVETRQITKHVAQILDSRMNTKYDENDKLIREVKVITLKSKLVSDFRKDFQFYKVREINNYHHAHDAYLNAVVGTALIKKYPKLESEFVYGDYKVYDVRKMIAKSEQEIGKATAKYFFYSNIMNFFKTEITLANGEIRKRPLIETNGETGEIVWDKGRDFATVRKVLSMPQVNIVKKTEVQTGGFSKESILPKRNSDKLIARKKDWDPKKYGGFDSPTVAYSVLVVAKVEKGKSKKLKSVKELLGITIMERSSFEKNPIDFLEAKGYKEVKKDLIIKLPKYSLFELENGRKRMLASAGELQKGNELALPSKYVNFLYLASHYEKLKGSPEDNEQKQLFVEQHKHYLDEIIEQISEFSKRVILADANLDKVLSAYNKHRDKPIREQAENIIHLFTLTNLGAPAAFKYFDTTIDRKRYTSTKEVLDATLIHQSITGLYETRIDLSQLGGDGGGGSGGSGGSGGSGGSGGTVSLQDEHRLFDIPVTTSLPDVWLQDFPQAWAETGGLGRAKCQAPIIIDLKPTAVPVSIKQYPMSLEAHMGIRQHIIKFLELGVLRPCRSPWNTPLLPVKKPGTQDYRPVQDLREINKRTVDIHPTVPNPYNLLSTLKPDYSWYTVLDLKDAFFCLPLAPQSQELFAFEWKDPERGISGQLTWTRLPQGFKNSPTLFNEALHRDLTDFRTQHPEVTLLQYVDDLLLAAPTKKACTQGTRHLLQELGEKGYRASAKKAQICQTKVTYLGYILSEGKRWLTPGRIETVARIPPPRNPREVREFLGKAGFCRLFIPGFAELAAPLYALTKPSTPFTWQTEHQLAFEALKKALLSAPALGLPDTSKPFTLFLDERQGIAKGVLTQKLGPWKRPVAYLSKKLDPVAAGWPPCLRIMAATAMLVKDSAKLTLGQPLTVITPHTLEAIVRQPPDRWITNARLTHYQALLLDTDRVQFGPPVTLNPATLLPVPENQPSPHDCRQVLAETHGTREDLKDQELPDADHTWYTDGSSYLDSGTRRAGAAVVDGHNTIWAQSLPPGTSAQKAELIALTKALELSKGKKANIYTDSRYAFATAHTHGSIYERRGWLTSEGKEIKNKAEIIALLKALFLPQEVAIIHCPGHQKGQDPVAVGNRQADRVARQAAMAEVLTLATEPDNTSHITAGKRTADGSEFEKRTADGSEFESPKKKAKVE

SEQ ID NO: 1993 - protein, 2100 aa, synthetic construct
MPAAKRVKLDGGDKKYSIGLDIGTNSVGWAVITDEYKVPSKKFKVLGNTDRHSIKKNLIGALLFDSGETAEATRLKRTARRRYTRRKNRICYLQEIFSNEMAKVDDSFFHRLEESFLVEEDKKHERHPIFGNIVDEVAYHEKYPTIYHLRKKLVDSTDKADLRLIYLALAHMIKFRGHFLIEGDLNPDNSDVDKLFIQLVQTYNQLFEENPINASGVDAKAILSARLSKSRRLENLIAQLPGEKKNGLFGNLIALSLGLTPNFKSNFDLAEDAKLQLSKDTYDDDLDNLLAQIGDQYADLFLAAKNLSDAILLSDILRVNTEITKAPLSASMIKRYDEHHQDLTLLKALVRQQLPEKYKEIFFDQSKNGYAGYIDGGASQEEFYKFIKPILEKMDGTEELLVKLNREDLLRKQRTFDNGSIPHQIHLGELHAILRRQEDFYPFLKDNREKIEKILTFRIPYYVGPLARGNSRFAWMTRKSEETITPWNFEEVVDKGASAQSFIERMTNFDKNLPNEKVLPKHSLLYEYFTVYNELTKVKYVTEGMRKPAFLSGEQKKAIVDLLFKTNRKVTVKQLKEDYFKKIECFDSVEISGVEDRFNASLGTYHDLLKIIKDKDFLDNEENEDILEDIVLTLTLFEDREMIEERLKTYAHLFDDKVMKQLKRRRYTGWGRLSRKLINGIRDKQSGKTILDFLKSDGFANRNFMQLIHDDSLTFKEDIQKAQVSGQGDSLHEHIANLAGSPAIKKGILQTVKVVDELVKVMGRHKPENIVIEMARENQTTQKGQKNSRERMKRIEEGIKELGSQILKEHPVENTQLQNEKLYLYYLQNGRDMYVDQELDINRLSDYDVDHIVPQSFLKDDSIDNKVLTRSDKARGKSDNVPSEEVVKKMKNYWRQLLNAKLITQRKFDNLTKAERGGLSELDKAGFIKRQLVETRQITKHVAQILDSRMNTKYDENDKLIREVKVITLKSKLVSDFRKDFQFYKVREINNYHHAHDAYLNAVVGTALIKKYPKLESEFVYGDYKVYDVRKMIAKSEQEIGKATAKYFFYSNIMNFFKTEITLANGEIRKRPLIETNGETGEIVWDKGRDFATVRKVLSMPQVNIVKKTEVQTGGFSKESILPKRNSDKLIARKKDWDPKKYGGFDSPTVAYSVLVVAKVEKGKSKKLKSVKELLGITIMERSSFEKNPIDFLEAKGYKEVKKDLIIKLPKYSLFELENGRKRMLASAGELQKGNELALPSKYVNFLYLASHYEKLKGSPEDNEQKQLFVEQHKHYLDEIIEQISEFSKRVILADANLDKVLSAYNKHRDKPIREQAENIIHLFTLTNLGAPAAFKYFDTTIDRKRYTSTKEVLDATLIHQSITGLYETRIDLSQLGGDGGGSSGGSGGGGGTVSLQDEHRLFDIPVTTSLPDVWLQDFPQAWAETGGLGRAKCQAPIIIDLKPTAVPVSIKQYPMSLEAHMGIRQHIIKFLELGVLRPCRSPWNTPLLPVKKPGTQDYRPVQDLREINKRTVDIHPTVPNPYNLLSTLKPDYSWYTVLDLKDAFFCLPLAPQSQELFAFEWKDPERGISGQLTWTRLPQGFKNSPTLFNEALHRDLTDFRTQHPEVTLLQYVDDLLLAAPTKKACTQGTRHLLQELGEKGYRASAKKAQICQTKVTYLGYILSEGKRWLTPGRIETVARIPPPRNPREVREFLGKAGFCRLFIPGFAELAAPLYALTKPSTPFTWQTEHQLAFEALKKALLSAPALGLPDTSKPFTLFLDERQGIAKGVLTQKLGPWKRPVAYLSKKLDPVAAGWPPCLRIMAATAMLVKDSAKLTLGQPLTVITPHTLEAIVRQPPDRWITNARLTHYQALLLDTDRVQFGPPVTLNPATLLPVPENQPSPHDCRQVLAETHGTREDLKDQELPDADHTWYTDGSSYLDSGTRRAGAAVVDGHNTIWAQSLPPGTSAQKAELIALTKALELSKGKKANIYTDSRYAFATAHTHGSIYERRGWLTSEGKEIKNKAEIIALLKALFLPQEVAIIHCPGHQKGQDPVAVGNRQADRVARQAAMAEVLTLATEPDNTSHITAGKRTADGSEFEKRTADGSEFESPKKKAKVE

SEQ ID NO: 1994 - protein, 2103 aa, synthetic construct
MPAAKRVKLDGGDKKYSIGLDIGTNSVGWAVITDEYKVPSKKFKVLGNTDRHSIKKNLIGALLFDSGETAEATRLKRTARRRYTRRKNRICYLQEIFSNEMAKVDDSFFHRLEESFLVEEDKKHERHPIFGNIVDEVAYHEKYPTIYHLRKKLVDSTDKADLRLIYLALAHMIKFRGHFLIEGDLNPDNSDVDKLFIQLVQTYNQLFEENPINASGVDAKAILSARLSKSRRLENLIAQLPGEKKNGLFGNLIALSLGLTPNFKSNFDLAEDAKLQLSKDTYDDDLDNLLAQIGDQYADLFLAAKNLSDAILLSDILRVNTEITKAPLSASMIKRYDEHHQDLTLLKALVRQQLPEKYKEIFFDQSKNGYAGYIDGGASQEEFYKFIKPILEKMDGTEELLVKLNREDLLRKQRTFDNGSIPHQIHLGELHAILRRQEDFYPFLKDNREKIEKILTFRIPYYVGPLARGNSRFAWMTRKSEETITPWNFEEVVDKGASAQSFIERMTNFDKNLPNEKVLPKHSLLYEYFTVYNELTKVKYVTEGMRKPAFLSGEQKKAIVDLLFKTNRKVTVKQLKEDYFKKIECFDSVEISGVEDRFNASLGTYHDLLKIIKDKDFLDNEENEDILEDIVLTLTLFEDREMIEERLKTYAHLFDDKVMKQLKRRRYTGWGRLSRKLINGIRDKQSGKTILDFLKSDGFANRNFMQLIHDDSLTFKEDIQKAQVSGQGDSLHEHIANLAGSPAIKKGILQTVKVVDELVKVMGRHKPENIVIEMARENQTTQKGQKNSRERMKRIEEGIKELGSQILKEHPVENTQLQNEKLYLYYLQNGRDMYVDQELDINRLSDYDVDHIVPQSFLKDDSIDNKVLTRSDKARGKSDNVPSEEVVKKMKNYWRQLLNAKLITQRKFDNLTKAERGGLSELDKAGFIKRQLVETRQITKHVAQILDSRMNTKYDENDKLIREVKVITLKSKLVSDFRKDFQFYKVREINNYHHAHDAYLNAVVGTALIKKYPKLESEFVYGDYKVYDVRKMIAKSEQEIGKATAKYFFYSNIMNFFKTEITLANGEIRKRPLIETNGETGEIVWDKGRDFATVRKVLSMPQVNIVKKTEVQTGGFSKESILPKRNSDKLIARKKDWDPKKYGGFDSPTVAYSVLVVAKVEKGKSKKLKSVKELLGITIMERSSFEKNPIDFLEAKGYKEVKKDLIIKLPKYSLFELENGRKRMLASAGELQKGNELALPSKYVNFLYLASHYEKLKGSPEDNEQKQLFVEQHKHYLDEIIEQISEFSKRVILADANLDKVLSAYNKHRDKPIREQAENIIHLFTLTNLGAPAAFKYFDTTIDRKRYTSTKEVLDATLIHQSITGLYETRIDLSQLGGDGGGSSGSSGSSGSSGGTVSLQDEHRLFDIPVTTSLPDVWLQDFPQAWAETGGLGRAKCQAPIIIDLKPTAVPVSIKQYPMSLEAHMGIRQHIIKFLELGVLRPCRSPWNTPLLPVKKPGTQDYRPVQDLREINKRTVDIHPTVPNPYNLLSTLKPDYSWYTVLDLKDAFFCLPLAPQSQELFAFEWKDPERGISGQLTWTRLPQGFKNSPTLFNEALHRDLTDFRTQHPEVTLLQYVDDLLLAAPTKKACTQGTRHLLQELGEKGYRASAKKAQICQTKVTYLGYILSEGKRWLTPGRIETVARIPPPRNPREVREFLGKAGFCRLFIPGFAELAAPLYALTKPSTPFTWQTEHQLAFEALKKALLSAPALGLPDTSKPFTLFLDERQGIAKGVLTQKLGPWKRPVAYLSKKLDPVAAGWPPCLRIMAATAMLVKDSAKLTLGQPLTVITPHTLEAIVRQPPDRWITNARLTHYQALLLDTDRVQFGPPVTLNPATLLPVPENQPSPHDCRQVLAETHGTREDLKDQELPDADHTWYTDGSSYLDSGTRRAGAAVVDGHNTIWAQSLPPGTSAQKAELIALTKALELSKGKKANIYTDSRYAFATAHTHGSIYERRGWLTSEGKEIKNKAEIIALLKALFLPQEVAIIHCPGHQKGQDPVAVGNRQADRVARQAAMAEVLTLATEPDNTSHITAGKRTADGSEFEKRTADGSEFESPKKKAKVE

SEQ ID NO: 1995 - protein, 2099 aa, synthetic construct
MPAAKRVKLDGGDKKYSIGLDIGTNSVGWAVITDEYKVPSKKFKVLGNTDRHSIKKNLIGALLFDSGETAEATRLKRTARRRYTRRKNRICYLQEIFSNEMAKVDDSFFHRLEESFLVEEDKKHERHPIFGNIVDEVAYHEKYPTIYHLRKKLVDSTDKADLRLIYLALAHMIKFRGHFLIEGDLNPDNSDVDKLFIQLVQTYNQLFEENPINASGVDAKAILSARLSKSRRLENLIAQLPGEKKNGLFGNLIALSLGLTPNFKSNFDLAEDAKLQLSKDTYDDDLDNLLAQIGDQYADLFLAAKNLSDAILLSDILRVNTEITKAPLSASMIKRYDEHHQDLTLLKALVRQQLPEKYKEIFFDQSKNGYAGYIDGGASQEEFYKFIKPILEKMDGTEELLVKLNREDLLRKQRTFDNGSIPHQIHLGELHAILRRQEDFYPFLKDNREKIEKILTFRIPYYVGPLARGNSRFAWMTRKSEETITPWNFEEVVDKGASAQSFIERMTNFDKNLPNEKVLPKHSLLYEYFTVYNELTKVKYVTEGMRKPAFLSGEQKKAIVDLLFKTNRKVTVKQLKEDYFKKIECFDSVEISGVEDRFNASLGTYHDLLKIIKDKDFLDNEENEDILEDIVLTLTLFEDREMIEERLKTYAHLFDDKVMKQLKRRRYTGWGRLSRKLINGIRDKQSGKTILDFLKSDGFANRNFMQLIHDDSLTFKEDIQKAQVSGQGDSLHEHIANLAGSPAIKKGILQTVKVVDELVKVMGRHKPENIVIEMARENQTTQKGQKNSRERMKRIEEGIKELGSQILKEHPVENTQLQNEKLYLYYLQNGRDMYVDQELDINRLSDYDVDHIVPQSFLKDDSIDNKVLTRSDKARGKSDNVPSEEVVKKMKNYWRQLLNAKLITQRKFDNLTKAERGGLSELDKAGFIKRQLVETRQITKHVAQILDSRMNTKYDENDKLIREVKVITLKSKLVSDFRKDFQFYKVREINNYHHAHDAYLNAVVGTALIKKYPKLESEFVYGDYKVYDVRKMIAKSEQEIGKATAKYFFYSNIMNFFKTEITLANGEIRKRPLIETNGETGEIVWDKGRDFATVRKVLSMPQVNIVKKTEVQTGGFSKESILPKRNSDKLIARKKDWDPKKYGGFDSPTVAYSVLVVAKVEKGKSKKLKSVKELLGITIMERSSFEKNPIDFLEAKGYKEVKKDLIIKLPKYSLFELENGRKRMLASAGELQKGNELALPSKYVNFLYLASHYEKLKGSPEDNEQKQLFVEQHKHYLDEIIEQISEFSKRVILADANLDKVLSAYNKHRDKPIREQAENIIHLFTLTNLGAPAAFKYFDTTIDRKRYTSTKEVLDATLIHQSITGLYETRIDLSQLGGDGGPAPEAAAKGGTVSLQDEHRLFDIPVTTSLPDVWLQDFPQAWAETGGLGRAKCQAPIIIDLKPTAVPVSIKQYPMSLEAHMGIRQHIIKFLELGVLRPCRSPWNTPLLPVKKPGTQDYRPVQDLREINKRTVDIHPTVPNPYNLLSTLKPDYSWYTVLDLKDAFFCLPLAPQSQELFAFEWKDPERGISGQLTWTRLPQGFKNSPTLFNEALHRDLTDFRTQHPEVTLLQYVDDLLLAAPTKKACTQGTRHLLQELGEKGYRASAKKAQICQTKVTYLGYILSEGKRWLTPGRIETVARIPPPRNPREVREFLGKAGFCRLFIPGFAELAAPLYALTKPSTPFTWQTEHQLAFEALKKALLSAPALGLPDTSKPFTLFLDERQGIAKGVLTQKLGPWKRPVAYLSKKLDPVAAGWPPCLRIMAATAMLVKDSAKLTLGQPLTVITPHTLEAIVRQPPDRWITNARLTHYQALLLDTDRVQFGPPVTLNPATLLPVPENQPSPHDCRQVLAETHGTREDLKDQELPDADHTWYTDGSSYLDSGTRRAGAAVVDGHNTIWAQSLPPGTSAQKAELIALTKALELSKGKKANIYTDSRYAFATAHTHGSIYERRGWLTSEGKEIKNKAEIIALLKALFLPQEVAIIHCPGHQKGQDPVAVGNRQADRVARQAAMAEVLTLATEPDNTSHITAGKRTADGSEFEKRTADGSEFESPKKKAKVE

SEQ ID NO: 1996 - protein, 2097 aa, synthetic construct
MPAAKRVKLDGGDKKYSIGLDIGTNSVGWAVITDEYKVPSKKFKVLGNTDRHSIKKNLIGALLFDSGETAEATRLKRTARRRYTRRKNRICYLQEIFSNEMAKVDDSFFHRLEESFLVEEDKKHERHPIFGNIVDEVAYHEKYPTIYHLRKKLVDSTDKADLRLIYLALAHMIKFRGHFLIEGDLNPDNSDVDKLFIQLVQTYNQLFEENPINASGVDAKAILSARLSKSRRLENLIAQLPGEKKNGLFGNLIALSLGLTPNFKSNFDLAEDAKLQLSKDTYDDDLDNLLAQIGDQYADLFLAAKNLSDAILLSDILRVNTEITKAPLSASMIKRYDEHHQDLTLLKALVRQQLPEKYKEIFFDQSKNGYAGYIDGGASQEEFYKFIKPILEKMDGTEELLVKLNREDLLRKQRTFDNGSIPHQIHLGELHAILRRQEDFYPFLKDNREKIEKILTFRIPYYVGPLARGNSRFAWMTRKSEETITPWNFEEVVDKGASAQSFIERMTNFDKNLPNEKVLPKHSLLYEYFTVYNELTKVKYVTEGMRKPAFLSGEQKKAIVDLLFKTNRKVTVKQLKEDYFKKIECFDSVEISGVEDRFNASLGTYHDLLKIIKDKDFLDNEENEDILEDIVLTLTLFEDREMIEERLKTYAHLFDDKVMKQLKRRRYTGWGRLSRKLINGIRDKQSGKTILDFLKSDGFANRNFMQLIHDDSLTFKEDIQKAQVSGQGDSLHEHIANLAGSPAIKKGILQTVKVVDELVKVMGRHKPENIVIEMARENQTTQKGQKNSRERMKRIEEGIKELGSQILKEHPVENTQLQNEKLYLYYLQNGRDMYVDQELDINRLSDYDVDHIVPQSFLKDDSIDNKVLTRSDKARGKSDNVPSEEVVKKMKNYWRQLLNAKLITQRKFDNLTKAERGGLSELDKAGFIKRQLVETRQITKHVAQILDSRMNTKYDENDKLIREVKVITLKSKLVSDFRKDFQFYKVREINNYHHAHDAYLNAVVGTALIKKYPKLESEFVYGDYKVYDVRKMIAKSEQEIGKATAKYFFYSNIMNFFKTEITLANGEIRKRPLIETNGETGEIVWDKGRDFATVRKVLSMPQVNIVKKTEVQTGGFSKESILPKRNSDKLIARKKDWDPKKYGGFDSPTVAYSVLVVAKVEKGKSKKLKSVKELLGITIMERSSFEKNPIDFLEAKGYKEVKKDLIIKLPKYSLFELENGRKRMLASAGELQKGNELALPSKYVNFLYLASHYEKLKGSPEDNEQKQLFVEQHKHYLDEIIEQISEFSKRVILADANLDKVLSAYNKHRDKPIREQAENIIHLFTLTNLGAPAAFKYFDTTIDRKRYTSTKEVLDATLIHQSITGLYETRIDLSQLGGDGGGGGPAPGGTVSLQDEHRLFDIPVTTSLPDVWLQDFPQAWAETGGLGRAKCQAPIIIDLKPTAVPVSIKQYPMSLEAHMGIRQHIIKFLELGVLRPCRSPWNTPLLPVKKPGTQDYRPVQDLREINKRTVDIHPTVPNPYNLLSTLKPDYSWYTVLDLKDAFFCLPLAPQSQELFAFEWKDPERGISGQLTWTRLPQGFKNSPTLFNEALHRDLTDFRTQHPEVTLLQYVDDLLLAAPTKKACTQGTRHLLQELGEKGYRASAKKAQICQTKVTYLGYILSEGKRWLTPGRIETVARIPPPRNPREVREFLGKAGFCRLFIPGFAELAAPLYALTKPSTPFTWQTEHQLAFEALKKALLSAPALGLPDTSKPFTLFLDERQGIAKGVLTQKLGPWKRPVAYLSKKLDPVAAGWPPCLRIMAATAMLVKDSAKLTLGQPLTVITPHTLEAIVRQPPDRWITNARLTHYQALLLDTDRVQFGPPVTLNPATLLPVPENQPSPHDCRQVLAETHGTREDLKDQELPDADHTWYTDGSSYLDSGTRRAGAAVVDGHNTIWAQSLPPGTSAQKAELIALTKALELSKGKKANIYTDSRYAFATAHTHGSIYERRGWLTSEGKEIKNKAEIIALLKALFLPQEVAIIHCPGHQKGQDPVAVGNRQADRVARQAAMAEVLTLATEPDNTSHITAGKRTADGSEFEKRTADGSEFESPKKKAKVE

SEQ ID NO: 1997 - protein, 2099 aa, synthetic construct
MPAAKRVKLDGGDKKYSIGLDIGTNSVGWAVITDEYKVPSKKFKVLGNTDRHSIKKNLIGALLFDSGETAEATRLKRTARRRYTRRKNRICYLQEIFSNEMAKVDDSFFHRLEESFLVEEDKKHERHPIFGNIVDEVAYHEKYPTIYHLRKKLVDSTDKADLRLIYLALAHMIKFRGHFLIEGDLNPDNSDVDKLFIQLVQTYNQLFEENPINASGVDAKAILSARLSKSRRLENLIAQLPGEKKNGLFGNLIALSLGLTPNFKSNFDLAEDAKLQLSKDTYDDDLDNLLAQIGDQYADLFLAAKNLSDAILLSDILRVNTEITKAPLSASMIKRYDEHHQDLTLLKALVRQQLPEKYKEIFFDQSKNGYAGYIDGGASQEEFYKFIKPILEKMDGTEELLVKLNREDLLRKQRTFDNGSIPHQIHLGELHAILRRQEDFYPFLKDNREKIEKILTFRIPYYVGPLARGNSRFAWMTRKSEETITPWNFEEVVDKGASAQSFIERMTNFDKNLPNEKVLPKHSLLYEYFTVYNELTKVKYVTEGMRKPAFLSGEQKKAIVDLLFKTNRKVTVKQLKEDYFKKIECFDSVEISGVEDRFNASLGTYHDLLKIIKDKDFLDNEENEDILEDIVLTLTLFEDREMIEERLKTYAHLFDDKVMKQLKRRRYTGWGRLSRKLINGIRDKQSGKTILDFLKSDGFANRNFMQLIHDDSLTFKEDIQKAQVSGQGDSLHEHIANLAGSPAIKKGILQTVKVVDELVKVMGRHKPENIVIEMARENQTTQKGQKNSRERMKRIEEGIKELGSQILKEHPVENTQLQNEKLYLYYLQNGRDMYVDQELDINRLSDYDVDHIVPQSFLKDDSIDNKVLTRSDKARGKSDNVPSEEVVKKMKNYWRQLLNAKLITQRKFDNLTKAERGGLSELDKAGFIKRQLVETRQITKHVAQILDSRMNTKYDENDKLIREVKVITLKSKLVSDFRKDFQFYKVREINNYHHAHDAYLNAVVGTALIKKYPKLESEFVYGDYKVYDVRKMIAKSEQEIGKATAKYFFYSNIMNFFKTEITLANGEIRKRPLIETNGETGEIVWDKGRDFATVRKVLSMPQVNIVKKTEVQTGGFSKESILPKRNSDKLIARKKDWDPKKYGGFDSPTVAYSVLVVAKVEKGKSKKLKSVKELLGITIMERSSFEKNPIDFLEAKGYKEVKKDLIIKLPKYSLFELENGRKRMLASAGELQKGNELALPSKYVNFLYLASHYEKLKGSPEDNEQKQLFVEQHKHYLDEIIEQISEFSKRVILADANLDKVLSAYNKHRDKPIREQAENIIHLFTLTNLGAPAAFKYFDTTIDRKRYTSTKEVLDATLIHQSITGLYETRIDLSQLGGDGGGGSEAAAKGGTVSLQDEHRLFDIPVTTSLPDVWLQDFPQAWAETGGLGRAKCQAPIIIDLKPTAVPVSIKQYPMSLEAHMGIRQHIIKFLELGVLRPCRSPWNTPLLPVKKPGTQDYRPVQDLREINKRTVDIHPTVPNPYNLLSTLKPDYSWYTVLDLKDAFFCLPLAPQSQELFAFEWKDPERGISGQLTWTRLPQGFKNSPTLFNEALHRDLTDFRTQHPEVTLLQYVDDLLLAAPTKKACTQGTRHLLQELGEKGYRASAKKAQICQTKVTYLGYILSEGKRWLTPGRIETVARIPPPRNPREVREFLGKAGFCRLFIPGFAELAAPLYALTKPSTPFTWQTEHQLAFEALKKALLSAPALGLPDTSKPFTLFLDERQGIAKGVLTQKLGPWKRPVAYLSKKLDPVAAGWPPCLRIMAATAMLVKDSAKLTLGQPLTVITPHTLEAIVRQPPDRWITNARLTHYQALLLDTDRVQFGPPVTLNPATLLPVPENQPSPHDCRQVLAETHGTREDLKDQELPDADHTWYTDGSSYLDSGTRRAGAAVVDGHNTIWAQSLPPGTSAQKAELIALTKALELSKGKKANIYTDSRYAFATAHTHGSIYERRGWLTSEGKEIKNKAEIIALLKALFLPQEVAIIHCPGHQKGQDPVAVGNRQADRVARQAAMAEVLTLATEPDNTSHITAGKRTADGSEFEKRTADGSEFESPKKKAKVE

SEQ ID NO: 1998 - protein, 2096 aa, synthetic construct
MPAAKRVKLDGGDKKYSIGLDIGTNSVGWAVITDEYKVPSKKFKVLGNTDRHSIKKNLIGALLFDSGETAEATRLKRTARRRYTRRKNRICYLQEIFSNEMAKVDDSFFHRLEESFLVEEDKKHERHPIFGNIVDEVAYHEKYPTIYHLRKKLVDSTDKADLRLIYLALAHMIKFRGHFLIEGDLNPDNSDVDKLFIQLVQTYNQLFEENPINASGVDAKAILSARLSKSRRLENLIAQLPGEKKNGLFGNLIALSLGLTPNFKSNFDLAEDAKLQLSKDTYDDDLDNLLAQIGDQYADLFLAAKNLSDAILLSDILRVNTEITKAPLSASMIKRYDEHHQDLTLLKALVRQQLPEKYKEIFFDQSKNGYAGYIDGGASQEEFYKFIKPILEKMDGTEELLVKLNREDLLRKQRTFDNGSIPHQIHLGELHAILRRQEDFYPFLKDNREKIEKILTFRIPYYVGPLARGNSRFAWMTRKSEETITPWNFEEVVDKGASAQSFIERMTNFDKNLPNEKVLPKHSLLYEYFTVYNELTKVKYVTEGMRKPAFLSGEQKKAIVDLLFKTNRKVTVKQLKEDYFKKIECFDSVEISGVEDRFNASLGTYHDLLKIIKDKDFLDNEENEDILEDIVLTLTLFEDREMIEERLKTYAHLFDDKVMKQLKRRRYTGWGRLSRKLINGIRDKQSGKTILDFLKSDGFANRNFMQLIHDDSLTFKEDIQKAQVSGQGDSLHEHIANLAGSPAIKKGILQTVKVVDELVKVMGRHKPENIVIEMARENQTTQKGQKNSRERMKRIEEGIKELGSQILKEHPVENTQLQNEKLYLYYLQNGRDMYVDQELDINRLSDYDVDHIVPQSFLKDDSIDNKVLTRSDKARGKSDNVPSEEVVKKMKNYWRQLLNAKLITQRKFDNLTKAERGGLSELDKAGFIKRQLVETRQITKHVAQILDSRMNTKYDENDKLIREVKVITLKSKLVSDFRKDFQFYKVREINNYHHAHDAYLNAVVGTALIKKYPKLESEFVYGDYKVYDVRKMIAKSEQEIGKATAKYFFYSNIMNFFKTEITLANGEIRKRPLIETNGETGEIVWDKGRDFATVRKVLSMPQVNIVKKTEVQTGGFSKESILPKRNSDKLIARKKDWDPKKYGGFDSPTVAYSVLVVAKVEKGKSKKLKSVKELLGITIMERSSFEKNPIDFLEAKGYKEVKKDLIIKLPKYSLFELENGRKRMLASAGELQKGNELALPSKYVNFLYLASHYEKLKGSPEDNEQKQLFVEQHKHYLDEIIEQISEFSKRVILADANLDKVLSAYNKHRDKPIREQAENIIHLFTLTNLGAPAAFKYFDTTIDRKRYTSTKEVLDATLIHQSITGLYETRIDLSQLGGDGGGGGGGGGTVSLQDEHRLFDIPVTTSLPDVWLQDFPQAWAETGGLGRAKCQAPIIIDLKPTAVPVSIKQYPMSLEAHMGIRQHIIKFLELGVLRPCRSPWNTPLLPVKKPGTQDYRPVQDLREINKRTVDIHPTVPNPYNLLSTLKPDYSWYTVLDLKDAFFCLPLAPQSQELFAFEWKDPERGISGQLTWTRLPQGFKNSPTLFNEALHRDLTDFRTQHPEVTLLQYVDDLLLAAPTKKACTQGTRHLLQELGEKGYRASAKKAQICQTKVTYLGYILSEGKRWLTPGRIETVARIPPPRNPREVREFLGKAGFCRLFIPGFAELAAPLYALTKPSTPFTWQTEHQLAFEALKKALLSAPALGLPDTSKPFTLFLDERQGIAKGVLTQKLGPWKRPVAYLSKKLDPVAAGWPPCLRIMAATAMLVKDSAKLTLGQPLTVITPHTLEAIVRQPPDRWITNARLTHYQALLLDTDRVQFGPPVTLNPATLLPVPENQPSPHDCRQVLAETHGTREDLKDQELPDADHTWYTDGSSYLDSGTRRAGAAVVDGHNTIWAQSLPPGTSAQKAELIALTKALELSKGKKANIYTDSRYAFATAHTHGSIYERRGWLTSEGKEIKNKAEIIALLKALFLPQEVAIIHCPGHQKGQDPVAVGNRQADRVARQAAMAEVLTLATEPDNTSHITAGKRTADGSEFEKRTADGSEFESPKKKAKVE

SEQ ID NO: 1999 - protein, 2094 aa, synthetic construct
MPAAKRVKLDGGDKKYSIGLDIGTNSVGWAVITDEYKVPSKKFKVLGNTDRHSIKKNLIGALLFDSGETAEATRLKRTARRRYTRRKNRICYLQEIFSNEMAKVDDSFFHRLEESFLVEEDKKHERHPIFGNIVDEVAYHEKYPTIYHLRKKLVDSTDKADLRLIYLALAHMIKFRGHFLIEGDLNPDNSDVDKLFIQLVQTYNQLFEENPINASGVDAKAILSARLSKSRRLENLIAQLPGEKKNGLFGNLIALSLGLTPNFKSNFDLAEDAKLQLSKDTYDDDLDNLLAQIGDQYADLFLAAKNLSDAILLSDILRVNTEITKAPLSASMIKRYDEHHQDLTLLKALVRQQLPEKYKEIFFDQSKNGYAGYIDGGASQEEFYKFIKPILEKMDGTEELLVKLNREDLLRKQRTFDNGSIPHQIHLGELHAILRRQEDFYPFLKDNREKIEKILTFRIPYYVGPLARGNSRFAWMTRKSEETITPWNFEEVVDKGASAQSFIERMTNFDKNLPNEKVLPKHSLLYEYFTVYNELTKVKYVTEGMRKPAFLSGEQKKAIVDLLFKTNRKVTVKQLKEDYFKKIECFDSVEISGVEDRFNASLGTYHDLLKIIKDKDFLDNEENEDILEDIVLTLTLFEDREMIEERLKTYAHLFDDKVMKQLKRRRYTGWGRLSRKLINGIRDKQSGKTILDFLKSDGFANRNFMQLIHDDSLTFKEDIQKAQVSGQGDSLHEHIANLAGSPAIKKGILQTVKVVDELVKVMGRHKPENIVIEMARENQTTQKGQKNSRERMKRIEEGIKELGSQILKEHPVENTQLQNEKLYLYYLQNGRDMYVDQELDINRLSDYDVDHIVPQSFLKDDSIDNKVLTRSDKARGKSDNVPSEEVVKKMKNYWRQLLNAKLITQRKFDNLTKAERGGLSELDKAGFIKRQLVETRQITKHVAQILDSRMNTKYDENDKLIREVKVITLKSKLVSDFRKDFQFYKVREINNYHHAHDAYLNAVVGTALIKKYPKLESEFVYGDYKVYDVRKMIAKSEQEIGKATAKYFFYSNIMNFFKTEITLANGEIRKRPLIETNGETGEIVWDKGRDFATVRKVLSMPQVNIVKKTEVQTGGFSKESILPKRNSDKLIARKKDWDPKKYGGFDSPTVAYSVLVVAKVEKGKSKKLKSVKELLGITIMERSSFEKNPIDFLEAKGYKEVKKDLIIKLPKYSLFELENGRKRMLASAGELQKGNELALPSKYVNFLYLASHYEKLKGSPEDNEQKQLFVEQHKHYLDEIIEQISEFSKRVILADANLDKVLSAYNKHRDKPIREQAENIIHLFTLTNLGAPAAFKYFDTTIDRKRYTSTKEVLDATLIHQSITGLYETRIDLSQLGGDGGGGSGGTVSLQDEHRLFDIPVTTSLPDVWLQDFPQAWAETGGLGRAKCQAPIIIDLKPTAVPVSIKQYPMSLEAHMGIRQHIIKFLELGVLRPCRSPWNTPLLPVKKPGTQDYRPVQDLREINKRTVDIHPTVPNPYNLLSTLKPDYSWYTVLDLKDAFFCLPLAPQSQELFAFEWKDPERGISGQLTWTRLPQGFKNSPTLFNEALHRDLTDFRTQHPEVTLLQYVDDLLLAAPTKKACTQGTRHLLQELGEKGYRASAKKAQICQTKVTYLGYILSEGKRWLTPGRIETVARIPPPRNPREVREFLGKAGFCRLFIPGFAELAAPLYALTKPSTPFTWQTEHQLAFEALKKALLSAPALGLPDTSKPFTLFLDERQGIAKGVLTQKLGPWKRPVAYLSKKLDPVAAGWPPCLRIMAATAMLVKDSAKLTLGQPLTVITPHTLEAIVRQPPDRWITNARLTHYQALLLDTDRVQFGPPVTLNPATLLPVPENQPSPHDCRQVLAETHGTREDLKDQELPDADHTWYTDGSSYLDSGTRRAGAAVVDGHNTIWAQSLPPGTSAQKAELIALTKALELSKGKKANIYTDSRYAFATAHTHGSIYERRGWLTSEGKEIKNKAEIIALLKALFLPQEVAIIHCPGHQKGQDPVAVGNRQADRVARQAAMAEVLTLATEPDNTSHITAGKRTADGSEFEKRTADGSEFESPKKKAKVE

SEQ ID NO: 2000 - protein, 2121 aa, synthetic construct
MPAAKRVKLDGGDKKYSIGLDIGTNSVGWAVITDEYKVPSKKFKVLGNTDRHSIKKNLIGALLFDSGETAEATRLKRTARRRYTRRKNRICYLQEIFSNEMAKVDDSFFHRLEESFLVEEDKKHERHPIFGNIVDEVAYHEKYPTIYHLRKKLVDSTDKADLRLIYLALAHMIKFRGHFLIEGDLNPDNSDVDKLFIQLVQTYNQLFEENPINASGVDAKAILSARLSKSRRLENLIAQLPGEKKNGLFGNLIALSLGLTPNFKSNFDLAEDAKLQLSKDTYDDDLDNLLAQIGDQYADLFLAAKNLSDAILLSDILRVNTEITKAPLSASMIKRYDEHHQDLTLLKALVRQQLPEKYKEIFFDQSKNGYAGYIDGGASQEEFYKFIKPILEKMDGTEELLVKLNREDLLRKQRTFDNGSIPHQIHLGELHAILRRQEDFYPFLKDNREKIEKILTFRIPYYVGPLARGNSRFAWMTRKSEETITPWNFEEVVDKGASAQSFIERMTNFDKNLPNEKVLPKHSLLYEYFTVYNELTKVKYVTEGMRKPAFLSGEQKKAIVDLLFKTNRKVTVKQLKEDYFKKIECFDSVEISGVEDRFNASLGTYHDLLKIIKDKDFLDNEENEDILEDIVLTLTLFEDREMIEERLKTYAHLFDDKVMKQLKRRRYTGWGRLSRKLINGIRDKQSGKTILDFLKSDGFANRNFMQLIHDDSLTFKEDIQKAQVSGQGDSLHEHIANLAGSPAIKKGILQTVKVVDELVKVMGRHKPENIVIEMARENQTTQKGQKNSRERMKRIEEGIKELGSQILKEHPVENTQLQNEKLYLYYLQNGRDMYVDQELDINRLSDYDVDHIVPQSFLKDDSIDNKVLTRSDKARGKSDNVPSEEVVKKMKNYWRQLLNAKLITQRKFDNLTKAERGGLSELDKAGFIKRQLVETRQITKHVAQILDSRMNTKYDENDKLIREVKVITLKSKLVSDFRKDFQFYKVREINNYHHAHDAYLNAVVGTALIKKYPKLESEFVYGDYKVYDVRKMIAKSEQEIGKATAKYFFYSNIMNFFKTEITLANGEIRKRPLIETNGETGEIVWDKGRDFATVRKVLSMPQVNIVKKTEVQTGGFSKESILPKRNSDKLIARKKDWDPKKYGGFDSPTVAYSVLVVAKVEKGKSKKLKSVKELLGITIMERSSFEKNPIDFLEAKGYKEVKKDLIIKLPKYSLFELENGRKRMLASAGELQKGNELALPSKYVNFLYLASHYEKLKGSPEDNEQKQLFVEQHKHYLDEIIEQISEFSKRVILADANLDKVLSAYNKHRDKPIREQAENIIHLFTLTNLGAPAAFKYFDTTIDRKRYTSTKEVLDATLIHQSITGLYETRIDLSQLGGDGGEAAAKEAAAKEAAAKEAAAKEAAAKEAAAKGGTVSLQDEHRLFDIPVTTSLPDVWLQDFPQAWAETGGLGRAKCQAPIIIDLKPTAVPVSIKQYPMSLEAHMGIRQHIIKFLELGVLRPCRSPWNTPLLPVKKPGTQDYRPVQDLREINKRTVDIHPTVPNPYNLLSTLKPDYSWYTVLDLKDAFFCLPLAPQSQELFAFEWKDPERGISGQLTWTRLPQGFKNSPTLFNEALHRDLTDFRTQHPEVTLLQYVDDLLLAAPTKKACTQGTRHLLQELGEKGYRASAKKAQICQTKVTYLGYILSEGKRWLTPGRIETVARIPPPRNPREVREFLGKAGFCRLFIPGFAELAAPLYALTKPSTPFTWQTEHQLAFEALKKALLSAPALGLPDTSKPFTLFLDERQGIAKGVLTQKLGPWKRPVAYLSKKLDPVAAGWPPCLRIMAATAMLVKDSAKLTLGQPLTVITPHTLEAIVRQPPDRWITNARLTHYQALLLDTDRVQFGPPVTLNPATLLPVPENQPSPHDCRQVLAETHGTREDLKDQELPDADHTWYTDGSSYLDSGTRRAGAAVVDGHNTIWAQSLPPGTSAQKAELIALTKALELSKGKKANIYTDSRYAFATAHTHGSIYERRGWLTSEGKEIKNKAEIIALLKALFLPQEVAIIHCPGHQKGQDPVAVGNRQADRVARQAAMAEVLTLATEPDNTSHITAGKRTADGSEFEKRTADGSEFESPKKKAKVE

SEQ ID NO: 2001 - protein, 2102 aa, synthetic construct
MPAAKRVKLDGGDKKYSIGLDIGTNSVGWAVITDEYKVPSKKFKVLGNTDRHSIKKNLIGALLFDSGETAEATRLKRTARRRYTRRKNRICYLQEIFSNEMAKVDDSFFHRLEESFLVEEDKKHERHPIFGNIVDEVAYHEKYPTIYHLRKKLVDSTDKADLRLIYLALAHMIKFRGHFLIEGDLNPDNSDVDKLFIQLVQTYNQLFEENPINASGVDAKAILSARLSKSRRLENLIAQLPGEKKNGLFGNLIALSLGLTPNFKSNFDLAEDAKLQLSKDTYDDDLDNLLAQIGDQYADLFLAAKNLSDAILLSDILRVNTEITKAPLSASMIKRYDEHHQDLTLLKALVRQQLPEKYKEIFFDQSKNGYAGYIDGGASQEEFYKFIKPILEKMDGTEELLVKLNREDLLRKQRTFDNGSIPHQIHLGELHAILRRQEDFYPFLKDNREKIEKILTFRIPYYVGPLARGNSRFAWMTRKSEETITPWNFEEVVDKGASAQSFIERMTNFDKNLPNEKVLPKHSLLYEYFTVYNELTKVKYVTEGMRKPAFLSGEQKKAIVDLLFKTNRKVTVKQLKEDYFKKIECFDSVEISGVEDRFNASLGTYHDLLKIIKDKDFLDNEENEDILEDIVLTLTLFEDREMIEERLKTYAHLFDDKVMKQLKRRRYTGWGRLSRKLINGIRDKQSGKTILDFLKSDGFANRNFMQLIHDDSLTFKEDIQKAQVSGQGDSLHEHIANLAGSPAIKKGILQTVKVVDELVKVMGRHKPENIVIEMARENQTTQKGQKNSRERMKRIEEGIKELGSQILKEHPVENTQLQNEKLYLYYLQNGRDMYVDQELDINRLSDYDVDHIVPQSFLKDDSIDNKVLTRSDKARGKSDNVPSEEVVKKMKNYWRQLLNAKLITQRKFDNLTKAERGGLSELDKAGFIKRQLVETRQITKHVAQILDSRMNTKYDENDKLIREVKVITLKSKLVSDFRKDFQFYKVREINNYHHAHDAYLNAVVGTALIKKYPKLESEFVYGDYKVYDVRKMIAKSEQEIGKATAKYFFYSNIMNFFKTEITLANGEIRKRPLIETNGETGEIVWDKGRDFATVRKVLSMPQVNIVKKTEVQTGGFSKESILPKRNSDKLIARKKDWDPKKYGGFDSPTVAYSVLVVAKVEKGKSKKLKSVKELLGITIMERSSFEKNPIDFLEAKGYKEVKKDLIIKLPKYSLFELENGRKRMLASAGELQKGNELALPSKYVNFLYLASHYEKLKGSPEDNEQKQLFVEQHKHYLDEIIEQISEFSKRVILADANLDKVLSAYNKHRDKPIREQAENIIHLFTLTNLGAPAAFKYFDTTIDRKRYTSTKEVLDATLIHQSITGLYETRIDLSQLGGDGGEAAAKGGSGSSGGTVSLQDEHRLFDIPVTTSLPDVWLQDFPQAWAETGGLGRAKCQAPIIIDLKPTAVPVSIKQYPMSLEAHMGIRQHIIKFLELGVLRPCRSPWNTPLLPVKKPGTQDYRPVQDLREINKRTVDIHPTVPNPYNLLSTLKPDYSWYTVLDLKDAFFCLPLAPQSQELFAFEWKDPERGISGQLTWTRLPQGFKNSPTLFNEALHRDLTDFRTQHPEVTLLQYVDDLLLAAPTKKACTQGTRHLLQELGEKGYRASAKKAQICQTKVTYLGYILSEGKRWLTPGRIETVARIPPPRNPREVREFLGKAGFCRLFIPGFAELAAPLYALTKPSTPFTWQTEHQLAFEALKKALLSAPALGLPDTSKPFTLFLDERQGIAKGVLTQKLGPWKRPVAYLSKKLDPVAAGWPPCLRIMAATAMLVKDSAKLTLGQPLTVITPHTLEAIVRQPPDRWITNARLTHYQALLLDTDRVQFGPPVTLNPATLLPVPENQPSPHDCRQVLAETHGTREDLKDQELPDADHTWYTDGSSYLDSGTRRAGAAVVDGHNTIWAQSLPPGTSAQKAELIALTKALELSKGKKANIYTDSRYAFATAHTHGSIYERRGWLTSEGKEIKNKAEIIALLKALFLPQEVAIIHCPGHQKGQDPVAVGNRQADRVARQAAMAEVLTLATEPDNTSHITAGKRTADGSEFEKRTADGSEFESPKKKAKVE

SEQ ID NO: 2002 - protein, 2100 aa, synthetic construct
MPAAKRVKLDGGDKKYSIGLDIGTNSVGWAVITDEYKVPSKKFKVLGNTDRHSIKKNLIGALLFDSGETAEATRLKRTARRRYTRRKNRICYLQEIFSNEMAKVDDSFFHRLEESFLVEEDKKHERHPIFGNIVDEVAYHEKYPTIYHLRKKLVDSTDKADLRLIYLALAHMIKFRGHFLIEGDLNPDNSDVDKLFIQLVQTYNQLFEENPINASGVDAKAILSARLSKSRRLENLIAQLPGEKKNGLFGNLIALSLGLTPNFKSNFDLAEDAKLQLSKDTYDDDLDNLLAQIGDQYADLFLAAKNLSDAILLSDILRVNTEITKAPLSASMIKRYDEHHQDLTLLKALVRQQLPEKYKEIFFDQSKNGYAGYIDGGASQEEFYKFIKPILEKMDGTEELLVKLNREDLLRKQRTFDNGSIPHQIHLGELHAILRRQEDFYPFLKDNREKIEKILTFRIPYYVGPLARGNSRFAWMTRKSEETITPWNFEEVVDKGASAQSFIERMTNFDKNLPNEKVLPKHSLLYEYFTVYNELTKVKYVTEGMRKPAFLSGEQKKAIVDLLFKTNRKVTVKQLKEDYFKKIECFDSVEISGVEDRFNASLGTYHDLLKIIKDKDFLDNEENEDILEDIVLTLTLFEDREMIEERLKTYAHLFDDKVMKQLKRRRYTGWGRLSRKLINGIRDKQSGKTILDFLKSDGFANRNFMQLIHDDSLTFKEDIQKAQVSGQGDSLHEHIANLAGSPAIKKGILQTVKVVDELVKVMGRHKPENIVIEMARENQTTQKGQKNSRERMKRIEEGIKELGSQILKEHPVENTQLQNEKLYLYYLQNGRDMYVDQELDINRLSDYDVDHIVPQSFLKDDSIDNKVLTRSDKARGKSDNVPSEEVVKKMKNYWRQLLNAKLITQRKFDNLTKAERGGLSELDKAGFIKRQLVETRQITKHVAQILDSRMNTKYDENDKLIREVKVITLKSKLVSDFRKDFQFYKVREINNYHHAHDAYLNAVVGTALIKKYPKLESEFVYGDYKVYDVRKMIAKSEQEIGKATAKYFFYSNIMNFFKTEITLANGEIRKRPLIETNGETGEIVWDKGRDFATVRKVLSMPQVNIVKKTEVQTGGFSKESILPKRNSDKLIARKKDWDPKKYGGFDSPTVAYSVLVVAKVEKGKSKKLKSVKELLGITIMERSSFEKNPIDFLEAKGYKEVKKDLIIKLPKYSLFELENGRKRMLASAGELQKGNELALPSKYVNFLYLASHYEKLKGSPEDNEQKQLFVEQHKHYLDEIIEQISEFSKRVILADANLDKVLSAYNKHRDKPIREQAENIIHLFTLTNLGAPAAFKYFDTTIDRKRYTSTKEVLDATLIHQSITGLYETRIDLSQLGGDGGGGGGSSPAPGGTVSLQDEHRLFDIPVTTSLPDVWLQDFPQAWAETGGLGRAKCQAPIIIDLKPTAVPVSIKQYPMSLEAHMGIRQHIIKFLELGVLRPCRSPWNTPLLPVKKPGTQDYRPVQDLREINKRTVDIHPTVPNPYNLLSTLKPDYSWYTVLDLKDAFFCLPLAPQSQELFAFEWKDPERGISGQLTWTRLPQGFKNSPTLFNEALHRDLTDFRTQHPEVTLLQYVDDLLLAAPTKKACTQGTRHLLQELGEKGYRASAKKAQICQTKVTYLGYILSEGKRWLTPGRIETVARIPPPRNPREVREFLGKAGFCRLFIPGFAELAAPLYALTKPSTPFTWQTEHQLAFEALKKALLSAPALGLPDTSKPFTLFLDERQGIAKGVLTQKLGPWKRPVAYLSKKLDPVAAGWPPCLRIMAATAMLVKDSAKLTLGQPLTVITPHTLEAIVRQPPDRWITNARLTHYQALLLDTDRVQFGPPVTLNPATLLPVPENQPSPHDCRQVLAETHGTREDLKDQELPDADHTWYTDGSSYLDSGTRRAGAAVVDGHNTIWAQSLPPGTSAQKAELIALTKALELSKGKKANIYTDSRYAFATAHTHGSIYERRGWLTSEGKEIKNKAEIIALLKALFLPQEVAIIHCPGHQKGQDPVAVGNRQADRVARQAAMAEVLTLATEPDNTSHITAGKRTADGSEFEKRTADGSEFESPKKKAKVE

SEQ ID NO: 2003 - protein, 2102 aa, synthetic construct
MPAAKRVKLDGGDKKYSIGLDIGTNSVGWAVITDEYKVPSKKFKVLGNTDRHSIKKNLIGALLFDSGETAEATRLKRTARRRYTRRKNRICYLQEIFSNEMAKVDDSFFHRLEESFLVEEDKKHERHPIFGNIVDEVAYHEKYPTIYHLRKKLVDSTDKADLRLIYLALAHMIKFRGHFLIEGDLNPDNSDVDKLFIQLVQTYNQLFEENPINASGVDAKAILSARLSKSRRLENLIAQLPGEKKNGLFGNLIALSLGLTPNFKSNFDLAEDAKLQLSKDTYDDDLDNLLAQIGDQYADLFLAAKNLSDAILLSDILRVNTEITKAPLSASMIKRYDEHHQDLTLLKALVRQQLPEKYKEIFFDQSKNGYAGYIDGGASQEEFYKFIKPILEKMDGTEELLVKLNREDLLRKQRTFDNGSIPHQIHLGELHAILRRQEDFYPFLKDNREKIEKILTFRIPYYVGPLARGNSRFAWMTRKSEETITPWNFEEVVDKGASAQSFIERMTNFDKNLPNEKVLPKHSLLYEYFTVYNELTKVKYVTEGMRKPAFLSGEQKKAIVDLLFKTNRKVTVKQLKEDYFKKIECFDSVEISGVEDRFNASLGTYHDLLKIIKDKDFLDNEENEDILEDIVLTLTLFEDREMIEERLKTYAHLFDDKVMKQLKRRRYTGWGRLSRKLINGIRDKQSGKTILDFLKSDGFANRNFMQLIHDDSLTFKEDIQKAQVSGQGDSLHEHIANLAGSPAIKKGILQTVKVVDELVKVMGRHKPENIVIEMARENQTTQKGQKNSRERMKRIEEGIKELGSQILKEHPVENTQLQNEKLYLYYLQNGRDMYVDQELDINRLSDYDVDHIVPQSFLKDDSIDNKVLTRSDKARGKSDNVPSEEVVKKMKNYWRQLLNAKLITQRKFDNLTKAERGGLSELDKAGFIKRQLVETRQITKHVAQILDSRMNTKYDENDKLIREVKVITLKSKLVSDFRKDFQFYKVREINNYHHAHDAYLNAVVGTALIKKYPKLESEFVYGDYKVYDVRKMIAKSEQEIGKATAKYFFYSNIMNFFKTEITLANGEIRKRPLIETNGETGEIVWDKGRDFATVRKVLSMPQVNIVKKTEVQTGGFSKESILPKRNSDKLIARKKDWDPKKYGGFDSPTVAYSVLVVAKVEKGKSKKLKSVKELLGITIMERSSFEKNPIDFLEAKGYKEVKKDLIIKLPKYSLFELENGRKRMLASAGELQKGNELALPSKYVNFLYLASHYEKLKGSPEDNEQKQLFVEQHKHYLDEIIEQISEFSKRVILADANLDKVLSAYNKHRDKPIREQAENIIHLFTLTNLGAPAAFKYFDTTIDRKRYTSTKEVLDATLIHQSITGLYETRIDLSQLGGDGGGGSGGGEAAAKGGTVSLQDEHRLFDIPVTTSLPDVWLQDFPQAWAETGGLGRAKCQAPIIIDLKPTAVPVSIKQYPMSLEAHMGIRQHIIKFLELGVLRPCRSPWNTPLLPVKKPGTQDYRPVQDLREINKRTVDIHPTVPNPYNLLSTLKPDYSWYTVLDLKDAFFCLPLAPQSQELFAFEWKDPERGISGQLTWTRLPQGFKNSPTLFNEALHRDLTDFRTQHPEVTLLQYVDDLLLAAPTKKACTQGTRHLLQELGEKGYRASAKKAQICQTKVTYLGYILSEGKRWLTPGRIETVARIPPPRNPREVREFLGKAGFCRLFIPGFAELAAPLYALTKPSTPFTWQTEHQLAFEALKKALLSAPALGLPDTSKPFTLFLDERQGIAKGVLTQKLGPWKRPVAYLSKKLDPVAAGWPPCLRIMAATAMLVKDSAKLTLGQPLTVITPHTLEAIVRQPPDRWITNARLTHYQALLLDTDRVQFGPPVTLNPATLLPVPENQPSPHDCRQVLAETHGTREDLKDQELPDADHTWYTDGSSYLDSGTRRAGAAVVDGHNTIWAQSLPPGTSAQKAELIALTKALELSKGKKANIYTDSRYAFATAHTHGSIYERRGWLTSEGKEIKNKAEIIALLKALFLPQEVAIIHCPGHQKGQDPVAVGNRQADRVARQAAMAEVLTLATEPDNTSHITAGKRTADGSEFEKRTADGSEFESPKKKAKVE

SEQ ID NO: 2004 - protein, 2099 aa, synthetic construct
MPAAKRVKLDGGDKKYSIGLDIGTNSVGWAVITDEYKVPSKKFKVLGNTDRHSIKKNLIGALLFDSGETAEATRLKRTARRRYTRRKNRICYLQEIFSNEMAKVDDSFFHRLEESFLVEEDKKHERHPIFGNIVDEVAYHEKYPTIYHLRKKLVDSTDKADLRLIYLALAHMIKFRGHFLIEGDLNPDNSDVDKLFIQLVQTYNQLFEENPINASGVDAKAILSARLSKSRRLENLIAQLPGEKKNGLFGNLIALSLGLTPNFKSNFDLAEDAKLQLSKDTYDDDLDNLLAQIGDQYADLFLAAKNLSDAILLSDILRVNTEITKAPLSASMIKRYDEHHQDLTLLKALVRQQLPEKYKEIFFDQSKNGYAGYIDGGASQEEFYKFIKPILEKMDGTEELLVKLNREDLLRKQRTFDNGSIPHQIHLGELHAILRRQEDFYPFLKDNREKIEKILTFRIPYYVGPLARGNSRFAWMTRKSEETITPWNFEEVVDKGASAQSFIERMTNFDKNLPNEKVLPKHSLLYEYFTVYNELTKVKYVTEGMRKPAFLSGEQKKAIVDLLFKTNRKVTVKQLKEDYFKKIECFDSVEISGVEDRFNASLGTYHDLLKIIKDKDFLDNEENEDILEDIVLTLTLFEDREMIEERLKTYAHLFDDKVMKQLKRRRYTGWGRLSRKLINGIRDKQSGKTILDFLKSDGFANRNFMQLIHDDSLTFKEDIQKAQVSGQGDSLHEHIANLAGSPAIKKGILQTVKVVDELVKVMGRHKPENIVIEMARENQTTQKGQKNSRERMKRIEEGIKELGSQILKEHPVENTQLQNEKLYLYYLQNGRDMYVDQELDINRLSDYDVDHIVPQSFLKDDSIDNKVLTRSDKARGKSDNVPSEEVVKKMKNYWRQLLNAKLITQRKFDNLTKAERGGLSELDKAGFIKRQLVETRQITKHVAQILDSRMNTKYDENDKLIREVKVITLKSKLVSDFRKDFQFYKVREINNYHHAHDAYLNAVVGTALIKKYPKLESEFVYGDYKVYDVRKMIAKSEQEIGKATAKYFFYSNIMNFFKTEITLANGEIRKRPLIETNGETGEIVWDKGRDFATVRKVLSMPQVNIVKKTEVQTGGFSKESILPKRNSDKLIARKKDWDPKKYGGFDSPTVAYSVLVVAKVEKGKSKKLKSVKELLGITIMERSSFEKNPIDFLEAKGYKEVKKDLIIKLPKYSLFELENGRKRMLASAGELQKGNELALPSKYVNFLYLASHYEKLKGSPEDNEQKQLFVEQHKHYLDEIIEQISEFSKRVILADANLDKVLSAYNKHRDKPIREQAENIIHLFTLTNLGAPAAFKYFDTTIDRKRYTSTKEVLDATLIHQSITGLYETRIDLSQLGGDGGGGGEAAAKGGTVSLQDEHRLFDIPVTTSLPDVWLQDFPQAWAETGGLGRAKCQAPIIIDLKPTAVPVSIKQYPMSLEAHMGIRQHIIKFLELGVLRPCRSPWNTPLLPVKKPGTQDYRPVQDLREINKRTVDIHPTVPNPYNLLSTLKPDYSWYTVLDLKDAFFCLPLAPQSQELFAFEWKDPERGISGQLTWTRLPQGFKNSPTLFNEALHRDLTDFRTQHPEVTLLQYVDDLLLAAPTKKACTQGTRHLLQELGEKGYRASAKKAQICQTKVTYLGYILSEGKRWLTPGRIETVARIPPPRNPREVREFLGKAGFCRLFIPGFAELAAPLYALTKPSTPFTWQTEHQLAFEALKKALLSAPALGLPDTSKPFTLFLDERQGIAKGVLTQKLGPWKRPVAYLSKKLDPVAAGWPPCLRIMAATAMLVKDSAKLTLGQPLTVITPHTLEAIVRQPPDRWITNARLTHYQALLLDTDRVQFGPPVTLNPATLLPVPENQPSPHDCRQVLAETHGTREDLKDQELPDADHTWYTDGSSYLDSGTRRAGAAVVDGHNTIWAQSLPPGTSAQKAELIALTKALELSKGKKANIYTDSRYAFATAHTHGSIYERRGWLTSEGKEIKNKAEIIALLKALFLPQEVAIIHCPGHQKGQDPVAVGNRQADRVARQAAMAEVLTLATEPDNTSHITAGKRTADGSEFEKRTADGSEFESPKKKAKVE

SEQ ID NO: 2005 - protein, 2103 aa, synthetic construct
MPAAKRVKLDGGDKKYSIGLDIGTNSVGWAVITDEYKVPSKKFKVLGNTDRHSIKKNLIGALLFDSGETAEATRLKRTARRRYTRRKNRICYLQEIFSNEMAKVDDSFFHRLEESFLVEEDKKHERHPIFGNIVDEVAYHEKYPTIYHLRKKLVDSTDKADLRLIYLALAHMIKFRGHFLIEGDLNPDNSDVDKLFIQLVQTYNQLFEENPINASGVDAKAILSARLSKSRRLENLIAQLPGEKKNGLFGNLIALSLGLTPNFKSNFDLAEDAKLQLSKDTYDDDLDNLLAQIGDQYADLFLAAKNLSDAILLSDILRVNTEITKAPLSASMIKRYDEHHQDLTLLKALVRQQLPEKYKEIFFDQSKNGYAGYIDGGASQEEFYKFIKPILEKMDGTEELLVKLNREDLLRKQRTFDNGSIPHQIHLGELHAILRRQEDFYPFLKDNREKIEKILTFRIPYYVGPLARGNSRFAWMTRKSEETITPWNFEEVVDKGASAQSFIERMTNFDKNLPNEKVLPKHSLLYEYFTVYNELTKVKYVTEGMRKPAFLSGEQKKAIVDLLFKTNRKVTVKQLKEDYFKKIECFDSVEISGVEDRFNASLGTYHDLLKIIKDKDFLDNEENEDILEDIVLTLTLFEDREMIEERLKTYAHLFDDKVMKQLKRRRYTGWGRLSRKLINGIRDKQSGKTILDFLKSDGFANRNFMQLIHDDSLTFKEDIQKAQVSGQGDSLHEHIANLAGSPAIKKGILQTVKVVDELVKVMGRHKPENIVIEMARENQTTQKGQKNSRERMKRIEEGIKELGSQILKEHPVENTQLQNEKLYLYYLQNGRDMYVDQELDINRLSDYDVDHIVPQSFLKDDSIDNKVLTRSDKARGKSDNVPSEEVVKKMKNYWRQLLNAKLITQRKFDNLTKAERGGLSELDKAGFIKRQLVETRQITKHVAQILDSRMNTKYDENDKLIREVKVITLKSKLVSDFRKDFQFYKVREINNYHHAHDAYLNAVVGTALIKKYPKLESEFVYGDYKVYDVRKMIAKSEQEIGKATAKYFFYSNIMNFFKTEITLANGEIRKRPLIETNGETGEIVWDKGRDFATVRKVLSMPQVNIVKKTEVQTGGFSKESILPKRNSDKLIARKKDWDPKKYGGFDSPTVAYSVLVVAKVEKGKSKKLKSVKELLGITIMERSSFEKNPIDFLEAKGYKEVKKDLIIKLPKYSLFELENGRKRMLASAGELQKGNELALPSKYVNFLYLASHYEKLKGSPEDNEQKQLFVEQHKHYLDEIIEQISEFSKRVILADANLDKVLSAYNKHRDKPIREQAENIIHLFTLTNLGAPAAFKYFDTTIDRKRYTSTKEVLDATLIHQSITGLYETRIDLSQLGGDGGGSAGSAAGSGEFGGTVSLQDEHRLFDIPVTTSLPDVWLQDFPQAWAETGGLGRAKCQAPIIIDLKPTAVPVSIKQYPMSLEAHMGIRQHIIKFLELGVLRPCRSPWNTPLLPVKKPGTQDYRPVQDLREINKRTVDIHPTVPNPYNLLSTLKPDYSWYTVLDLKDAFFCLPLAPQSQELFAFEWKDPERGISGQLTWTRLPQGFKNSPTLFNEALHRDLTDFRTQHPEVTLLQYVDDLLLAAPTKKACTQGTRHLLQELGEKGYRASAKKAQICQTKVTYLGYILSEGKRWLTPGRIETVARIPPPRNPREVREFLGKAGFCRLFIPGFAELAAPLYALTKPSTPFTWQTEHQLAFEALKKALLSAPALGLPDTSKPFTLFLDERQGIAKGVLTQKLGPWKRPVAYLSKKLDPVAAGWPPCLRIMAATAMLVKDSAKLTLGQPLTVITPHTLEAIVRQPPDRWITNARLTHYQALLLDTDRVQFGPPVTLNPATLLPVPENQPSPHDCRQVLAETHGTREDLKDQELPDADHTWYTDGSSYLDSGTRRAGAAVVDGHNTIWAQSLPPGTSAQKAELIALTKALELSKGKKANIYTDSRYAFATAHTHGSIYERRGWLTSEGKEIKNKAEIIALLKALFLPQEVAIIHCPGHQKGQDPVAVGNRQADRVARQAAMAEVLTLATEPDNTSHITAGKRTADGSEFEKRTADGSEFESPKKKAKVE

SEQ ID NO: 2006 - protein, 2096 aa, synthetic construct
MPAAKRVKLDGGDKKYSIGLDIGTNSVGWAVITDEYKVPSKKFKVLGNTDRHSIKKNLIGALLFDSGETAEATRLKRTARRRYTRRKNRICYLQEIFSNEMAKVDDSFFHRLEESFLVEEDKKHERHPIFGNIVDEVAYHEKYPTIYHLRKKLVDSTDKADLRLIYLALAHMIKFRGHFLIEGDLNPDNSDVDKLFIQLVQTYNQLFEENPINASGVDAKAILSARLSKSRRLENLIAQLPGEKKNGLFGNLIALSLGLTPNFKSNFDLAEDAKLQLSKDTYDDDLDNLLAQIGDQYADLFLAAKNLSDAILLSDILRVNTEITKAPLSASMIKRYDEHHQDLTLLKALVRQQLPEKYKEIFFDQSKNGYAGYIDGGASQEEFYKFIKPILEKMDGTEELLVKLNREDLLRKQRTFDNGSIPHQIHLGELHAILRRQEDFYPFLKDNREKIEKILTFRIPYYVGPLARGNSRFAWMTRKSEETITPWNFEEVVDKGASAQSFIERMTNFDKNLPNEKVLPKHSLLYEYFTVYNELTKVKYVTEGMRKPAFLSGEQKKAIVDLLFKTNRKVTVKQLKEDYFKKIECFDSVEISGVEDRFNASLGTYHDLLKIIKDKDFLDNEENEDILEDIVLTLTLFEDREMIEERLKTYAHLFDDKVMKQLKRRRYTGWGRLSRKLINGIRDKQSGKTILDFLKSDGFANRNFMQLIHDDSLTFKEDIQKAQVSGQGDSLHEHIANLAGSPAIKKGILQTVKVVDELVKVMGRHKPENIVIEMARENQTTQKGQKNSRERMKRIEEGIKELGSQILKEHPVENTQLQNEKLYLYYLQNGRDMYVDQELDINRLSDYDVDHIVPQSFLKDDSIDNKVLTRSDKARGKSDNVPSEEVVKKMKNYWRQLLNAKLITQRKFDNLTKAERGGLSELDKAGFIKRQLVETRQITKHVAQILDSRMNTKYDENDKLIREVKVITLKSKLVSDFRKDFQFYKVREINNYHHAHDAYLNAVVGTALIKKYPKLESEFVYGDYKVYDVRKMIAKSEQEIGKATAKYFFYSNIMNFFKTEITLANGEIRKRPLIETNGETGEIVWDKGRDFATVRKVLSMPQVNIVKKTEVQTGGFSKESILPKRNSDKLIARKKDWDPKKYGGFDSPTVAYSVLVVAKVEKGKSKKLKSVKELLGITIMERSSFEKNPIDFLEAKGYKEVKKDLIIKLPKYSLFELENGRKRMLASAGELQKGNELALPSKYVNFLYLASHYEKLKGSPEDNEQKQLFVEQHKHYLDEIIEQISEFSKRVILADANLDKVLSAYNKHRDKPIREQAENIIHLFTLTNLGAPAAFKYFDTTIDRKRYTSTKEVLDATLIHQSITGLYETRIDLSQLGGDGGGGGGSGGTVSLQDEHRLFDIPVTTSLPDVWLQDFPQAWAETGGLGRAKCQAPIIIDLKPTAVPVSIKQYPMSLEAHMGIRQHIIKFLELGVLRPCRSPWNTPLLPVKKPGTQDYRPVQDLREINKRTVDIHPTVPNPYNLLSTLKPDYSWYTVLDLKDAFFCLPLAPQSQELFAFEWKDPERGISGQLTWTRLPQGFKNSPTLFNEALHRDLTDFRTQHPEVTLLQYVDDLLLAAPTKKACTQGTRHLLQELGEKGYRASAKKAQICQTKVTYLGYILSEGKRWLTPGRIETVARIPPPRNPREVREFLGKAGFCRLFIPGFAELAAPLYALTKPSTPFTWQTEHQLAFEALKKALLSAPALGLPDTSKPFTLFLDERQGIAKGVLTQKLGPWKRPVAYLSKKLDPVAAGWPPCLRIMAATAMLVKDSAKLTLGQPLTVITPHTLEAIVRQPPDRWITNARLTHYQALLLDTDRVQFGPPVTLNPATLLPVPENQPSPHDCRQVLAETHGTREDLKDQELPDADHTWYTDGSSYLDSGTRRAGAAVVDGHNTIWAQSLPPGTSAQKAELIALTKALELSKGKKANIYTDSRYAFATAHTHGSIYERRGWLTSEGKEIKNKAEIIALLKALFLPQEVAIIHCPGHQKGQDPVAVGNRQADRVARQAAMAEVLTLATEPDNTSHITAGKRTADGSEFEKRTADGSEFESPKKKAKVE

SEQ ID NO: 2007 - protein, 2100 aa, synthetic construct
MPAAKRVKLDGGDKKYSIGLDIGTNSVGWAVITDEYKVPSKKFKVLGNTDRHSIKKNLIGALLFDSGETAEATRLKRTARRRYTRRKNRICYLQEIFSNEMAKVDDSFFHRLEESFLVEEDKKHERHPIFGNIVDEVAYHEKYPTIYHLRKKLVDSTDKADLRLIYLALAHMIKFRGHFLIEGDLNPDNSDVDKLFIQLVQTYNQLFEENPINASGVDAKAILSARLSKSRRLENLIAQLPGEKKNGLFGNLIALSLGLTPNFKSNFDLAEDAKLQLSKDTYDDDLDNLLAQIGDQYADLFLAAKNLSDAILLSDILRVNTEITKAPLSASMIKRYDEHHQDLTLLKALVRQQLPEKYKEIFFDQSKNGYAGYIDGGASQEEFYKFIKPILEKMDGTEELLVKLNREDLLRKQRTFDNGSIPHQIHLGELHAILRRQEDFYPFLKDNREKIEKILTFRIPYYVGPLARGNSRFAWMTRKSEETITPWNFEEVVDKGASAQSFIERMTNFDKNLPNEKVLPKHSLLYEYFTVYNELTKVKYVTEGMRKPAFLSGEQKKAIVDLLFKTNRKVTVKQLKEDYFKKIECFDSVEISGVEDRFNASLGTYHDLLKIIKDKDFLDNEENEDILEDIVLTLTLFEDREMIEERLKTYAHLFDDKVMKQLKRRRYTGWGRLSRKLINGIRDKQSGKTILDFLKSDGFANRNFMQLIHDDSLTFKEDIQKAQVSGQGDSLHEHIANLAGSPAIKKGILQTVKVVDELVKVMGRHKPENIVIEMARENQTTQKGQKNSRERMKRIEEGIKELGSQILKEHPVENTQLQNEKLYLYYLQNGRDMYVDQELDINRLSDYDVDHIVPQSFLKDDSIDNKVLTRSDKARGKSDNVPSEEVVKKMKNYWRQLLNAKLITQRKFDNLTKAERGGLSELDKAGFIKRQLVETRQITKHVAQILDSRMNTKYDENDKLIREVKVITLKSKLVSDFRKDFQFYKVREINNYHHAHDAYLNAVVGTALIKKYPKLESEFVYGDYKVYDVRKMIAKSEQEIGKATAKYFFYSNIMNFFKTEITLANGEIRKRPLIETNGETGEIVWDKGRDFATVRKVLSMPQVNIVKKTEVQTGGFSKESILPKRNSDKLIARKKDWDPKKYGGFDSPTVAYSVLVVAKVEKGKSKKLKSVKELLGITIMERSSFEKNPIDFLEAKGYKEVKKDLIIKLPKYSLFELENGRKRMLASAGELQKGNELALPSKYVNFLYLASHYEKLKGSPEDNEQKQLFVEQHKHYLDEIIEQISEFSKRVILADANLDKVLSAYNKHRDKPIREQAENIIHLFTLTNLGAPAAFKYFDTTIDRKRYTSTKEVLDATLIHQSITGLYETRIDLSQLGGDGGGSSGGGPAPGGTVSLQDEHRLFDIPVTTSLPDVWLQDFPQAWAETGGLGRAKCQAPIIIDLKPTAVPVSIKQYPMSLEAHMGIRQHIIKFLELGVLRPCRSPWNTPLLPVKKPGTQDYRPVQDLREINKRTVDIHPTVPNPYNLLSTLKPDYSWYTVLDLKDAFFCLPLAPQSQELFAFEWKDPERGISGQLTWTRLPQGFKNSPTLFNEALHRDLTDFRTQHPEVTLLQYVDDLLLAAPTKKACTQGTRHLLQELGEKGYRASAKKAQICQTKVTYLGYILSEGKRWLTPGRIETVARIPPPRNPREVREFLGKAGFCRLFIPGFAELAAPLYALTKPSTPFTWQTEHQLAFEALKKALLSAPALGLPDTSKPFTLFLDERQGIAKGVLTQKLGPWKRPVAYLSKKLDPVAAGWPPCLRIMAATAMLVKDSAKLTLGQPLTVITPHTLEAIVRQPPDRWITNARLTHYQALLLDTDRVQFGPPVTLNPATLLPVPENQPSPHDCRQVLAETHGTREDLKDQELPDADHTWYTDGSSYLDSGTRRAGAAVVDGHNTIWAQSLPPGTSAQKAELIALTKALELSKGKKANIYTDSRYAFATAHTHGSIYERRGWLTSEGKEIKNKAEIIALLKALFLPQEVAIIHCPGHQKGQDPVAVGNRQADRVARQAAMAEVLTLATEPDNTSHITAGKRTADGSEFEKRTADGSEFESPKKKAKVE

SEQ ID NO: 2008 - protein, 2096 aa, synthetic construct
MPAAKRVKLDGGDKKYSIGLDIGTNSVGWAVITDEYKVPSKKFKVLGNTDRHSIKKNLIGALLFDSGETAEATRLKRTARRRYTRRKNRICYLQEIFSNEMAKVDDSFFHRLEESFLVEEDKKHERHPIFGNIVDEVAYHEKYPTIYHLRKKLVDSTDKADLRLIYLALAHMIKFRGHFLIEGDLNPDNSDVDKLFIQLVQTYNQLFEENPINASGVDAKAILSARLSKSRRLENLIAQLPGEKKNGLFGNLIALSLGLTPNFKSNFDLAEDAKLQLSKDTYDDDLDNLLAQIGDQYADLFLAAKNLSDAILLSDILRVNTEITKAPLSASMIKRYDEHHQDLTLLKALVRQQLPEKYKEIFFDQSKNGYAGYIDGGASQEEFYKFIKPILEKMDGTEELLVKLNREDLLRKQRTFDNGSIPHQIHLGELHAILRRQEDFYPFLKDNREKIEKILTFRIPYYVGPLARGNSRFAWMTRKSEETITPWNFEEVVDKGASAQSFIERMTNFDKNLPNEKVLPKHSLLYEYFTVYNELTKVKYVTEGMRKPAFLSGEQKKAIVDLLFKTNRKVTVKQLKEDYFKKIECFDSVEISGVEDRFNASLGTYHDLLKIIKDKDFLDNEENEDILEDIVLTLTLFEDREMIEERLKTYAHLFDDKVMKQLKRRRYTGWGRLSRKLINGIRDKQSGKTILDFLKSDGFANRNFMQLIHDDSLTFKEDIQKAQVSGQGDSLHEHIANLAGSPAIKKGILQTVKVVDELVKVMGRHKPENIVIEMARENQTTQKGQKNSRERMKRIEEGIKELGSQILKEHPVENTQLQNEKLYLYYLQNGRDMYVDQELDINRLSDYDVDHIVPQSFLKDDSIDNKVLTRSDKARGKSDNVPSEEVVKKMKNYWRQLLNAKLITQRKFDNLTKAERGGLSELDKAGFIKRQLVETRQITKHVAQILDSRMNTKYDENDKLIREVKVITLKSKLVSDFRKDFQFYKVREINNYHHAHDAYLNAVVGTALIKKYPKLESEFVYGDYKVYDVRKMIAKSEQEIGKATAKYFFYSNIMNFFKTEITLANGEIRKRPLIETNGETGEIVWDKGRDFATVRKVLSMPQVNIVKKTEVQTGGFSKESILPKRNSDKLIARKKDWDPKKYGGFDSPTVAYSVLVVAKVEKGKSKKLKSVKELLGITIMERSSFEKNPIDFLEAKGYKEVKKDLIIKLPKYSLFELENGRKRMLASAGELQKGNELALPSKYVNFLYLASHYEKLKGSPEDNEQKQLFVEQHKHYLDEIIEQISEFSKRVILADANLDKVLSAYNKHRDKPIREQAENIIHLFTLTNLGAPAAFKYFDTTIDRKRYTSTKEVLDATLIHQSITGLYETRIDLSQLGGDGGEAAAKGGTVSLQDEHRLFDIPVTTSLPDVWLQDFPQAWAETGGLGRAKCQAPIIIDLKPTAVPVSIKQYPMSLEAHMGIRQHIIKFLELGVLRPCRSPWNTPLLPVKKPGTQDYRPVQDLREINKRTVDIHPTVPNPYNLLSTLKPDYSWYTVLDLKDAFFCLPLAPQSQELFAFEWKDPERGISGQLTWTRLPQGFKNSPTLFNEALHRDLTDFRTQHPEVTLLQYVDDLLLAAPTKKACTQGTRHLLQELGEKGYRASAKKAQICQTKVTYLGYILSEGKRWLTPGRIETVARIPPPRNPREVREFLGKAGFCRLFIPGFAELAAPLYALTKPSTPFTWQTEHQLAFEALKKALLSAPALGLPDTSKPFTLFLDERQGIAKGVLTQKLGPWKRPVAYLSKKLDPVAAGWPPCLRIMAATAMLVKDSAKLTLGQPLTVITPHTLEAIVRQPPDRWITNARLTHYQALLLDTDRVQFGPPVTLNPATLLPVPENQPSPHDCRQVLAETHGTREDLKDQELPDADHTWYTDGSSYLDSGTRRAGAAVVDGHNTIWAQSLPPGTSAQKAELIALTKALELSKGKKANIYTDSRYAFATAHTHGSIYERRGWLTSEGKEIKNKAEIIALLKALFLPQEVAIIHCPGHQKGQDPVAVGNRQADRVARQAAMAEVLTLATEPDNTSHITAGKRTADGSEFEKRTADGSEFESPKKKAKVE

SEQ ID NO: 2009 - protein, 2102 aa, synthetic construct
MPAAKRVKLDGGDKKYSIGLDIGTNSVGWAVITDEYKVPSKKFKVLGNTDRHSIKKNLIGALLFDSGETAEATRLKRTARRRYTRRKNRICYLQEIFSNEMAKVDDSFFHRLEESFLVEEDKKHERHPIFGNIVDEVAYHEKYPTIYHLRKKLVDSTDKADLRLIYLALAHMIKFRGHFLIEGDLNPDNSDVDKLFIQLVQTYNQLFEENPINASGVDAKAILSARLSKSRRLENLIAQLPGEKKNGLFGNLIALSLGLTPNFKSNFDLAEDAKLQLSKDTYDDDLDNLLAQIGDQYADLFLAAKNLSDAILLSDILRVNTEITKAPLSASMIKRYDEHHQDLTLLKALVRQQLPEKYKEIFFDQSKNGYAGYIDGGASQEEFYKFIKPILEKMDGTEELLVKLNREDLLRKQRTFDNGSIPHQIHLGELHAILRRQEDFYPFLKDNREKIEKILTFRIPYYVGPLARGNSRFAWMTRKSEETITPWNFEEVVDKGASAQSFIERMTNFDKNLPNEKVLPKHSLLYEYFTVYNELTKVKYVTEGMRKPAFLSGEQKKAIVDLLFKTNRKVTVKQLKEDYFKKIECFDSVEISGVEDRFNASLGTYHDLLKIIKDKDFLDNEENEDILEDIVLTLTLFEDREMIEERLKTYAHLFDDKVMKQLKRRRYTGWGRLSRKLINGIRDKQSGKTILDFLKSDGFANRNFMQLIHDDSLTFKEDIQKAQVSGQGDSLHEHIANLAGSPAIKKGILQTVKVVDELVKVMGRHKPENIVIEMARENQTTQKGQKNSRERMKRIEEGIKELGSQILKEHPVENTQLQNEKLYLYYLQNGRDMYVDQELDINRLSDYDVDHIVPQSFLKDDSIDNKVLTRSDKARGKSDNVPSEEVVKKMKNYWRQLLNAKLITQRKFDNLTKAERGGLSELDKAGFIKRQLVETRQITKHVAQILDSRMNTKYDENDKLIREVKVITLKSKLVSDFRKDFQFYKVREINNYHHAHDAYLNAVVGTALIKKYPKLESEFVYGDYKVYDVRKMIAKSEQEIGKATAKYFFYSNIMNFFKTEITLANGEIRKRPLIETNGETGEIVWDKGRDFATVRKVLSMPQVNIVKKTEVQTGGFSKESILPKRNSDKLIARKKDWDPKKYGGFDSPTVAYSVLVVAKVEKGKSKKLKSVKELLGITIMERSSFEKNPIDFLEAKGYKEVKKDLIIKLPKYSLFELENGRKRMLASAGELQKGNELALPSKYVNFLYLASHYEKLKGSPEDNEQKQLFVEQHKHYLDEIIEQISEFSKRVILADANLDKVLSAYNKHRDKPIREQAENIIHLFTLTNLGAPAAFKYFDTTIDRKRYTSTKEVLDATLIHQSITGLYETRIDLSQLGGDGGEAAAKGGGGSSGGTVSLQDEHRLFDIPVTTSLPDVWLQDFPQAWAETGGLGRAKCQAPIIIDLKPTAVPVSIKQYPMSLEAHMGIRQHIIKFLELGVLRPCRSPWNTPLLPVKKPGTQDYRPVQDLREINKRTVDIHPTVPNPYNLLSTLKPDYSWYTVLDLKDAFFCLPLAPQSQELFAFEWKDPERGISGQLTWTRLPQGFKNSPTLFNEALHRDLTDFRTQHPEVTLLQYVDDLLLAAPTKKACTQGTRHLLQELGEKGYRASAKKAQICQTKVTYLGYILSEGKRWLTPGRIETVARIPPPRNPREVREFLGKAGFCRLFIPGFAELAAPLYALTKPSTPFTWQTEHQLAFEALKKALLSAPALGLPDTSKPFTLFLDERQGIAKGVLTQKLGPWKRPVAYLSKKLDPVAAGWPPCLRIMAATAMLVKDSAKLTLGQPLTVITPHTLEAIVRQPPDRWITNARLTHYQALLLDTDRVQFGPPVTLNPATLLPVPENQPSPHDCRQVLAETHGTREDLKDQELPDADHTWYTDGSSYLDSGTRRAGAAVVDGHNTIWAQSLPPGTSAQKAELIALTKALELSKGKKANIYTDSRYAFATAHTHGSIYERRGWLTSEGKEIKNKAEIIALLKALFLPQEVAIIHCPGHQKGQDPVAVGNRQADRVARQAAMAEVLTLATEPDNTSHITAGKRTADGSEFEKRTADGSEFESPKKKAKVE

SEQ ID NO: 2010 - protein, 2100 aa, synthetic construct
MPAAKRVKLDGGDKKYSIGLDIGTNSVGWAVITDEYKVPSKKFKVLGNTDRHSIKKNLIGALLFDSGETAEATRLKRTARRRYTRRKNRICYLQEIFSNEMAKVDDSFFHRLEESFLVEEDKKHERHPIFGNIVDEVAYHEKYPTIYHLRKKLVDSTDKADLRLIYLALAHMIKFRGHFLIEGDLNPDNSDVDKLFIQLVQTYNQLFEENPINASGVDAKAILSARLSKSRRLENLIAQLPGEKKNGLFGNLIALSLGLTPNFKSNFDLAEDAKLQLSKDTYDDDLDNLLAQIGDQYADLFLAAKNLSDAILLSDILRVNTEITKAPLSASMIKRYDEHHQDLTLLKALVRQQLPEKYKEIFFDQSKNGYAGYIDGGASQEEFYKFIKPILEKMDGTEELLVKLNREDLLRKQRTFDNGSIPHQIHLGELHAILRRQEDFYPFLKDNREKIEKILTFRIPYYVGPLARGNSRFAWMTRKSEETITPWNFEEVVDKGASAQSFIERMTNFDKNLPNEKVLPKHSLLYEYFTVYNELTKVKYVTEGMRKPAFLSGEQKKAIVDLLFKTNRKVTVKQLKEDYFKKIECFDSVEISGVEDRFNASLGTYHDLLKIIKDKDFLDNEENEDILEDIVLTLTLFEDREMIEERLKTYAHLFDDKVMKQLKRRRYTGWGRLSRKLINGIRDKQSGKTILDFLKSDGFANRNFMQLIHDDSLTFKEDIQKAQVSGQGDSLHEHIANLAGSPAIKKGILQTVKVVDELVKVMGRHKPENIVIEMARENQTTQKGQKNSRERMKRIEEGIKELGSQILKEHPVENTQLQNEKLYLYYLQNGRDMYVDQELDINRLSDYDVDHIVPQSFLKDDSIDNKVLTRSDKARGKSDNVPSEEVVKKMKNYWRQLLNAKLITQRKFDNLTKAERGGLSELDKAGFIKRQLVETRQITKHVAQILDSRMNTKYDENDKLIREVKVITLKSKLVSDFRKDFQFYKVREINNYHHAHDAYLNAVVGTALIKKYPKLESEFVYGDYKVYDVRKMIAKSEQEIGKATAKYFFYSNIMNFFKTEITLANGEIRKRPLIETNGETGEIVWDKGRDFATVRKVLSMPQVNIVKKTEVQTGGFSKESILPKRNSDKLIARKKDWDPKKYGGFDSPTVAYSVLVVAKVEKGKSKKLKSVKELLGITIMERSSFEKNPIDFLEAKGYKEVKKDLIIKLPKYSLFELENGRKRMLASAGELQKGNELALPSKYVNFLYLASHYEKLKGSPEDNEQKQLFVEQHKHYLDEIIEQISEFSKRVILADANLDKVLSAYNKHRDKPIREQAENIIHLFTLTNLGAPAAFKYFDTTIDRKRYTSTKEVLDATLIHQSITGLYETRIDLSQLGGDGGPAPGGSGGGGGTVSLQDEHRLFDIPVTTSLPDVWLQDFPQAWAETGGLGRAKCQAPIIIDLKPTAVPVSIKQYPMSLEAHMGIRQHIIKFLELGVLRPCRSPWNTPLLPVKKPGTQDYRPVQDLREINKRTVDIHPTVPNPYNLLSTLKPDYSWYTVLDLKDAFFCLPLAPQSQELFAFEWKDPERGISGQLTWTRLPQGFKNSPTLFNEALHRDLTDFRTQHPEVTLLQYVDDLLLAAPTKKACTQGTRHLLQELGEKGYRASAKKAQICQTKVTYLGYILSEGKRWLTPGRIETVARIPPPRNPREVREFLGKAGFCRLFIPGFAELAAPLYALTKPSTPFTWQTEHQLAFEALKKALLSAPALGLPDTSKPFTLFLDERQGIAKGVLTQKLGPWKRPVAYLSKKLDPVAAGWPPCLRIMAATAMLVKDSAKLTLGQPLTVITPHTLEAIVRQPPDRWITNARLTHYQALLLDTDRVQFGPPVTLNPATLLPVPENQPSPHDCRQVLAETHGTREDLKDQELPDADHTWYTDGSSYLDSGTRRAGAAVVDGHNTIWAQSLPPGTSAQKAELIALTKALELSKGKKANIYTDSRYAFATAHTHGSIYERRGWLTSEGKEIKNKAEIIALLKALFLPQEVAIIHCPGHQKGQDPVAVGNRQADRVARQAAMAEVLTLATEPDNTSHITAGKRTADGSEFEKRTADGSEFESPKKKAKVE

SEQ ID NO: 2011 - protein, 2100 aa, synthetic construct
MPAAKRVKLDGGDKKYSIGLDIGTNSVGWAVITDEYKVPSKKFKVLGNTDRHSIKKNLIGALLFDSGETAEATRLKRTARRRYTRRKNRICYLQEIFSNEMAKVDDSFFHRLEESFLVEEDKKHERHPIFGNIVDEVAYHEKYPTIYHLRKKLVDSTDKADLRLIYLALAHMIKFRGHFLIEGDLNPDNSDVDKLFIQLVQTYNQLFEENPINASGVDAKAILSARLSKSRRLENLIAQLPGEKKNGLFGNLIALSLGLTPNFKSNFDLAEDAKLQLSKDTYDDDLDNLLAQIGDQYADLFLAAKNLSDAILLSDILRVNTEITKAPLSASMIKRYDEHHQDLTLLKALVRQQLPEKYKEIFFDQSKNGYAGYIDGGASQEEFYKFIKPILEKMDGTEELLVKLNREDLLRKQRTFDNGSIPHQIHLGELHAILRRQEDFYPFLKDNREKIEKILTFRIPYYVGPLARGNSRFAWMTRKSEETITPWNFEEVVDKGASAQSFIERMTNFDKNLPNEKVLPKHSLLYEYFTVYNELTKVKYVTEGMRKPAFLSGEQKKAIVDLLFKTNRKVTVKQLKEDYFKKIECFDSVEISGVEDRFNASLGTYHDLLKIIKDKDFLDNEENEDILEDIVLTLTLFEDREMIEERLKTYAHLFDDKVMKQLKRRRYTGWGRLSRKLINGIRDKQSGKTILDFLKSDGFANRNFMQLIHDDSLTFKEDIQKAQVSGQGDSLHEHIANLAGSPAIKKGILQTVKVVDELVKVMGRHKPENIVIEMARENQTTQKGQKNSRERMKRIEEGIKELGSQILKEHPVENTQLQNEKLYLYYLQNGRDMYVDQELDINRLSDYDVDHIVPQSFLKDDSIDNKVLTRSDKARGKSDNVPSEEVVKKMKNYWRQLLNAKLITQRKFDNLTKAERGGLSELDKAGFIKRQLVETRQITKHVAQILDSRMNTKYDENDKLIREVKVITLKSKLVSDFRKDFQFYKVREINNYHHAHDAYLNAVVGTALIKKYPKLESEFVYGDYKVYDVRKMIAKSEQEIGKATAKYFFYSNIMNFFKTEITLANGEIRKRPLIETNGETGEIVWDKGRDFATVRKVLSMPQVNIVKKTEVQTGGFSKESILPKRNSDKLIARKKDWDPKKYGGFDSPTVAYSVLVVAKVEKGKSKKLKSVKELLGITIMERSSFEKNPIDFLEAKGYKEVKKDLIIKLPKYSLFELENGRKRMLASAGELQKGNELALPSKYVNFLYLASHYEKLKGSPEDNEQKQLFVEQHKHYLDEIIEQISEFSKRVILADANLDKVLSAYNKHRDKPIREQAENIIHLFTLTNLGAPAAFKYFDTTIDRKRYTSTKEVLDATLIHQSITGLYETRIDLSQLGGDGGGGGPAPGGSGGTVSLQDEHRLFDIPVTTSLPDVWLQDFPQAWAETGGLGRAKCQAPIIIDLKPTAVPVSIKQYPMSLEAHMGIRQHIIKFLELGVLRPCRSPWNTPLLPVKKPGTQDYRPVQDLREINKRTVDIHPTVPNPYNLLSTLKPDYSWYTVLDLKDAFFCLPLAPQSQELFAFEWKDPERGISGQLTWTRLPQGFKNSPTLFNEALHRDLTDFRTQHPEVTLLQYVDDLLLAAPTKKACTQGTRHLLQELGEKGYRASAKKAQICQTKVTYLGYILSEGKRWLTPGRIETVARIPPPRNPREVREFLGKAGFCRLFIPGFAELAAPLYALTKPSTPFTWQTEHQLAFEALKKALLSAPALGLPDTSKPFTLFLDERQGIAKGVLTQKLGPWKRPVAYLSKKLDPVAAGWPPCLRIMAATAMLVKDSAKLTLGQPLTVITPHTLEAIVRQPPDRWITNARLTHYQALLLDTDRVQFGPPVTLNPATLLPVPENQPSPHDCRQVLAETHGTREDLKDQELPDADHTWYTDGSSYLDSGTRRAGAAVVDGHNTIWAQSLPPGTSAQKAELIALTKALELSKGKKANIYTDSRYAFATAHTHGSIYERRGWLTSEGKEIKNKAEIIALLKALFLPQEVAIIHCPGHQKGQDPVAVGNRQADRVARQAAMAEVLTLATEPDNTSHITAGKRTADGSEFEKRTADGSEFESPKKKAKVE

SEQ ID NO: 2012 - protein, 2099 aa, synthetic construct
MPAAKRVKLDGGDKKYSIGLDIGTNSVGWAVITDEYKVPSKKFKVLGNTDRHSIKKNLIGALLFDSGETAEATRLKRTARRRYTRRKNRICYLQEIFSNEMAKVDDSFFHRLEESFLVEEDKKHERHPIFGNIVDEVAYHEKYPTIYHLRKKLVDSTDKADLRLIYLALAHMIKFRGHFLIEGDLNPDNSDVDKLFIQLVQTYNQLFEENPINASGVDAKAILSARLSKSRRLENLIAQLPGEKKNGLFGNLIALSLGLTPNFKSNFDLAEDAKLQLSKDTYDDDLDNLLAQIGDQYADLFLAAKNLSDAILLSDILRVNTEITKAPLSASMIKRYDEHHQDLTLLKALVRQQLPEKYKEIFFDQSKNGYAGYIDGGASQEEFYKFIKPILEKMDGTEELLVKLNREDLLRKQRTFDNGSIPHQIHLGELHAILRRQEDFYPFLKDNREKIEKILTFRIPYYVGPLARGNSRFAWMTRKSEETITPWNFEEVVDKGASAQSFIERMTNFDKNLPNEKVLPKHSLLYEYFTVYNELTKVKYVTEGMRKPAFLSGEQKKAIVDLLFKTNRKVTVKQLKEDYFKKIECFDSVEISGVEDRFNASLGTYHDLLKIIKDKDFLDNEENEDILEDIVLTLTLFEDREMIEERLKTYAHLFDDKVMKQLKRRRYTGWGRLSRKLINGIRDKQSGKTILDFLKSDGFANRNFMQLIHDDSLTFKEDIQKAQVSGQGDSLHEHIANLAGSPAIKKGILQTVKVVDELVKVMGRHKPENIVIEMARENQTTQKGQKNSRERMKRIEEGIKELGSQILKEHPVENTQLQNEKLYLYYLQNGRDMYVDQELDINRLSDYDVDHIVPQSFLKDDSIDNKVLTRSDKARGKSDNVPSEEVVKKMKNYWRQLLNAKLITQRKFDNLTKAERGGLSELDKAGFIKRQLVETRQITKHVAQILDSRMNTKYDENDKLIREVKVITLKSKLVSDFRKDFQFYKVREINNYHHAHDAYLNAVVGTALIKKYPKLESEFVYGDYKVYDVRKMIAKSEQEIGKATAKYFFYSNIMNFFKTEITLANGEIRKRPLIETNGETGEIVWDKGRDFATVRKVLSMPQVNIVKKTEVQTGGFSKESILPKRNSDKLIARKKDWDPKKYGGFDSPTVAYSVLVVAKVEKGKSKKLKSVKELLGITIMERSSFEKNPIDFLEAKGYKEVKKDLIIKLPKYSLFELENGRKRMLASAGELQKGNELALPSKYVNFLYLASHYEKLKGSPEDNEQKQLFVEQHKHYLDEIIEQISEFSKRVILADANLDKVLSAYNKHRDKPIREQAENIIHLFTLTNLGAPAAFKYFDTTIDRKRYTSTKEVLDATLIHQSITGLYETRIDLSQLGGDGGEAAAKGGSGGTVSLQDEHRLFDIPVTTSLPDVWLQDFPQAWAETGGLGRAKCQAPIIIDLKPTAVPVSIKQYPMSLEAHMGIRQHIIKFLELGVLRPCRSPWNTPLLPVKKPGTQDYRPVQDLREINKRTVDIHPTVPNPYNLLSTLKPDYSWYTVLDLKDAFFCLPLAPQSQELFAFEWKDPERGISGQLTWTRLPQGFKNSPTLFNEALHRDLTDFRTQHPEVTLLQYVDDLLLAAPTKKACTQGTRHLLQELGEKGYRASAKKAQICQTKVTYLGYILSEGKRWLTPGRIETVARIPPPRNPREVREFLGKAGFCRLFIPGFAELAAPLYALTKPSTPFTWQTEHQLAFEALKKALLSAPALGLPDTSKPFTLFLDERQGIAKGVLTQKLGPWKRPVAYLSKKLDPVAAGWPPCLRIMAATAMLVKDSAKLTLGQPLTVITPHTLEAIVRQPPDRWITNARLTHYQALLLDTDRVQFGPPVTLNPATLLPVPENQPSPHDCRQVLAETHGTREDLKDQELPDADHTWYTDGSSYLDSGTRRAGAAVVDGHNTIWAQSLPPGTSAQKAELIALTKALELSKGKKANIYTDSRYAFATAHTHGSIYERRGWLTSEGKEIKNKAEIIALLKALFLPQEVAIIHCPGHQKGQDPVAVGNRQADRVARQAAMAEVLTLATEPDNTSHITAGKRTADGSEFEKRTADGSEFESPKKKAKVE

SEQ ID NO: 2013 - protein, 2100 aa, synthetic construct
MPAAKRVKLDGGDKKYSIGLDIGTNSVGWAVITDEYKVPSKKFKVLGNTDRHSIKKNLIGALLFDSGETAEATRLKRTARRRYTRRKNRICYLQEIFSNEMAKVDDSFFHRLEESFLVEEDKKHERHPIFGNIVDEVAYHEKYPTIYHLRKKLVDSTDKADLRLIYLALAHMIKFRGHFLIEGDLNPDNSDVDKLFIQLVQTYNQLFEENPINASGVDAKAILSARLSKSRRLENLIAQLPGEKKNGLFGNLIALSLGLTPNFKSNFDLAEDAKLQLSKDTYDDDLDNLLAQIGDQYADLFLAAKNLSDAILLSDILRVNTEITKAPLSASMIKRYDEHHQDLTLLKALVRQQLPEKYKEIFFDQSKNGYAGYIDGGASQEEFYKFIKPILEKMDGTEELLVKLNREDLLRKQRTFDNGSIPHQIHLGELHAILRRQEDFYPFLKDNREKIEKILTFRIPYYVGPLARGNSRFAWMTRKSEETITPWNFEEVVDKGASAQSFIERMTNFDKNLPNEKVLPKHSLLYEYFTVYNELTKVKYVTEGMRKPAFLSGEQKKAIVDLLFKTNRKVTVKQLKEDYFKKIECFDSVEISGVEDRFNASLGTYHDLLKIIKDKDFLDNEENEDILEDIVLTLTLFEDREMIEERLKTYAHLFDDKVMKQLKRRRYTGWGRLSRKLINGIRDKQSGKTILDFLKSDGFANRNFMQLIHDDSLTFKEDIQKAQVSGQGDSLHEHIANLAGSPAIKKGILQTVKVVDELVKVMGRHKPENIVIEMARENQTTQKGQKNSRERMKRIEEGIKELGSQILKEHPVENTQLQNEKLYLYYLQNGRDMYVDQELDINRLSDYDVDHIVPQSFLKDDSIDNKVLTRSDKARGKSDNVPSEEVVKKMKNYWRQLLNAKLITQRKFDNLTKAERGGLSELDKAGFIKRQLVETRQITKHVAQILDSRMNTKYDENDKLIREVKVITLKSKLVSDFRKDFQFYKVREINNYHHAHDAYLNAVVGTALIKKYPKLESEFVYGDYKVYDVRKMIAKSEQEIGKATAKYFFYSNIMNFFKTEITLANGEIRKRPLIETNGETGEIVWDKGRDFATVRKVLSMPQVNIVKKTEVQTGGFSKESILPKRNSDKLIARKKDWDPKKYGGFDSPTVAYSVLVVAKVEKGKSKKLKSVKELLGITIMERSSFEKNPIDFLEAKGYKEVKKDLIIKLPKYSLFELENGRKRMLASAGELQKGNELALPSKYVNFLYLASHYEKLKGSPEDNEQKQLFVEQHKHYLDEIIEQISEFSKRVILADANLDKVLSAYNKHRDKPIREQAENIIHLFTLTNLGAPAAFKYFDTTIDRKRYTSTKEVLDATLIHQSITGLYETRIDLSQLGGDGGPAPGGGGSSGGTVSLQDEHRLFDIPVTTSLPDVWLQDFPQAWAETGGLGRAKCQAPIIIDLKPTAVPVSIKQYPMSLEAHMGIRQHIIKFLELGVLRPCRSPWNTPLLPVKKPGTQDYRPVQDLREINKRTVDIHPTVPNPYNLLSTLKPDYSWYTVLDLKDAFFCLPLAPQSQELFAFEWKDPERGISGQLTWTRLPQGFKNSPTLFNEALHRDLTDFRTQHPEVTLLQYVDDLLLAAPTKKACTQGTRHLLQELGEKGYRASAKKAQICQTKVTYLGYILSEGKRWLTPGRIETVARIPPPRNPREVREFLGKAGFCRLFIPGFAELAAPLYALTKPSTPFTWQTEHQLAFEALKKALLSAPALGLPDTSKPFTLFLDERQGIAKGVLTQKLGPWKRPVAYLSKKLDPVAAGWPPCLRIMAATAMLVKDSAKLTLGQPLTVITPHTLEAIVRQPPDRWITNARLTHYQALLLDTDRVQFGPPVTLNPATLLPVPENQPSPHDCRQVLAETHGTREDLKDQELPDADHTWYTDGSSYLDSGTRRAGAAVVDGHNTIWAQSLPPGTSAQKAELIALTKALELSKGKKANIYTDSRYAFATAHTHGSIYERRGWLTSEGKEIKNKAEIIALLKALFLPQEVAIIHCPGHQKGQDPVAVGNRQADRVARQAAMAEVLTLATEPDNTSHITAGKRTADGSEFEKRTADGSEFESPKKKAKVE

SEQ ID NO: 2014 - protein, 2102 aa, synthetic construct
MPAAKRVKLDGGDKKYSIGLDIGTNSVGWAVITDEYKVPSKKFKVLGNTDRHSIKKNLIGALLFDSGETAEATRLKRTARRRYTRRKNRICYLQEIFSNEMAKVDDSFFHRLEESFLVEEDKKHERHPIFGNIVDEVAYHEKYPTIYHLRKKLVDSTDKADLRLIYLALAHMIKFRGHFLIEGDLNPDNSDVDKLFIQLVQTYNQLFEENPINASGVDAKAILSARLSKSRRLENLIAQLPGEKKNGLFGNLIALSLGLTPNFKSNFDLAEDAKLQLSKDTYDDDLDNLLAQIGDQYADLFLAAKNLSDAILLSDILRVNTEITKAPLSASMIKRYDEHHQDLTLLKALVRQQLPEKYKEIFFDQSKNGYAGYIDGGASQEEFYKFIKPILEKMDGTEELLVKLNREDLLRKQRTFDNGSIPHQIHLGELHAILRRQEDFYPFLKDNREKIEKILTFRIPYYVGPLARGNSRFAWMTRKSEETITPWNFEEVVDKGASAQSFIERMTNFDKNLPNEKVLPKHSLLYEYFTVYNELTKVKYVTEGMRKPAFLSGEQKKAIVDLLFKTNRKVTVKQLKEDYFKKIECFDSVEISGVEDRFNASLGTYHDLLKIIKDKDFLDNEENEDILEDIVLTLTLFEDREMIEERLKTYAHLFDDKVMKQLKRRRYTGWGRLSRKLINGIRDKQSGKTILDFLKSDGFANRNFMQLIHDDSLTFKEDIQKAQVSGQGDSLHEHIANLAGSPAIKKGILQTVKVVDELVKVMGRHKPENIVIEMARENQTTQKGQKNSRERMKRIEEGIKELGSQILKEHPVENTQLQNEKLYLYYLQNGRDMYVDQELDINRLSDYDVDHIVPQSFLKDDSIDNKVLTRSDKARGKSDNVPSEEVVKKMKNYWRQLLNAKLITQRKFDNLTKAERGGLSELDKAGFIKRQLVETRQITKHVAQILDSRMNTKYDENDKLIREVKVITLKSKLVSDFRKDFQFYKVREINNYHHAHDAYLNAVVGTALIKKYPKLESEFVYGDYKVYDVRKMIAKSEQEIGKATAKYFFYSNIMNFFKTEITLANGEIRKRPLIETNGETGEIVWDKGRDFATVRKVLSMPQVNIVKKTEVQTGGFSKESILPKRNSDKLIARKKDWDPKKYGGFDSPTVAYSVLVVAKVEKGKSKKLKSVKELLGITIMERSSFEKNPIDFLEAKGYKEVKKDLIIKLPKYSLFELENGRKRMLASAGELQKGNELALPSKYVNFLYLASHYEKLKGSPEDNEQKQLFVEQHKHYLDEIIEQISEFSKRVILADANLDKVLSAYNKHRDKPIREQAENIIHLFTLTNLGAPAAFKYFDTTIDRKRYTSTKEVLDATLIHQSITGLYETRIDLSQLGGDGGEAAAKGSSGGGGGTVSLQDEHRLFDIPVTTSLPDVWLQDFPQAWAETGGLGRAKCQAPIIIDLKPTAVPVSIKQYPMSLEAHMGIRQHIIKFLELGVLRPCRSPWNTPLLPVKKPGTQDYRPVQDLREINKRTVDIHPTVPNPYNLLSTLKPDYSWYTVLDLKDAFFCLPLAPQSQELFAFEWKDPERGISGQLTWTRLPQGFKNSPTLFNEALHRDLTDFRTQHPEVTLLQYVDDLLLAAPTKKACTQGTRHLLQELGEKGYRASAKKAQICQTKVTYLGYILSEGKRWLTPGRIETVARIPPPRNPREVREFLGKAGFCRLFIPGFAELAAPLYALTKPSTPFTWQTEHQLAFEALKKALLSAPALGLPDTSKPFTLFLDERQGIAKGVLTQKLGPWKRPVAYLSKKLDPVAAGWPPCLRIMAATAMLVKDSAKLTLGQPLTVITPHTLEAIVRQPPDRWITNARLTHYQALLLDTDRVQFGPPVTLNPATLLPVPENQPSPHDCRQVLAETHGTREDLKDQELPDADHTWYTDGSSYLDSGTRRAGAAVVDGHNTIWAQSLPPGTSAQKAELIALTKALELSKGKKANIYTDSRYAFATAHTHGSIYERRGWLTSEGKEIKNKAEIIALLKALFLPQEVAIIHCPGHQKGQDPVAVGNRQADRVARQAAMAEVLTLATEPDNTSHITAGKRTADGSEFEKRTADGSEFESPKKKAKVE

SEQ ID NO: 2015 - protein, 2100 aa, synthetic construct
MPAAKRVKLDGGDKKYSIGLDIGTNSVGWAVITDEYKVPSKKFKVLGNTDRHSIKKNLIGALLFDSGETAEATRLKRTARRRYTRRKNRICYLQEIFSNEMAKVDDSFFHRLEESFLVEEDKKHERHPIFGNIVDEVAYHEKYPTIYHLRKKLVDSTDKADLRLIYLALAHMIKFRGHFLIEGDLNPDNSDVDKLFIQLVQTYNQLFEENPINASGVDAKAILSARLSKSRRLENLIAQLPGEKKNGLFGNLIALSLGLTPNFKSNFDLAEDAKLQLSKDTYDDDLDNLLAQIGDQYADLFLAAKNLSDAILLSDILRVNTEITKAPLSASMIKRYDEHHQDLTLLKALVRQQLPEKYKEIFFDQSKNGYAGYIDGGASQEEFYKFIKPILEKMDGTEELLVKLNREDLLRKQRTFDNGSIPHQIHLGELHAILRRQEDFYPFLKDNREKIEKILTFRIPYYVGPLARGNSRFAWMTRKSEETITPWNFEEVVDKGASAQSFIERMTNFDKNLPNEKVLPKHSLLYEYFTVYNELTKVKYVTEGMRKPAFLSGEQKKAIVDLLFKTNRKVTVKQLKEDYFKKIECFDSVEISGVEDRFNASLGTYHDLLKIIKDKDFLDNEENEDILEDIVLTLTLFEDREMIEERLKTYAHLFDDKVMKQLKRRRYTGWGRLSRKLINGIRDKQSGKTILDFLKSDGFANRNFMQLIHDDSLTFKEDIQKAQVSGQGDSLHEHIANLAGSPAIKKGILQTVKVVDELVKVMGRHKPENIVIEMARENQTTQKGQKNSRERMKRIEEGIKELGSQILKEHPVENTQLQNEKLYLYYLQNGRDMYVDQELDINRLSDYDVDHIVPQSFLKDDSIDNKVLTRSDKARGKSDNVPSEEVVKKMKNYWRQLLNAKLITQRKFDNLTKAERGGLSELDKAGFIKRQLVETRQITKHVAQILDSRMNTKYDENDKLIREVKVITLKSKLVSDFRKDFQFYKVREINNYHHAHDAYLNAVVGTALIKKYPKLESEFVYGDYKVYDVRKMIAKSEQEIGKATAKYFFYSNIMNFFKTEITLANGEIRKRPLIETNGETGEIVWDKGRDFATVRKVLSMPQVNIVKKTEVQTGGFSKESILPKRNSDKLIARKKDWDPKKYGGFDSPTVAYSVLVVAKVEKGKSKKLKSVKELLGITIMERSSFEKNPIDFLEAKGYKEVKKDLIIKLPKYSLFELENGRKRMLASAGELQKGNELALPSKYVNFLYLASHYEKLKGSPEDNEQKQLFVEQHKHYLDEIIEQISEFSKRVILADANLDKVLSAYNKHRDKPIREQAENIIHLFTLTNLGAPAAFKYFDTTIDRKRYTSTKEVLDATLIHQSITGLYETRIDLSQLGGDGGPAPGGGGGSGGTVSLQDEHRLFDIPVTTSLPDVWLQDFPQAWAETGGLGRAKCQAPIIIDLKPTAVPVSIKQYPMSLEAHMGIRQHIIKFLELGVLRPCRSPWNTPLLPVKKPGTQDYRPVQDLREINKRTVDIHPTVPNPYNLLSTLKPDYSWYTVLDLKDAFFCLPLAPQSQELFAFEWKDPERGISGQLTWTRLPQGFKNSPTLFNEALHRDLTDFRTQHPEVTLLQYVDDLLLAAPTKKACTQGTRHLLQELGEKGYRASAKKAQICQTKVTYLGYILSEGKRWLTPGRIETVARIPPPRNPREVREFLGKAGFCRLFIPGFAELAAPLYALTKPSTPFTWQTEHQLAFEALKKALLSAPALGLPDTSKPFTLFLDERQGIAKGVLTQKLGPWKRPVAYLSKKLDPVAAGWPPCLRIMAATAMLVKDSAKLTLGQPLTVITPHTLEAIVRQPPDRWITNARLTHYQALLLDTDRVQFGPPVTLNPATLLPVPENQPSPHDCRQVLAETHGTREDLKDQELPDADHTWYTDGSSYLDSGTRRAGAAVVDGHNTIWAQSLPPGTSAQKAELIALTKALELSKGKKANIYTDSRYAFATAHTHGSIYERRGWLTSEGKEIKNKAEIIALLKALFLPQEVAIIHCPGHQKGQDPVAVGNRQADRVARQAAMAEVLTLATEPDNTSHITAGKRTADGSEFEKRTADGSEFESPKKKAKVE

SEQ ID NO: 2016 - protein, 2095 aa, synthetic construct
MPAAKRVKLDGGDKKYSIGLDIGTNSVGWAVITDEYKVPSKKFKVLGNTDRHSIKKNLIGALLFDSGETAEATRLKRTARRRYTRRKNRICYLQEIFSNEMAKVDDSFFHRLEESFLVEEDKKHERHPIFGNIVDEVAYHEKYPTIYHLRKKLVDSTDKADLRLIYLALAHMIKFRGHFLIEGDLNPDNSDVDKLFIQLVQTYNQLFEENPINASGVDAKAILSARLSKSRRLENLIAQLPGEKKNGLFGNLIALSLGLTPNFKSNFDLAEDAKLQLSKDTYDDDLDNLLAQIGDQYADLFLAAKNLSDAILLSDILRVNTEITKAPLSASMIKRYDEHHQDLTLLKALVRQQLPEKYKEIFFDQSKNGYAGYIDGGASQEEFYKFIKPILEKMDGTEELLVKLNREDLLRKQRTFDNGSIPHQIHLGELHAILRRQEDFYPFLKDNREKIEKILTFRIPYYVGPLARGNSRFAWMTRKSEETITPWNFEEVVDKGASAQSFIERMTNFDKNLPNEKVLPKHSLLYEYFTVYNELTKVKYVTEGMRKPAFLSGEQKKAIVDLLFKTNRKVTVKQLKEDYFKKIECFDSVEISGVEDRFNASLGTYHDLLKIIKDKDFLDNEENEDILEDIVLTLTLFEDREMIEERLKTYAHLFDDKVMKQLKRRRYTGWGRLSRKLINGIRDKQSGKTILDFLKSDGFANRNFMQLIHDDSLTFKEDIQKAQVSGQGDSLHEHIANLAGSPAIKKGILQTVKVVDELVKVMGRHKPENIVIEMARENQTTQKGQKNSRERMKRIEEGIKELGSQILKEHPVENTQLQNEKLYLYYLQNGRDMYVDQELDINRLSDYDVDHIVPQSFLKDDSIDNKVLTRSDKARGKSDNVPSEEVVKKMKNYWRQLLNAKLITQRKFDNLTKAERGGLSELDKAGFIKRQLVETRQITKHVAQILDSRMNTKYDENDKLIREVKVITLKSKLVSDFRKDFQFYKVREINNYHHAHDAYLNAVVGTALIKKYPKLESEFVYGDYKVYDVRKMIAKSEQEIGKATAKYFFYSNIMNFFKTEITLANGEIRKRPLIETNGETGEIVWDKGRDFATVRKVLSMPQVNIVKKTEVQTGGFSKESILPKRNSDKLIARKKDWDPKKYGGFDSPTVAYSVLVVAKVEKGKSKKLKSVKELLGITIMERSSFEKNPIDFLEAKGYKEVKKDLIIKLPKYSLFELENGRKRMLASAGELQKGNELALPSKYVNFLYLASHYEKLKGSPEDNEQKQLFVEQHKHYLDEIIEQISEFSKRVILADANLDKVLSAYNKHRDKPIREQAENIIHLFTLTNLGAPAAFKYFDTTIDRKRYTSTKEVLDATLIHQSITGLYETRIDLSQLGGDGGGGGGGGTVSLQDEHRLFDIPVTTSLPDVWLQDFPQAWAETGGLGRAKCQAPIIIDLKPTAVPVSIKQYPMSLEAHMGIRQHIIKFLELGVLRPCRSPWNTPLLPVKKPGTQDYRPVQDLREINKRTVDIHPTVPNPYNLLSTLKPDYSWYTVLDLKDAFFCLPLAPQSQELFAFEWKDPERGISGQLTWTRLPQGFKNSPTLFNEALHRDLTDFRTQHPEVTLLQYVDDLLLAAPTKKACTQGTRHLLQELGEKGYRASAKKAQICQTKVTYLGYILSEGKRWLTPGRIETVARIPPPRNPREVREFLGKAGFCRLFIPGFAELAAPLYALTKPSTPFTWQTEHQLAFEALKKALLSAPALGLPDTSKPFTLFLDERQGIAKGVLTQKLGPWKRPVAYLSKKLDPVAAGWPPCLRIMAATAMLVKDSAKLTLGQPLTVITPHTLEAIVRQPPDRWITNARLTHYQALLLDTDRVQFGPPVTLNPATLLPVPENQPSPHDCRQVLAETHGTREDLKDQELPDADHTWYTDGSSYLDSGTRRAGAAVVDGHNTIWAQSLPPGTSAQKAELIALTKALELSKGKKANIYTDSRYAFATAHTHGSIYERRGWLTSEGKEIKNKAEIIALLKALFLPQEVAIIHCPGHQKGQDPVAVGNRQADRVARQAAMAEVLTLATEPDNTSHITAGKRTADGSEFEKRTADGSEFESPKKKAKVE

SEQ ID NO: 2017 - protein, 2102 aa, synthetic construct
MPAAKRVKLDGGDKKYSIGLDIGTNSVGWAVITDEYKVPSKKFKVLGNTDRHSIKKNLIGALLFDSGETAEATRLKRTARRRYTRRKNRICYLQEIFSNEMAKVDDSFFHRLEESFLVEEDKKHERHPIFGNIVDEVAYHEKYPTIYHLRKKLVDSTDKADLRLIYLALAHMIKFRGHFLIEGDLNPDNSDVDKLFIQLVQTYNQLFEENPINASGVDAKAILSARLSKSRRLENLIAQLPGEKKNGLFGNLIALSLGLTPNFKSNFDLAEDAKLQLSKDTYDDDLDNLLAQIGDQYADLFLAAKNLSDAILLSDILRVNTEITKAPLSASMIKRYDEHHQDLTLLKALVRQQLPEKYKEIFFDQSKNGYAGYIDGGASQEEFYKFIKPILEKMDGTEELLVKLNREDLLRKQRTFDNGSIPHQIHLGELHAILRRQEDFYPFLKDNREKIEKILTFRIPYYVGPLARGNSRFAWMTRKSEETITPWNFEEVVDKGASAQSFIERMTNFDKNLPNEKVLPKHSLLYEYFTVYNELTKVKYVTEGMRKPAFLSGEQKKAIVDLLFKTNRKVTVKQLKEDYFKKIECFDSVEISGVEDRFNASLGTYHDLLKIIKDKDFLDNEENEDILEDIVLTLTLFEDREMIEERLKTYAHLFDDKVMKQLKRRRYTGWGRLSRKLINGIRDKQSGKTILDFLKSDGFANRNFMQLIHDDSLTFKEDIQKAQVSGQGDSLHEHIANLAGSPAIKKGILQTVKVVDELVKVMGRHKPENIVIEMARENQTTQKGQKNSRERMKRIEEGIKELGSQILKEHPVENTQLQNEKLYLYYLQNGRDMYVDQELDINRLSDYDVDHIVPQSFLKDDSIDNKVLTRSDKARGKSDNVPSEEVVKKMKNYWRQLLNAKLITQRKFDNLTKAERGGLSELDKAGFIKRQLVETRQITKHVAQILDSRMNTKYDENDKLIREVKVITLKSKLVSDFRKDFQFYKVREINNYHHAHDAYLNAVVGTALIKKYPKLESEFVYGDYKVYDVRKMIAKSEQEIGKATAKYFFYSNIMNFFKTEITLANGEIRKRPLIETNGETGEIVWDKGRDFATVRKVLSMPQVNIVKKTEVQTGGFSKESILPKRNSDKLIARKKDWDPKKYGGFDSPTVAYSVLVVAKVEKGKSKKLKSVKELLGITIMERSSFEKNPIDFLEAKGYKEVKKDLIIKLPKYSLFELENGRKRMLASAGELQKGNELALPSKYVNFLYLASHYEKLKGSPEDNEQKQLFVEQHKHYLDEIIEQISEFSKRVILADANLDKVLSAYNKHRDKPIREQAENIIHLFTLTNLGAPAAFKYFDTTIDRKRYTSTKEVLDATLIHQSITGLYETRIDLSQLGGDGGGGGEAAAKGSSGGTVSLQDEHRLFDIPVTTSLPDVWLQDFPQAWAETGGLGRAKCQAPIIIDLKPTAVPVSIKQYPMSLEAHMGIRQHIIKFLELGVLRPCRSPWNTPLLPVKKPGTQDYRPVQDLREINKRTVDIHPTVPNPYNLLSTLKPDYSWYTVLDLKDAFFCLPLAPQSQELFAFEWKDPERGISGQLTWTRLPQGFKNSPTLFNEALHRDLTDFRTQHPEVTLLQYVDDLLLAAPTKKACTQGTRHLLQELGEKGYRASAKKAQICQTKVTYLGYILSEGKRWLTPGRIETVARIPPPRNPREVREFLGKAGFCRLFIPGFAELAAPLYALTKPSTPFTWQTEHQLAFEALKKALLSAPALGLPDTSKPFTLFLDERQGIAKGVLTQKLGPWKRPVAYLSKKLDPVAAGWPPCLRIMAATAMLVKDSAKLTLGQPLTVITPHTLEAIVRQPPDRWITNARLTHYQALLLDTDRVQFGPPVTLNPATLLPVPENQPSPHDCRQVLAETHGTREDLKDQELPDADHTWYTDGSSYLDSGTRRAGAAVVDGHNTIWAQSLPPGTSAQKAELIALTKALELSKGKKANIYTDSRYAFATAHTHGSIYERRGWLTSEGKEIKNKAEIIALLKALFLPQEVAIIHCPGHQKGQDPVAVGNRQADRVARQAAMAEVLTLATEPDNTSHITAGKRTADGSEFEKRTADGSEFESPKKKAKVE

SEQ ID NO: 2018 - protein, 2104 aa, synthetic construct
MPAAKRVKLDGGDKKYSIGLDIGTNSVGWAVITDEYKVPSKKFKVLGNTDRHSIKKNLIGALLFDSGETAEATRLKRTARRRYTRRKNRICYLQEIFSNEMAKVDDSFFHRLEESFLVEEDKKHERHPIFGNIVDEVAYHEKYPTIYHLRKKLVDSTDKADLRLIYLALAHMIKFRGHFLIEGDLNPDNSDVDKLFIQLVQTYNQLFEENPINASGVDAKAILSARLSKSRRLENLIAQLPGEKKNGLFGNLIALSLGLTPNFKSNFDLAEDAKLQLSKDTYDDDLDNLLAQIGDQYADLFLAAKNLSDAILLSDILRVNTEITKAPLSASMIKRYDEHHQDLTLLKALVRQQLPEKYKEIFFDQSKNGYAGYIDGGASQEEFYKFIKPILEKMDGTEELLVKLNREDLLRKQRTFDNGSIPHQIHLGELHAILRRQEDFYPFLKDNREKIEKILTFRIPYYVGPLARGNSRFAWMTRKSEETITPWNFEEVVDKGASAQSFIERMTNFDKNLPNEKVLPKHSLLYEYFTVYNELTKVKYVTEGMRKPAFLSGEQKKAIVDLLFKTNRKVTVKQLKEDYFKKIECFDSVEISGVEDRFNASLGTYHDLLKIIKDKDFLDNEENEDILEDIVLTLTLFEDREMIEERLKTYAHLFDDKVMKQLKRRRYTGWGRLSRKLINGIRDKQSGKTILDFLKSDGFANRNFMQLIHDDSLTFKEDIQKAQVSGQGDSLHEHIANLAGSPAIKKGILQTVKVVDELVKVMGRHKPENIVIEMARENQTTQKGQKNSRERMKRIEEGIKELGSQILKEHPVENTQLQNEKLYLYYLQNGRDMYVDQELDINRLSDYDVDHIVPQSFLKDDSIDNKVLTRSDKARGKSDNVPSEEVVKKMKNYWRQLLNAKLITQRKFDNLTKAERGGLSELDKAGFIKRQLVETRQITKHVAQILDSRMNTKYDENDKLIREVKVITLKSKLVSDFRKDFQFYKVREINNYHHAHDAYLNAVVGTALIKKYPKLESEFVYGDYKVYDVRKMIAKSEQEIGKATAKYFFYSNIMNFFKTEITLANGEIRKRPLIETNGETGEIVWDKGRDFATVRKVLSMPQVNIVKKTEVQTGGFSKESILPKRNSDKLIARKKDWDPKKYGGFDSPTVAYSVLVVAKVEKGKSKKLKSVKELLGITIMERSSFEKNPIDFLEAKGYKEVKKDLIIKLPKYSLFELENGRKRMLASAGELQKGNELALPSKYVNFLYLASHYEKLKGSPEDNEQKQLFVEQHKHYLDEIIEQISEFSKRVILADANLDKVLSAYNKHRDKPIREQAENIIHLFTLTNLGAPAAFKYFDTTIDRKRYTSTKEVLDATLIHQSITGLYETRIDLSQLGGDGGPAPAPAPAPAPAPGGTVSLQDEHRLFDIPVTTSLPDVWLQDFPQAWAETGGLGRAKCQAPIIIDLKPTAVPVSIKQYPMSLEAHMGIRQHIIKFLELGVLRPCRSPWNTPLLPVKKPGTQDYRPVQDLREINKRTVDIHPTVPNPYNLLSTLKPDYSWYTVLDLKDAFFCLPLAPQSQELFAFEWKDPERGISGQLTWTRLPQGFKNSPTLFNEALHRDLTDFRTQHPEVTLLQYVDDLLLAAPTKKACTQGTRHLLQELGEKGYRASAKKAQICQTKVTYLGYILSEGKRWLTPGRIETVARIPPPRNPREVREFLGKAGFCRLFIPGFAELAAPLYALTKPSTPFTWQTEHQLAFEALKKALLSAPALGLPDTSKPFTLFLDERQGIAKGVLTQKLGPWKRPVAYLSKKLDPVAAGWPPCLRIMAATAMLVKDSAKLTLGQPLTVITPHTLEAIVRQPPDRWITNARLTHYQALLLDTDRVQFGPPVTLNPATLLPVPENQPSPHDCRQVLAETHGTREDLKDQELPDADHTWYTDGSSYLDSGTRRAGAAVVDGHNTIWAQSLPPGTSAQKAELIALTKALELSKGKKANIYTDSRYAFATAHTHGSIYERRGWLTSEGKEIKNKAEIIALLKALFLPQEVAIIHCPGHQKGQDPVAVGNRQADRVARQAAMAEVLTLATEPDNTSHITAGKRTADGSEFEKRTADGSEFESPKKKAKVE

SEQ ID NO: 2019 - protein, 2100 aa, synthetic construct
MPAAKRVKLDGGDKKYSIGLDIGTNSVGWAVITDEYKVPSKKFKVLGNTDRHSIKKNLIGALLFDSGETAEATRLKRTARRRYTRRKNRICYLQEIFSNEMAKVDDSFFHRLEESFLVEEDKKHERHPIFGNIVDEVAYHEKYPTIYHLRKKLVDSTDKADLRLIYLALAHMIKFRGHFLIEGDLNPDNSDVDKLFIQLVQTYNQLFEENPINASGVDAKAILSARLSKSRRLENLIAQLPGEKKNGLFGNLIALSLGLTPNFKSNFDLAEDAKLQLSKDTYDDDLDNLLAQIGDQYADLFLAAKNLSDAILLSDILRVNTEITKAPLSASMIKRYDEHHQDLTLLKALVRQQLPEKYKEIFFDQSKNGYAGYIDGGASQEEFYKFIKPILEKMDGTEELLVKLNREDLLRKQRTFDNGSIPHQIHLGELHAILRRQEDFYPFLKDNREKIEKILTFRIPYYVGPLARGNSRFAWMTRKSEETITPWNFEEVVDKGASAQSFIERMTNFDKNLPNEKVLPKHSLLYEYFTVYNELTKVKYVTEGMRKPAFLSGEQKKAIVDLLFKTNRKVTVKQLKEDYFKKIECFDSVEISGVEDRFNASLGTYHDLLKIIKDKDFLDNEENEDILEDIVLTLTLFEDREMIEERLKTYAHLFDDKVMKQLKRRRYTGWGRLSRKLINGIRDKQSGKTILDFLKSDGFANRNFMQLIHDDSLTFKEDIQKAQVSGQGDSLHEHIANLAGSPAIKKGILQTVKVVDELVKVMGRHKPENIVIEMARENQTTQKGQKNSRERMKRIEEGIKELGSQILKEHPVENTQLQNEKLYLYYLQNGRDMYVDQELDINRLSDYDVDHIVPQSFLKDDSIDNKVLTRSDKARGKSDNVPSEEVVKKMKNYWRQLLNAKLITQRKFDNLTKAERGGLSELDKAGFIKRQLVETRQITKHVAQILDSRMNTKYDENDKLIREVKVITLKSKLVSDFRKDFQFYKVREINNYHHAHDAYLNAVVGTALIKKYPKLESEFVYGDYKVYDVRKMIAKSEQEIGKATAKYFFYSNIMNFFKTEITLANGEIRKRPLIETNGETGEIVWDKGRDFATVRKVLSMPQVNIVKKTEVQTGGFSKESILPKRNSDKLIARKKDWDPKKYGGFDSPTVAYSVLVVAKVEKGKSKKLKSVKELLGITIMERSSFEKNPIDFLEAKGYKEVKKDLIIKLPKYSLFELENGRKRMLASAGELQKGNELALPSKYVNFLYLASHYEKLKGSPEDNEQKQLFVEQHKHYLDEIIEQISEFSKRVILADANLDKVLSAYNKHRDKPIREQAENIIHLFTLTNLGAPAAFKYFDTTIDRKRYTSTKEVLDATLIHQSITGLYETRIDLSQLGGDGGPAPGSSGGGGGTVSLQDEHRLFDIPVTTSLPDVWLQDFPQAWAETGGLGRAKCQAPIIIDLKPTAVPVSIKQYPMSLEAHMGIRQHIIKFLELGVLRPCRSPWNTPLLPVKKPGTQDYRPVQDLREINKRTVDIHPTVPNPYNLLSTLKPDYSWYTVLDLKDAFFCLPLAPQSQELFAFEWKDPERGISGQLTWTRLPQGFKNSPTLFNEALHRDLTDFRTQHPEVTLLQYVDDLLLAAPTKKACTQGTRHLLQELGEKGYRASAKKAQICQTKVTYLGYILSEGKRWLTPGRIETVARIPPPRNPREVREFLGKAGFCRLFIPGFAELAAPLYALTKPSTPFTWQTEHQLAFEALKKALLSAPALGLPDTSKPFTLFLDERQGIAKGVLTQKLGPWKRPVAYLSKKLDPVAAGWPPCLRIMAATAMLVKDSAKLTLGQPLTVITPHTLEAIVRQPPDRWITNARLTHYQALLLDTDRVQFGPPVTLNPATLLPVPENQPSPHDCRQVLAETHGTREDLKDQELPDADHTWYTDGSSYLDSGTRRAGAAVVDGHNTIWAQSLPPGTSAQKAELIALTKALELSKGKKANIYTDSRYAFATAHTHGSIYERRGWLTSEGKEIKNKAEIIALLKALFLPQEVAIIHCPGHQKGQDPVAVGNRQADRVARQAAMAEVLTLATEPDNTSHITAGKRTADGSEFEKRTADGSEFESPKKKAKVE

SEQ ID NO: 2020 - protein, 2100 aa, synthetic construct
MPAAKRVKLDGGDKKYSIGLDIGTNSVGWAVITDEYKVPSKKFKVLGNTDRHSIKKNLIGALLFDSGETAEATRLKRTARRRYTRRKNRICYLQEIFSNEMAKVDDSFFHRLEESFLVEEDKKHERHPIFGNIVDEVAYHEKYPTIYHLRKKLVDSTDKADLRLIYLALAHMIKFRGHFLIEGDLNPDNSDVDKLFIQLVQTYNQLFEENPINASGVDAKAILSARLSKSRRLENLIAQLPGEKKNGLFGNLIALSLGLTPNFKSNFDLAEDAKLQLSKDTYDDDLDNLLAQIGDQYADLFLAAKNLSDAILLSDILRVNTEITKAPLSASMIKRYDEHHQDLTLLKALVRQQLPEKYKEIFFDQSKNGYAGYIDGGASQEEFYKFIKPILEKMDGTEELLVKLNREDLLRKQRTFDNGSIPHQIHLGELHAILRRQEDFYPFLKDNREKIEKILTFRIPYYVGPLARGNSRFAWMTRKSEETITPWNFEEVVDKGASAQSFIERMTNFDKNLPNEKVLPKHSLLYEYFTVYNELTKVKYVTEGMRKPAFLSGEQKKAIVDLLFKTNRKVTVKQLKEDYFKKIECFDSVEISGVEDRFNASLGTYHDLLKIIKDKDFLDNEENEDILEDIVLTLTLFEDREMIEERLKTYAHLFDDKVMKQLKRRRYTGWGRLSRKLINGIRDKQSGKTILDFLKSDGFANRNFMQLIHDDSLTFKEDIQKAQVSGQGDSLHEHIANLAGSPAIKKGILQTVKVVDELVKVMGRHKPENIVIEMARENQTTQKGQKNSRERMKRIEEGIKELGSQILKEHPVENTQLQNEKLYLYYLQNGRDMYVDQELDINRLSDYDVDHIVPQSFLKDDSIDNKVLTRSDKARGKSDNVPSEEVVKKMKNYWRQLLNAKLITQRKFDNLTKAERGGLSELDKAGFIKRQLVETRQITKHVAQILDSRMNTKYDENDKLIREVKVITLKSKLVSDFRKDFQFYKVREINNYHHAHDAYLNAVVGTALIKKYPKLESEFVYGDYKVYDVRKMIAKSEQEIGKATAKYFFYSNIMNFFKTEITLANGEIRKRPLIETNGETGEIVWDKGRDFATVRKVLSMPQVNIVKKTEVQTGGFSKESILPKRNSDKLIARKKDWDPKKYGGFDSPTVAYSVLVVAKVEKGKSKKLKSVKELLGITIMERSSFEKNPIDFLEAKGYKEVKKDLIIKLPKYSLFELENGRKRMLASAGELQKGNELALPSKYVNFLYLASHYEKLKGSPEDNEQKQLFVEQHKHYLDEIIEQISEFSKRVILADANLDKVLSAYNKHRDKPIREQAENIIHLFTLTNLGAPAAFKYFDTTIDRKRYTSTKEVLDATLIHQSITGLYETRIDLSQLGGDGGGSSGGSPAPGGTVSLQDEHRLFDIPVTTSLPDVWLQDFPQAWAETGGLGRAKCQAPIIIDLKPTAVPVSIKQYPMSLEAHMGIRQHIIKFLELGVLRPCRSPWNTPLLPVKKPGTQDYRPVQDLREINKRTVDIHPTVPNPYNLLSTLKPDYSWYTVLDLKDAFFCLPLAPQSQELFAFEWKDPERGISGQLTWTRLPQGFKNSPTLFNEALHRDLTDFRTQHPEVTLLQYVDDLLLAAPTKKACTQGTRHLLQELGEKGYRASAKKAQICQTKVTYLGYILSEGKRWLTPGRIETVARIPPPRNPREVREFLGKAGFCRLFIPGFAELAAPLYALTKPSTPFTWQTEHQLAFEALKKALLSAPALGLPDTSKPFTLFLDERQGIAKGVLTQKLGPWKRPVAYLSKKLDPVAAGWPPCLRIMAATAMLVKDSAKLTLGQPLTVITPHTLEAIVRQPPDRWITNARLTHYQALLLDTDRVQFGPPVTLNPATLLPVPENQPSPHDCRQVLAETHGTREDLKDQELPDADHTWYTDGSSYLDSGTRRAGAAVVDGHNTIWAQSLPPGTSAQKAELIALTKALELSKGKKANIYTDSRYAFATAHTHGSIYERRGWLTSEGKEIKNKAEIIALLKALFLPQEVAIIHCPGHQKGQDPVAVGNRQADRVARQAAMAEVLTLATEPDNTSHITAGKRTADGSEFEKRTADGSEFESPKKKAKVE

SEQ ID NO: 2021 - protein, 2097 aa, synthetic construct
MPAAKRVKLDGGDKKYSIGLDIGTNSVGWAVITDEYKVPSKKFKVLGNTDRHSIKKNLIGALLFDSGETAEATRLKRTARRRYTRRKNRICYLQEIFSNEMAKVDDSFFHRLEESFLVEEDKKHERHPIFGNIVDEVAYHEKYPTIYHLRKKLVDSTDKADLRLIYLALAHMIKFRGHFLIEGDLNPDNSDVDKLFIQLVQTYNQLFEENPINASGVDAKAILSARLSKSRRLENLIAQLPGEKKNGLFGNLIALSLGLTPNFKSNFDLAEDAKLQLSKDTYDDDLDNLLAQIGDQYADLFLAAKNLSDAILLSDILRVNTEITKAPLSASMIKRYDEHHQDLTLLKALVRQQLPEKYKEIFFDQSKNGYAGYIDGGASQEEFYKFIKPILEKMDGTEELLVKLNREDLLRKQRTFDNGSIPHQIHLGELHAILRRQEDFYPFLKDNREKIEKILTFRIPYYVGPLARGNSRFAWMTRKSEETITPWNFEEVVDKGASAQSFIERMTNFDKNLPNEKVLPKHSLLYEYFTVYNELTKVKYVTEGMRKPAFLSGEQKKAIVDLLFKTNRKVTVKQLKEDYFKKIECFDSVEISGVEDRFNASLGTYHDLLKIIKDKDFLDNEENEDILEDIVLTLTLFEDREMIEERLKTYAHLFDDKVMKQLKRRRYTGWGRLSRKLINGIRDKQSGKTILDFLKSDGFANRNFMQLIHDDSLTFKEDIQKAQVSGQGDSLHEHIANLAGSPAIKKGILQTVKVVDELVKVMGRHKPENIVIEMARENQTTQKGQKNSRERMKRIEEGIKELGSQILKEHPVENTQLQNEKLYLYYLQNGRDMYVDQELDINRLSDYDVDHIVPQSFLKDDSIDNKVLTRSDKARGKSDNVPSEEVVKKMKNYWRQLLNAKLITQRKFDNLTKAERGGLSELDKAGFIKRQLVETRQITKHVAQILDSRMNTKYDENDKLIREVKVITLKSKLVSDFRKDFQFYKVREINNYHHAHDAYLNAVVGTALIKKYPKLESEFVYGDYKVYDVRKMIAKSEQEIGKATAKYFFYSNIMNFFKTEITLANGEIRKRPLIETNGETGEIVWDKGRDFATVRKVLSMPQVNIVKKTEVQTGGFSKESILPKRNSDKLIARKKDWDPKKYGGFDSPTVAYSVLVVAKVEKGKSKKLKSVKELLGITIMERSSFEKNPIDFLEAKGYKEVKKDLIIKLPKYSLFELENGRKRMLASAGELQKGNELALPSKYVNFLYLASHYEKLKGSPEDNEQKQLFVEQHKHYLDEIIEQISEFSKRVILADANLDKVLSAYNKHRDKPIREQAENIIHLFTLTNLGAPAAFKYFDTTIDRKRYTSTKEVLDATLIHQSITGLYETRIDLSQLGGDGGGGSPAPGGTVSLQDEHRLFDIPVTTSLPDVWLQDFPQAWAETGGLGRAKCQAPIIIDLKPTAVPVSIKQYPMSLEAHMGIRQHIIKFLELGVLRPCRSPWNTPLLPVKKPGTQDYRPVQDLREINKRTVDIHPTVPNPYNLLSTLKPDYSWYTVLDLKDAFFCLPLAPQSQELFAFEWKDPERGISGQLTWTRLPQGFKNSPTLFNEALHRDLTDFRTQHPEVTLLQYVDDLLLAAPTKKACTQGTRHLLQELGEKGYRASAKKAQICQTKVTYLGYILSEGKRWLTPGRIETVARIPPPRNPREVREFLGKAGFCRLFIPGFAELAAPLYALTKPSTPFTWQTEHQLAFEALKKALLSAPALGLPDTSKPFTLFLDERQGIAKGVLTQKLGPWKRPVAYLSKKLDPVAAGWPPCLRIMAATAMLVKDSAKLTLGQPLTVITPHTLEAIVRQPPDRWITNARLTHYQALLLDTDRVQFGPPVTLNPATLLPVPENQPSPHDCRQVLAETHGTREDLKDQELPDADHTWYTDGSSYLDSGTRRAGAAVVDGHNTIWAQSLPPGTSAQKAELIALTKALELSKGKKANIYTDSRYAFATAHTHGSIYERRGWLTSEGKEIKNKAEIIALLKALFLPQEVAIIHCPGHQKGQDPVAVGNRQADRVARQAAMAEVLTLATEPDNTSHITAGKRTADGSEFEKRTADGSEFESPKKKAKVE

SEQ ID NO: 2022 - protein, 2102 aa, synthetic construct
MPAAKRVKLDGGDKKYSIGLDIGTNSVGWAVITDEYKVPSKKFKVLGNTDRHSIKKNLIGALLFDSGETAEATRLKRTARRRYTRRKNRICYLQEIFSNEMAKVDDSFFHRLEESFLVEEDKKHERHPIFGNIVDEVAYHEKYPTIYHLRKKLVDSTDKADLRLIYLALAHMIKFRGHFLIEGDLNPDNSDVDKLFIQLVQTYNQLFEENPINASGVDAKAILSARLSKSRRLENLIAQLPGEKKNGLFGNLIALSLGLTPNFKSNFDLAEDAKLQLSKDTYDDDLDNLLAQIGDQYADLFLAAKNLSDAILLSDILRVNTEITKAPLSASMIKRYDEHHQDLTLLKALVRQQLPEKYKEIFFDQSKNGYAGYIDGGASQEEFYKFIKPILEKMDGTEELLVKLNREDLLRKQRTFDNGSIPHQIHLGELHAILRRQEDFYPFLKDNREKIEKILTFRIPYYVGPLARGNSRFAWMTRKSEETITPWNFEEVVDKGASAQSFIERMTNFDKNLPNEKVLPKHSLLYEYFTVYNELTKVKYVTEGMRKPAFLSGEQKKAIVDLLFKTNRKVTVKQLKEDYFKKIECFDSVEISGVEDRFNASLGTYHDLLKIIKDKDFLDNEENEDILEDIVLTLTLFEDREMIEERLKTYAHLFDDKVMKQLKRRRYTGWGRLSRKLINGIRDKQSGKTILDFLKSDGFANRNFMQLIHDDSLTFKEDIQKAQVSGQGDSLHEHIANLAGSPAIKKGILQTVKVVDELVKVMGRHKPENIVIEMARENQTTQKGQKNSRERMKRIEEGIKELGSQILKEHPVENTQLQNEKLYLYYLQNGRDMYVDQELDINRLSDYDVDHIVPQSFLKDDSIDNKVLTRSDKARGKSDNVPSEEVVKKMKNYWRQLLNAKLITQRKFDNLTKAERGGLSELDKAGFIKRQLVETRQITKHVAQILDSRMNTKYDENDKLIREVKVITLKSKLVSDFRKDFQFYKVREINNYHHAHDAYLNAVVGTALIKKYPKLESEFVYGDYKVYDVRKMIAKSEQEIGKATAKYFFYSNIMNFFKTEITLANGEIRKRPLIETNGETGEIVWDKGRDFATVRKVLSMPQVNIVKKTEVQTGGFSKESILPKRNSDKLIARKKDWDPKKYGGFDSPTVAYSVLVVAKVEKGKSKKLKSVKELLGITIMERSSFEKNPIDFLEAKGYKEVKKDLIIKLPKYSLFELENGRKRMLASAGELQKGNELALPSKYVNFLYLASHYEKLKGSPEDNEQKQLFVEQHKHYLDEIIEQISEFSKRVILADANLDKVLSAYNKHRDKPIREQAENIIHLFTLTNLGAPAAFKYFDTTIDRKRYTSTKEVLDATLIHQSITGLYETRIDLSQLGGDGGEAAAKPAPGSSGGTVSLQDEHRLFDIPVTTSLPDVWLQDFPQAWAETGGLGRAKCQAPIIIDLKPTAVPVSIKQYPMSLEAHMGIRQHIIKFLELGVLRPCRSPWNTPLLPVKKPGTQDYRPVQDLREINKRTVDIHPTVPNPYNLLSTLKPDYSWYTVLDLKDAFFCLPLAPQSQELFAFEWKDPERGISGQLTWTRLPQGFKNSPTLFNEALHRDLTDFRTQHPEVTLLQYVDDLLLAAPTKKACTQGTRHLLQELGEKGYRASAKKAQICQTKVTYLGYILSEGKRWLTPGRIETVARIPPPRNPREVREFLGKAGFCRLFIPGFAELAAPLYALTKPSTPFTWQTEHQLAFEALKKALLSAPALGLPDTSKPFTLFLDERQGIAKGVLTQKLGPWKRPVAYLSKKLDPVAAGWPPCLRIMAATAMLVKDSAKLTLGQPLTVITPHTLEAIVRQPPDRWITNARLTHYQALLLDTDRVQFGPPVTLNPATLLPVPENQPSPHDCRQVLAETHGTREDLKDQELPDADHTWYTDGSSYLDSGTRRAGAAVVDGHNTIWAQSLPPGTSAQKAELIALTKALELSKGKKANIYTDSRYAFATAHTHGSIYERRGWLTSEGKEIKNKAEIIALLKALFLPQEVAIIHCPGHQKGQDPVAVGNRQADRVARQAAMAEVLTLATEPDNTSHITAGKRTADGSEFEKRTADGSEFESPKKKAKVE

SEQ ID NO: 2023 - protein, 2094 aa, synthetic construct
MPAAKRVKLDGGDKKYSIGLDIGTNSVGWAVITDEYKVPSKKFKVLGNTDRHSIKKNLIGALLFDSGETAEATRLKRTARRRYTRRKNRICYLQEIFSNEMAKVDDSFFHRLEESFLVEEDKKHERHPIFGNIVDEVAYHEKYPTIYHLRKKLVDSTDKADLRLIYLALAHMIKFRGHFLIEGDLNPDNSDVDKLFIQLVQTYNQLFEENPINASGVDAKAILSARLSKSRRLENLIAQLPGEKKNGLFGNLIALSLGLTPNFKSNFDLAEDAKLQLSKDTYDDDLDNLLAQIGDQYADLFLAAKNLSDAILLSDILRVNTEITKAPLSASMIKRYDEHHQDLTLLKALVRQQLPEKYKEIFFDQSKNGYAGYIDGGASQEEFYKFIKPILEKMDGTEELLVKLNREDLLRKQRTFDNGSIPHQIHLGELHAILRRQEDFYPFLKDNREKIEKILTFRIPYYVGPLARGNSRFAWMTRKSEETITPWNFEEVVDKGASAQSFIERMTNFDKNLPNEKVLPKHSLLYEYFTVYNELTKVKYVTEGMRKPAFLSGEQKKAIVDLLFKTNRKVTVKQLKEDYFKKIECFDSVEISGVEDRFNASLGTYHDLLKIIKDKDFLDNEENEDILEDIVLTLTLFEDREMIEERLKTYAHLFDDKVMKQLKRRRYTGWGRLSRKLINGIRDKQSGKTILDFLKSDGFANRNFMQLIHDDSLTFKEDIQKAQVSGQGDSLHEHIANLAGSPAIKKGILQTVKVVDELVKVMGRHKPENIVIEMARENQTTQKGQKNSRERMKRIEEGIKELGSQILKEHPVENTQLQNEKLYLYYLQNGRDMYVDQELDINRLSDYDVDHIVPQSFLKDDSIDNKVLTRSDKARGKSDNVPSEEVVKKMKNYWRQLLNAKLITQRKFDNLTKAERGGLSELDKAGFIKRQLVETRQITKHVAQILDSRMNTKYDENDKLIREVKVITLKSKLVSDFRKDFQFYKVREINNYHHAHDAYLNAVVGTALIKKYPKLESEFVYGDYKVYDVRKMIAKSEQEIGKATAKYFFYSNIMNFFKTEITLANGEIRKRPLIETNGETGEIVWDKGRDFATVRKVLSMPQVNIVKKTEVQTGGFSKESILPKRNSDKLIARKKDWDPKKYGGFDSPTVAYSVLVVAKVEKGKSKKLKSVKELLGITIMERSSFEKNPIDFLEAKGYKEVKKDLIIKLPKYSLFELENGRKRMLASAGELQKGNELALPSKYVNFLYLASHYEKLKGSPEDNEQKQLFVEQHKHYLDEIIEQISEFSKRVILADANLDKVLSAYNKHRDKPIREQAENIIHLFTLTNLGAPAAFKYFDTTIDRKRYTSTKEVLDATLIHQSITGLYETRIDLSQLGGDGGPAPGGTVSLQDEHRLFDIPVTTSLPDVWLQDFPQAWAETGGLGRAKCQAPIIIDLKPTAVPVSIKQYPMSLEAHMGIRQHIIKFLELGVLRPCRSPWNTPLLPVKKPGTQDYRPVQDLREINKRTVDIHPTVPNPYNLLSTLKPDYSWYTVLDLKDAFFCLPLAPQSQELFAFEWKDPERGISGQLTWTRLPQGFKNSPTLFNEALHRDLTDFRTQHPEVTLLQYVDDLLLAAPTKKACTQGTRHLLQELGEKGYRASAKKAQICQTKVTYLGYILSEGKRWLTPGRIETVARIPPPRNPREVREFLGKAGFCRLFIPGFAELAAPLYALTKPSTPFTWQTEHQLAFEALKKALLSAPALGLPDTSKPFTLFLDERQGIAKGVLTQKLGPWKRPVAYLSKKLDPVAAGWPPCLRIMAATAMLVKDSAKLTLGQPLTVITPHTLEAIVRQPPDRWITNARLTHYQALLLDTDRVQFGPPVTLNPATLLPVPENQPSPHDCRQVLAETHGTREDLKDQELPDADHTWYTDGSSYLDSGTRRAGAAVVDGHNTIWAQSLPPGTSAQKAELIALTKALELSKGKKANIYTDSRYAFATAHTHGSIYERRGWLTSEGKEIKNKAEIIALLKALFLPQEVAIIHCPGHQKGQDPVAVGNRQADRVARQAAMAEVLTLATEPDNTSHITAGKRTADGSEFEKRTADGSEFESPKKKAKVE

SEQ ID NO: 2024 - protein, 2097 aa, synthetic construct
MPAAKRVKLDGGDKKYSIGLDIGTNSVGWAVITDEYKVPSKKFKVLGNTDRHSIKKNLIGALLFDSGETAEATRLKRTARRRYTRRKNRICYLQEIFSNEMAKVDDSFFHRLEESFLVEEDKKHERHPIFGNIVDEVAYHEKYPTIYHLRKKLVDSTDKADLRLIYLALAHMIKFRGHFLIEGDLNPDNSDVDKLFIQLVQTYNQLFEENPINASGVDAKAILSARLSKSRRLENLIAQLPGEKKNGLFGNLIALSLGLTPNFKSNFDLAEDAKLQLSKDTYDDDLDNLLAQIGDQYADLFLAAKNLSDAILLSDILRVNTEITKAPLSASMIKRYDEHHQDLTLLKALVRQQLPEKYKEIFFDQSKNGYAGYIDGGASQEEFYKFIKPILEKMDGTEELLVKLNREDLLRKQRTFDNGSIPHQIHLGELHAILRRQEDFYPFLKDNREKIEKILTFRIPYYVGPLARGNSRFAWMTRKSEETITPWNFEEVVDKGASAQSFIERMTNFDKNLPNEKVLPKHSLLYEYFTVYNELTKVKYVTEGMRKPAFLSGEQKKAIVDLLFKTNRKVTVKQLKEDYFKKIECFDSVEISGVEDRFNASLGTYHDLLKIIKDKDFLDNEENEDILEDIVLTLTLFEDREMIEERLKTYAHLFDDKVMKQLKRRRYTGWGRLSRKLINGIRDKQSGKTILDFLKSDGFANRNFMQLIHDDSLTFKEDIQKAQVSGQGDSLHEHIANLAGSPAIKKGILQTVKVVDELVKVMGRHKPENIVIEMARENQTTQKGQKNSRERMKRIEEGIKELGSQILKEHPVENTQLQNEKLYLYYLQNGRDMYVDQELDINRLSDYDVDHIVPQSFLKDDSIDNKVLTRSDKARGKSDNVPSEEVVKKMKNYWRQLLNAKLITQRKFDNLTKAERGGLSELDKAGFIKRQLVETRQITKHVAQILDSRMNTKYDENDKLIREVKVITLKSKLVSDFRKDFQFYKVREINNYHHAHDAYLNAVVGTALIKKYPKLESEFVYGDYKVYDVRKMIAKSEQEIGKATAKYFFYSNIMNFFKTEITLANGEIRKRPLIETNGETGEIVWDKGRDFATVRKVLSMPQVNIVKKTEVQTGGFSKESILPKRNSDKLIARKKDWDPKKYGGFDSPTVAYSVLVVAKVEKGKSKKLKSVKELLGITIMERSSFEKNPIDFLEAKGYKEVKKDLIIKLPKYSLFELENGRKRMLASAGELQKGNELALPSKYVNFLYLASHYEKLKGSPEDNEQKQLFVEQHKHYLDEIIEQISEFSKRVILADANLDKVLSAYNKHRDKPIREQAENIIHLFTLTNLGAPAAFKYFDTTIDRKRYTSTKEVLDATLIHQSITGLYETRIDLSQLGGDGGGGSGGSGGTVSLQDEHRLFDIPVTTSLPDVWLQDFPQAWAETGGLGRAKCQAPIIIDLKPTAVPVSIKQYPMSLEAHMGIRQHIIKFLELGVLRPCRSPWNTPLLPVKKPGTQDYRPVQDLREINKRTVDIHPTVPNPYNLLSTLKPDYSWYTVLDLKDAFFCLPLAPQSQELFAFEWKDPERGISGQLTWTRLPQGFKNSPTLFNEALHRDLTDFRTQHPEVTLLQYVDDLLLAAPTKKACTQGTRHLLQELGEKGYRASAKKAQICQTKVTYLGYILSEGKRWLTPGRIETVARIPPPRNPREVREFLGKAGFCRLFIPGFAELAAPLYALTKPSTPFTWQTEHQLAFEALKKALLSAPALGLPDTSKPFTLFLDERQGIAKGVLTQKLGPWKRPVAYLSKKLDPVAAGWPPCLRIMAATAMLVKDSAKLTLGQPLTVITPHTLEAIVRQPPDRWITNARLTHYQALLLDTDRVQFGPPVTLNPATLLPVPENQPSPHDCRQVLAETHGTREDLKDQELPDADHTWYTDGSSYLDSGTRRAGAAVVDGHNTIWAQSLPPGTSAQKAELIALTKALELSKGKKANIYTDSRYAFATAHTHGSIYERRGWLTSEGKEIKNKAEIIALLKALFLPQEVAIIHCPGHQKGQDPVAVGNRQADRVARQAAMAEVLTLATEPDNTSHITAGKRTADGSEFEKRTADGSEFESPKKKAKVE

SEQ ID NO: 2025 - protein, 2102 aa, synthetic construct
MPAAKRVKLDGGDKKYSIGLDIGTNSVGWAVITDEYKVPSKKFKVLGNTDRHSIKKNLIGALLFDSGETAEATRLKRTARRRYTRRKNRICYLQEIFSNEMAKVDDSFFHRLEESFLVEEDKKHERHPIFGNIVDEVAYHEKYPTIYHLRKKLVDSTDKADLRLIYLALAHMIKFRGHFLIEGDLNPDNSDVDKLFIQLVQTYNQLFEENPINASGVDAKAILSARLSKSRRLENLIAQLPGEKKNGLFGNLIALSLGLTPNFKSNFDLAEDAKLQLSKDTYDDDLDNLLAQIGDQYADLFLAAKNLSDAILLSDILRVNTEITKAPLSASMIKRYDEHHQDLTLLKALVRQQLPEKYKEIFFDQSKNGYAGYIDGGASQEEFYKFIKPILEKMDGTEELLVKLNREDLLRKQRTFDNGSIPHQIHLGELHAILRRQEDFYPFLKDNREKIEKILTFRIPYYVGPLARGNSRFAWMTRKSEETITPWNFEEVVDKGASAQSFIERMTNFDKNLPNEKVLPKHSLLYEYFTVYNELTKVKYVTEGMRKPAFLSGEQKKAIVDLLFKTNRKVTVKQLKEDYFKKIECFDSVEISGVEDRFNASLGTYHDLLKIIKDKDFLDNEENEDILEDIVLTLTLFEDREMIEERLKTYAHLFDDKVMKQLKRRRYTGWGRLSRKLINGIRDKQSGKTILDFLKSDGFANRNFMQLIHDDSLTFKEDIQKAQVSGQGDSLHEHIANLAGSPAIKKGILQTVKVVDELVKVMGRHKPENIVIEMARENQTTQKGQKNSRERMKRIEEGIKELGSQILKEHPVENTQLQNEKLYLYYLQNGRDMYVDQELDINRLSDYDVDHIVPQSFLKDDSIDNKVLTRSDKARGKSDNVPSEEVVKKMKNYWRQLLNAKLITQRKFDNLTKAERGGLSELDKAGFIKRQLVETRQITKHVAQILDSRMNTKYDENDKLIREVKVITLKSKLVSDFRKDFQFYKVREINNYHHAHDAYLNAVVGTALIKKYPKLESEFVYGDYKVYDVRKMIAKSEQEIGKATAKYFFYSNIMNFFKTEITLANGEIRKRPLIETNGETGEIVWDKGRDFATVRKVLSMPQVNIVKKTEVQTGGFSKESILPKRNSDKLIARKKDWDPKKYGGFDSPTVAYSVLVVAKVEKGKSKKLKSVKELLGITIMERSSFEKNPIDFLEAKGYKEVKKDLIIKLPKYSLFELENGRKRMLASAGELQKGNELALPSKYVNFLYLASHYEKLKGSPEDNEQKQLFVEQHKHYLDEIIEQISEFSKRVILADANLDKVLSAYNKHRDKPIREQAENIIHLFTLTNLGAPAAFKYFDTTIDRKRYTSTKEVLDATLIHQSITGLYETRIDLSQLGGDGGGSSGGSEAAAKGGTVSLQDEHRLFDIPVTTSLPDVWLQDFPQAWAETGGLGRAKCQAPIIIDLKPTAVPVSIKQYPMSLEAHMGIRQHIIKFLELGVLRPCRSPWNTPLLPVKKPGTQDYRPVQDLREINKRTVDIHPTVPNPYNLLSTLKPDYSWYTVLDLKDAFFCLPLAPQSQELFAFEWKDPERGISGQLTWTRLPQGFKNSPTLFNEALHRDLTDFRTQHPEVTLLQYVDDLLLAAPTKKACTQGTRHLLQELGEKGYRASAKKAQICQTKVTYLGYILSEGKRWLTPGRIETVARIPPPRNPREVREFLGKAGFCRLFIPGFAELAAPLYALTKPSTPFTWQTEHQLAFEALKKALLSAPALGLPDTSKPFTLFLDERQGIAKGVLTQKLGPWKRPVAYLSKKLDPVAAGWPPCLRIMAATAMLVKDSAKLTLGQPLTVITPHTLEAIVRQPPDRWITNARLTHYQALLLDTDRVQFGPPVTLNPATLLPVPENQPSPHDCRQVLAETHGTREDLKDQELPDADHTWYTDGSSYLDSGTRRAGAAVVDGHNTIWAQSLPPGTSAQKAELIALTKALELSKGKKANIYTDSRYAFATAHTHGSIYERRGWLTSEGKEIKNKAEIIALLKALFLPQEVAIIHCPGHQKGQDPVAVGNRQADRVARQAAMAEVLTLATEPDNTSHITAGKRTADGSEFEKRTADGSEFESPKKKAKVE

SEQ ID NO: 2026 - protein, 2100 aa, synthetic construct
MPAAKRVKLDGGDKKYSIGLDIGTNSVGWAVITDEYKVPSKKFKVLGNTDRHSIKKNLIGALLFDSGETAEATRLKRTARRRYTRRKNRICYLQEIFSNEMAKVDDSFFHRLEESFLVEEDKKHERHPIFGNIVDEVAYHEKYPTIYHLRKKLVDSTDKADLRLIYLALAHMIKFRGHFLIEGDLNPDNSDVDKLFIQLVQTYNQLFEENPINASGVDAKAILSARLSKSRRLENLIAQLPGEKKNGLFGNLIALSLGLTPNFKSNFDLAEDAKLQLSKDTYDDDLDNLLAQIGDQYADLFLAAKNLSDAILLSDILRVNTEITKAPLSASMIKRYDEHHQDLTLLKALVRQQLPEKYKEIFFDQSKNGYAGYIDGGASQEEFYKFIKPILEKMDGTEELLVKLNREDLLRKQRTFDNGSIPHQIHLGELHAILRRQEDFYPFLKDNREKIEKILTFRIPYYVGPLARGNSRFAWMTRKSEETITPWNFEEVVDKGASAQSFIERMTNFDKNLPNEKVLPKHSLLYEYFTVYNELTKVKYVTEGMRKPAFLSGEQKKAIVDLLFKTNRKVTVKQLKEDYFKKIECFDSVEISGVEDRFNASLGTYHDLLKIIKDKDFLDNEENEDILEDIVLTLTLFEDREMIEERLKTYAHLFDDKVMKQLKRRRYTGWGRLSRKLINGIRDKQSGKTILDFLKSDGFANRNFMQLIHDDSLTFKEDIQKAQVSGQGDSLHEHIANLAGSPAIKKGILQTVKVVDELVKVMGRHKPENIVIEMARENQTTQKGQKNSRERMKRIEEGIKELGSQILKEHPVENTQLQNEKLYLYYLQNGRDMYVDQELDINRLSDYDVDHIVPQSFLKDDSIDNKVLTRSDKARGKSDNVPSEEVVKKMKNYWRQLLNAKLITQRKFDNLTKAERGGLSELDKAGFIKRQLVETRQITKHVAQILDSRMNTKYDENDKLIREVKVITLKSKLVSDFRKDFQFYKVREINNYHHAHDAYLNAVVGTALIKKYPKLESEFVYGDYKVYDVRKMIAKSEQEIGKATAKYFFYSNIMNFFKTEITLANGEIRKRPLIETNGETGEIVWDKGRDFATVRKVLSMPQVNIVKKTEVQTGGFSKESILPKRNSDKLIARKKDWDPKKYGGFDSPTVAYSVLVVAKVEKGKSKKLKSVKELLGITIMERSSFEKNPIDFLEAKGYKEVKKDLIIKLPKYSLFELENGRKRMLASAGELQKGNELALPSKYVNFLYLASHYEKLKGSPEDNEQKQLFVEQHKHYLDEIIEQISEFSKRVILADANLDKVLSAYNKHRDKPIREQAENIIHLFTLTNLGAPAAFKYFDTTIDRKRYTSTKEVLDATLIHQSITGLYETRIDLSQLGGDGGGGGGGSGSSGGTVSLQDEHRLFDIPVTTSLPDVWLQDFPQAWAETGGLGRAKCQAPIIIDLKPTAVPVSIKQYPMSLEAHMGIRQHIIKFLELGVLRPCRSPWNTPLLPVKKPGTQDYRPVQDLREINKRTVDIHPTVPNPYNLLSTLKPDYSWYTVLDLKDAFFCLPLAPQSQELFAFEWKDPERGISGQLTWTRLPQGFKNSPTLFNEALHRDLTDFRTQHPEVTLLQYVDDLLLAAPTKKACTQGTRHLLQELGEKGYRASAKKAQICQTKVTYLGYILSEGKRWLTPGRIETVARIPPPRNPREVREFLGKAGFCRLFIPGFAELAAPLYALTKPSTPFTWQTEHQLAFEALKKALLSAPALGLPDTSKPFTLFLDERQGIAKGVLTQKLGPWKRPVAYLSKKLDPVAAGWPPCLRIMAATAMLVKDSAKLTLGQPLTVITPHTLEAIVRQPPDRWITNARLTHYQALLLDTDRVQFGPPVTLNPATLLPVPENQPSPHDCRQVLAETHGTREDLKDQELPDADHTWYTDGSSYLDSGTRRAGAAVVDGHNTIWAQSLPPGTSAQKAELIALTKALELSKGKKANIYTDSRYAFATAHTHGSIYERRGWLTSEGKEIKNKAEIIALLKALFLPQEVAIIHCPGHQKGQDPVAVGNRQADRVARQAAMAEVLTLATEPDNTSHITAGKRTADGSEFEKRTADGSEFESPKKKAKVE

SEQ ID NO: 2027 - protein, 2102 aa, synthetic construct
MPAAKRVKLDGGDKKYSIGLDIGTNSVGWAVITDEYKVPSKKFKVLGNTDRHSIKKNLIGALLFDSGETAEATRLKRTARRRYTRRKNRICYLQEIFSNEMAKVDDSFFHRLEESFLVEEDKKHERHPIFGNIVDEVAYHEKYPTIYHLRKKLVDSTDKADLRLIYLALAHMIKFRGHFLIEGDLNPDNSDVDKLFIQLVQTYNQLFEENPINASGVDAKAILSARLSKSRRLENLIAQLPGEKKNGLFGNLIALSLGLTPNFKSNFDLAEDAKLQLSKDTYDDDLDNLLAQIGDQYADLFLAAKNLSDAILLSDILRVNTEITKAPLSASMIKRYDEHHQDLTLLKALVRQQLPEKYKEIFFDQSKNGYAGYIDGGASQEEFYKFIKPILEKMDGTEELLVKLNREDLLRKQRTFDNGSIPHQIHLGELHAILRRQEDFYPFLKDNREKIEKILTFRIPYYVGPLARGNSRFAWMTRKSEETITPWNFEEVVDKGASAQSFIERMTNFDKNLPNEKVLPKHSLLYEYFTVYNELTKVKYVTEGMRKPAFLSGEQKKAIVDLLFKTNRKVTVKQLKEDYFKKIECFDSVEISGVEDRFNASLGTYHDLLKIIKDKDFLDNEENEDILEDIVLTLTLFEDREMIEERLKTYAHLFDDKVMKQLKRRRYTGWGRLSRKLINGIRDKQSGKTILDFLKSDGFANRNFMQLIHDDSLTFKEDIQKAQVSGQGDSLHEHIANLAGSPAIKKGILQTVKVVDELVKVMGRHKPENIVIEMARENQTTQKGQKNSRERMKRIEEGIKELGSQILKEHPVENTQLQNEKLYLYYLQNGRDMYVDQELDINRLSDYDVDHIVPQSFLKDDSIDNKVLTRSDKARGKSDNVPSEEVVKKMKNYWRQLLNAKLITQRKFDNLTKAERGGLSELDKAGFIKRQLVETRQITKHVAQILDSRMNTKYDENDKLIREVKVITLKSKLVSDFRKDFQFYKVREINNYHHAHDAYLNAVVGTALIKKYPKLESEFVYGDYKVYDVRKMIAKSEQEIGKATAKYFFYSNIMNFFKTEITLANGEIRKRPLIETNGETGEIVWDKGRDFATVRKVLSMPQVNIVKKTEVQTGGFSKESILPKRNSDKLIARKKDWDPKKYGGFDSPTVAYSVLVVAKVEKGKSKKLKSVKELLGITIMERSSFEKNPIDFLEAKGYKEVKKDLIIKLPKYSLFELENGRKRMLASAGELQKGNELALPSKYVNFLYLASHYEKLKGSPEDNEQKQLFVEQHKHYLDEIIEQISEFSKRVILADANLDKVLSAYNKHRDKPIREQAENIIHLFTLTNLGAPAAFKYFDTTIDRKRYTSTKEVLDATLIHQSITGLYETRIDLSQLGGDGGEAAAKGGSPAPGGTVSLQDEHRLFDIPVTTSLPDVWLQDFPQAWAETGGLGRAKCQAPIIIDLKPTAVPVSIKQYPMSLEAHMGIRQHIIKFLELGVLRPCRSPWNTPLLPVKKPGTQDYRPVQDLREINKRTVDIHPTVPNPYNLLSTLKPDYSWYTVLDLKDAFFCLPLAPQSQELFAFEWKDPERGISGQLTWTRLPQGFKNSPTLFNEALHRDLTDFRTQHPEVTLLQYVDDLLLAAPTKKACTQGTRHLLQELGEKGYRASAKKAQICQTKVTYLGYILSEGKRWLTPGRIETVARIPPPRNPREVREFLGKAGFCRLFIPGFAELAAPLYALTKPSTPFTWQTEHQLAFEALKKALLSAPALGLPDTSKPFTLFLDERQGIAKGVLTQKLGPWKRPVAYLSKKLDPVAAGWPPCLRIMAATAMLVKDSAKLTLGQPLTVITPHTLEAIVRQPPDRWITNARLTHYQALLLDTDRVQFGPPVTLNPATLLPVPENQPSPHDCRQVLAETHGTREDLKDQELPDADHTWYTDGSSYLDSGTRRAGAAVVDGHNTIWAQSLPPGTSAQKAELIALTKALELSKGKKANIYTDSRYAFATAHTHGSIYERRGWLTSEGKEIKNKAEIIALLKALFLPQEVAIIHCPGHQKGQDPVAVGNRQADRVARQAAMAEVLTLATEPDNTSHITAGKRTADGSEFEKRTADGSEFESPKKKAKVE

SEQ ID NO: 2028 - protein, 2102 aa, synthetic construct
MPAAKRVKLDGGDKKYSIGLDIGTNSVGWAVITDEYKVPSKKFKVLGNTDRHSIKKNLIGALLFDSGETAEATRLKRTARRRYTRRKNRICYLQEIFSNEMAKVDDSFFHRLEESFLVEEDKKHERHPIFGNIVDEVAYHEKYPTIYHLRKKLVDSTDKADLRLIYLALAHMIKFRGHFLIEGDLNPDNSDVDKLFIQLVQTYNQLFEENPINASGVDAKAILSARLSKSRRLENLIAQLPGEKKNGLFGNLIALSLGLTPNFKSNFDLAEDAKLQLSKDTYDDDLDNLLAQIGDQYADLFLAAKNLSDAILLSDILRVNTEITKAPLSASMIKRYDEHHQDLTLLKALVRQQLPEKYKEIFFDQSKNGYAGYIDGGASQEEFYKFIKPILEKMDGTEELLVKLNREDLLRKQRTFDNGSIPHQIHLGELHAILRRQEDFYPFLKDNREKIEKILTFRIPYYVGPLARGNSRFAWMTRKSEETITPWNFEEVVDKGASAQSFIERMTNFDKNLPNEKVLPKHSLLYEYFTVYNELTKVKYVTEGMRKPAFLSGEQKKAIVDLLFKTNRKVTVKQLKEDYFKKIECFDSVEISGVEDRFNASLGTYHDLLKIIKDKDFLDNEENEDILEDIVLTLTLFEDREMIEERLKTYAHLFDDKVMKQLKRRRYTGWGRLSRKLINGIRDKQSGKTILDFLKSDGFANRNFMQLIHDDSLTFKEDIQKAQVSGQGDSLHEHIANLAGSPAIKKGILQTVKVVDELVKVMGRHKPENIVIEMARENQTTQKGQKNSRERMKRIEEGIKELGSQILKEHPVENTQLQNEKLYLYYLQNGRDMYVDQELDINRLSDYDVDHIVPQSFLKDDSIDNKVLTRSDKARGKSDNVPSEEVVKKMKNYWRQLLNAKLITQRKFDNLTKAERGGLSELDKAGFIKRQLVETRQITKHVAQILDSRMNTKYDENDKLIREVKVITLKSKLVSDFRKDFQFYKVREINNYHHAHDAYLNAVVGTALIKKYPKLESEFVYGDYKVYDVRKMIAKSEQEIGKATAKYFFYSNIMNFFKTEITLANGEIRKRPLIETNGETGEIVWDKGRDFATVRKVLSMPQVNIVKKTEVQTGGFSKESILPKRNSDKLIARKKDWDPKKYGGFDSPTVAYSVLVVAKVEKGKSKKLKSVKELLGITIMERSSFEKNPIDFLEAKGYKEVKKDLIIKLPKYSLFELENGRKRMLASAGELQKGNELALPSKYVNFLYLASHYEKLKGSPEDNEQKQLFVEQHKHYLDEIIEQISEFSKRVILADANLDKVLSAYNKHRDKPIREQAENIIHLFTLTNLGAPAAFKYFDTTIDRKRYTSTKEVLDATLIHQSITGLYETRIDLSQLGGDGGEAAAKPAPGGSGGTVSLQDEHRLFDIPVTTSLPDVWLQDFPQAWAETGGLGRAKCQAPIIIDLKPTAVPVSIKQYPMSLEAHMGIRQHIIKFLELGVLRPCRSPWNTPLLPVKKPGTQDYRPVQDLREINKRTVDIHPTVPNPYNLLSTLKPDYSWYTVLDLKDAFFCLPLAPQSQELFAFEWKDPERGISGQLTWTRLPQGFKNSPTLFNEALHRDLTDFRTQHPEVTLLQYVDDLLLAAPTKKACTQGTRHLLQELGEKGYRASAKKAQICQTKVTYLGYILSEGKRWLTPGRIETVARIPPPRNPREVREFLGKAGFCRLFIPGFAELAAPLYALTKPSTPFTWQTEHQLAFEALKKALLSAPALGLPDTSKPFTLFLDERQGIAKGVLTQKLGPWKRPVAYLSKKLDPVAAGWPPCLRIMAATAMLVKDSAKLTLGQPLTVITPHTLEAIVRQPPDRWITNARLTHYQALLLDTDRVQFGPPVTLNPATLLPVPENQPSPHDCRQVLAETHGTREDLKDQELPDADHTWYTDGSSYLDSGTRRAGAAVVDGHNTIWAQSLPPGTSAQKAELIALTKALELSKGKKANIYTDSRYAFATAHTHGSIYERRGWLTSEGKEIKNKAEIIALLKALFLPQEVAIIHCPGHQKGQDPVAVGNRQADRVARQAAMAEVLTLATEPDNTSHITAGKRTADGSEFEKRTADGSEFESPKKKAKVE

SEQ ID NO: 2029 - protein, 2097 aa, synthetic construct
MPAAKRVKLDGGDKKYSIGLDIGTNSVGWAVITDEYKVPSKKFKVLGNTDRHSIKKNLIGALLFDSGETAEATRLKRTARRRYTRRKNRICYLQEIFSNEMAKVDDSFFHRLEESFLVEEDKKHERHPIFGNIVDEVAYHEKYPTIYHLRKKLVDSTDKADLRLIYLALAHMIKFRGHFLIEGDLNPDNSDVDKLFIQLVQTYNQLFEENPINASGVDAKAILSARLSKSRRLENLIAQLPGEKKNGLFGNLIALSLGLTPNFKSNFDLAEDAKLQLSKDTYDDDLDNLLAQIGDQYADLFLAAKNLSDAILLSDILRVNTEITKAPLSASMIKRYDEHHQDLTLLKALVRQQLPEKYKEIFFDQSKNGYAGYIDGGASQEEFYKFIKPILEKMDGTEELLVKLNREDLLRKQRTFDNGSIPHQIHLGELHAILRRQEDFYPFLKDNREKIEKILTFRIPYYVGPLARGNSRFAWMTRKSEETITPWNFEEVVDKGASAQSFIERMTNFDKNLPNEKVLPKHSLLYEYFTVYNELTKVKYVTEGMRKPAFLSGEQKKAIVDLLFKTNRKVTVKQLKEDYFKKIECFDSVEISGVEDRFNASLGTYHDLLKIIKDKDFLDNEENEDILEDIVLTLTLFEDREMIEERLKTYAHLFDDKVMKQLKRRRYTGWGRLSRKLINGIRDKQSGKTILDFLKSDGFANRNFMQLIHDDSLTFKEDIQKAQVSGQGDSLHEHIANLAGSPAIKKGILQTVKVVDELVKVMGRHKPENIVIEMARENQTTQKGQKNSRERMKRIEEGIKELGSQILKEHPVENTQLQNEKLYLYYLQNGRDMYVDQELDINRLSDYDVDHIVPQSFLKDDSIDNKVLTRSDKARGKSDNVPSEEVVKKMKNYWRQLLNAKLITQRKFDNLTKAERGGLSELDKAGFIKRQLVETRQITKHVAQILDSRMNTKYDENDKLIREVKVITLKSKLVSDFRKDFQFYKVREINNYHHAHDAYLNAVVGTALIKKYPKLESEFVYGDYKVYDVRKMIAKSEQEIGKATAKYFFYSNIMNFFKTEITLANGEIRKRPLIETNGETGEIVWDKGRDFATVRKVLSMPQVNIVKKTEVQTGGFSKESILPKRNSDKLIARKKDWDPKKYGGFDSPTVAYSVLVVAKVEKGKSKKLKSVKELLGITIMERSSFEKNPIDFLEAKGYKEVKKDLIIKLPKYSLFELENGRKRMLASAGELQKGNELALPSKYVNFLYLASHYEKLKGSPEDNEQKQLFVEQHKHYLDEIIEQISEFSKRVILADANLDKVLSAYNKHRDKPIREQAENIIHLFTLTNLGAPAAFKYFDTTIDRKRYTSTKEVLDATLIHQSITGLYETRIDLSQLGGDGGGGGGGSGGTVSLQDEHRLFDIPVTTSLPDVWLQDFPQAWAETGGLGRAKCQAPIIIDLKPTAVPVSIKQYPMSLEAHMGIRQHIIKFLELGVLRPCRSPWNTPLLPVKKPGTQDYRPVQDLREINKRTVDIHPTVPNPYNLLSTLKPDYSWYTVLDLKDAFFCLPLAPQSQELFAFEWKDPERGISGQLTWTRLPQGFKNSPTLFNEALHRDLTDFRTQHPEVTLLQYVDDLLLAAPTKKACTQGTRHLLQELGEKGYRASAKKAQICQTKVTYLGYILSEGKRWLTPGRIETVARIPPPRNPREVREFLGKAGFCRLFIPGFAELAAPLYALTKPSTPFTWQTEHQLAFEALKKALLSAPALGLPDTSKPFTLFLDERQGIAKGVLTQKLGPWKRPVAYLSKKLDPVAAGWPPCLRIMAATAMLVKDSAKLTLGQPLTVITPHTLEAIVRQPPDRWITNARLTHYQALLLDTDRVQFGPPVTLNPATLLPVPENQPSPHDCRQVLAETHGTREDLKDQELPDADHTWYTDGSSYLDSGTRRAGAAVVDGHNTIWAQSLPPGTSAQKAELIALTKALELSKGKKANIYTDSRYAFATAHTHGSIYERRGWLTSEGKEIKNKAEIIALLKALFLPQEVAIIHCPGHQKGQDPVAVGNRQADRVARQAAMAEVLTLATEPDNTSHITAGKRTADGSEFEKRTADGSEFESPKKKAKVE

SEQ ID NO: 2030 - protein, 2100 aa, synthetic construct
MPAAKRVKLDGGDKKYSIGLDIGTNSVGWAVITDEYKVPSKKFKVLGNTDRHSIKKNLIGALLFDSGETAEATRLKRTARRRYTRRKNRICYLQEIFSNEMAKVDDSFFHRLEESFLVEEDKKHERHPIFGNIVDEVAYHEKYPTIYHLRKKLVDSTDKADLRLIYLALAHMIKFRGHFLIEGDLNPDNSDVDKLFIQLVQTYNQLFEENPINASGVDAKAILSARLSKSRRLENLIAQLPGEKKNGLFGNLIALSLGLTPNFKSNFDLAEDAKLQLSKDTYDDDLDNLLAQIGDQYADLFLAAKNLSDAILLSDILRVNTEITKAPLSASMIKRYDEHHQDLTLLKALVRQQLPEKYKEIFFDQSKNGYAGYIDGGASQEEFYKFIKPILEKMDGTEELLVKLNREDLLRKQRTFDNGSIPHQIHLGELHAILRRQEDFYPFLKDNREKIEKILTFRIPYYVGPLARGNSRFAWMTRKSEETITPWNFEEVVDKGASAQSFIERMTNFDKNLPNEKVLPKHSLLYEYFTVYNELTKVKYVTEGMRKPAFLSGEQKKAIVDLLFKTNRKVTVKQLKEDYFKKIECFDSVEISGVEDRFNASLGTYHDLLKIIKDKDFLDNEENEDILEDIVLTLTLFEDREMIEERLKTYAHLFDDKVMKQLKRRRYTGWGRLSRKLINGIRDKQSGKTILDFLKSDGFANRNFMQLIHDDSLTFKEDIQKAQVSGQGDSLHEHIANLAGSPAIKKGILQTVKVVDELVKVMGRHKPENIVIEMARENQTTQKGQKNSRERMKRIEEGIKELGSQILKEHPVENTQLQNEKLYLYYLQNGRDMYVDQELDINRLSDYDVDHIVPQSFLKDDSIDNKVLTRSDKARGKSDNVPSEEVVKKMKNYWRQLLNAKLITQRKFDNLTKAERGGLSELDKAGFIKRQLVETRQITKHVAQILDSRMNTKYDENDKLIREVKVITLKSKLVSDFRKDFQFYKVREINNYHHAHDAYLNAVVGTALIKKYPKLESEFVYGDYKVYDVRKMIAKSEQEIGKATAKYFFYSNIMNFFKTEITLANGEIRKRPLIETNGETGEIVWDKGRDFATVRKVLSMPQVNIVKKTEVQTGGFSKESILPKRNSDKLIARKKDWDPKKYGGFDSPTVAYSVLVVAKVEKGKSKKLKSVKELLGITIMERSSFEKNPIDFLEAKGYKEVKKDLIIKLPKYSLFELENGRKRMLASAGELQKGNELALPSKYVNFLYLASHYEKLKGSPEDNEQKQLFVEQHKHYLDEIIEQISEFSKRVILADANLDKVLSAYNKHRDKPIREQAENIIHLFTLTNLGAPAAFKYFDTTIDRKRYTSTKEVLDATLIHQSITGLYETRIDLSQLGGDGGGGSGGSGGSGGTVSLQDEHRLFDIPVTTSLPDVWLQDFPQAWAETGGLGRAKCQAPIIIDLKPTAVPVSIKQYPMSLEAHMGIRQHIIKFLELGVLRPCRSPWNTPLLPVKKPGTQDYRPVQDLREINKRTVDIHPTVPNPYNLLSTLKPDYSWYTVLDLKDAFFCLPLAPQSQELFAFEWKDPERGISGQLTWTRLPQGFKNSPTLFNEALHRDLTDFRTQHPEVTLLQYVDDLLLAAPTKKACTQGTRHLLQELGEKGYRASAKKAQICQTKVTYLGYILSEGKRWLTPGRIETVARIPPPRNPREVREFLGKAGFCRLFIPGFAELAAPLYALTKPSTPFTWQTEHQLAFEALKKALLSAPALGLPDTSKPFTLFLDERQGIAKGVLTQKLGPWKRPVAYLSKKLDPVAAGWPPCLRIMAATAMLVKDSAKLTLGQPLTVITPHTLEAIVRQPPDRWITNARLTHYQALLLDTDRVQFGPPVTLNPATLLPVPENQPSPHDCRQVLAETHGTREDLKDQELPDADHTWYTDGSSYLDSGTRRAGAAVVDGHNTIWAQSLPPGTSAQKAELIALTKALELSKGKKANIYTDSRYAFATAHTHGSIYERRGWLTSEGKEIKNKAEIIALLKALFLPQEVAIIHCPGHQKGQDPVAVGNRQADRVARQAAMAEVLTLATEPDNTSHITAGKRTADGSEFEKRTADGSEFESPKKKAKVE

SEQ ID NO: 2031 - protein, 2097 aa, synthetic construct
MPAAKRVKLDGGDKKYSIGLDIGTNSVGWAVITDEYKVPSKKFKVLGNTDRHSIKKNLIGALLFDSGETAEATRLKRTARRRYTRRKNRICYLQEIFSNEMAKVDDSFFHRLEESFLVEEDKKHERHPIFGNIVDEVAYHEKYPTIYHLRKKLVDSTDKADLRLIYLALAHMIKFRGHFLIEGDLNPDNSDVDKLFIQLVQTYNQLFEENPINASGVDAKAILSARLSKSRRLENLIAQLPGEKKNGLFGNLIALSLGLTPNFKSNFDLAEDAKLQLSKDTYDDDLDNLLAQIGDQYADLFLAAKNLSDAILLSDILRVNTEITKAPLSASMIKRYDEHHQDLTLLKALVRQQLPEKYKEIFFDQSKNGYAGYIDGGASQEEFYKFIKPILEKMDGTEELLVKLNREDLLRKQRTFDNGSIPHQIHLGELHAILRRQEDFYPFLKDNREKIEKILTFRIPYYVGPLARGNSRFAWMTRKSEETITPWNFEEVVDKGASAQSFIERMTNFDKNLPNEKVLPKHSLLYEYFTVYNELTKVKYVTEGMRKPAFLSGEQKKAIVDLLFKTNRKVTVKQLKEDYFKKIECFDSVEISGVEDRFNASLGTYHDLLKIIKDKDFLDNEENEDILEDIVLTLTLFEDREMIEERLKTYAHLFDDKVMKQLKRRRYTGWGRLSRKLINGIRDKQSGKTILDFLKSDGFANRNFMQLIHDDSLTFKEDIQKAQVSGQGDSLHEHIANLAGSPAIKKGILQTVKVVDELVKVMGRHKPENIVIEMARENQTTQKGQKNSRERMKRIEEGIKELGSQILKEHPVENTQLQNEKLYLYYLQNGRDMYVDQELDINRLSDYDVDHIVPQSFLKDDSIDNKVLTRSDKARGKSDNVPSEEVVKKMKNYWRQLLNAKLITQRKFDNLTKAERGGLSELDKAGFIKRQLVETRQITKHVAQILDSRMNTKYDENDKLIREVKVITLKSKLVSDFRKDFQFYKVREINNYHHAHDAYLNAVVGTALIKKYPKLESEFVYGDYKVYDVRKMIAKSEQEIGKATAKYFFYSNIMNFFKTEITLANGEIRKRPLIETNGETGEIVWDKGRDFATVRKVLSMPQVNIVKKTEVQTGGFSKESILPKRNSDKLIARKKDWDPKKYGGFDSPTVAYSVLVVAKVEKGKSKKLKSVKELLGITIMERSSFEKNPIDFLEAKGYKEVKKDLIIKLPKYSLFELENGRKRMLASAGELQKGNELALPSKYVNFLYLASHYEKLKGSPEDNEQKQLFVEQHKHYLDEIIEQISEFSKRVILADANLDKVLSAYNKHRDKPIREQAENIIHLFTLTNLGAPAAFKYFDTTIDRKRYTSTKEVLDATLIHQSITGLYETRIDLSQLGGDGGGGSGSSGGTVSLQDEHRLFDIPVTTSLPDVWLQDFPQAWAETGGLGRAKCQAPIIIDLKPTAVPVSIKQYPMSLEAHMGIRQHIIKFLELGVLRPCRSPWNTPLLPVKKPGTQDYRPVQDLREINKRTVDIHPTVPNPYNLLSTLKPDYSWYTVLDLKDAFFCLPLAPQSQELFAFEWKDPERGISGQLTWTRLPQGFKNSPTLFNEALHRDLTDFRTQHPEVTLLQYVDDLLLAAPTKKACTQGTRHLLQELGEKGYRASAKKAQICQTKVTYLGYILSEGKRWLTPGRIETVARIPPPRNPREVREFLGKAGFCRLFIPGFAELAAPLYALTKPSTPFTWQTEHQLAFEALKKALLSAPALGLPDTSKPFTLFLDERQGIAKGVLTQKLGPWKRPVAYLSKKLDPVAAGWPPCLRIMAATAMLVKDSAKLTLGQPLTVITPHTLEAIVRQPPDRWITNARLTHYQALLLDTDRVQFGPPVTLNPATLLPVPENQPSPHDCRQVLAETHGTREDLKDQELPDADHTWYTDGSSYLDSGTRRAGAAVVDGHNTIWAQSLPPGTSAQKAELIALTKALELSKGKKANIYTDSRYAFATAHTHGSIYERRGWLTSEGKEIKNKAEIIALLKALFLPQEVAIIHCPGHQKGQDPVAVGNRQADRVARQAAMAEVLTLATEPDNTSHITAGKRTADGSEFEKRTADGSEFESPKKKAKVE

SEQ ID NO: 2032 - protein, 2097 aa, synthetic construct
MPAAKRVKLDGGDKKYSIGLDIGTNSVGWAVITDEYKVPSKKFKVLGNTDRHSIKKNLIGALLFDSGETAEATRLKRTARRRYTRRKNRICYLQEIFSNEMAKVDDSFFHRLEESFLVEEDKKHERHPIFGNIVDEVAYHEKYPTIYHLRKKLVDSTDKADLRLIYLALAHMIKFRGHFLIEGDLNPDNSDVDKLFIQLVQTYNQLFEENPINASGVDAKAILSARLSKSRRLENLIAQLPGEKKNGLFGNLIALSLGLTPNFKSNFDLAEDAKLQLSKDTYDDDLDNLLAQIGDQYADLFLAAKNLSDAILLSDILRVNTEITKAPLSASMIKRYDEHHQDLTLLKALVRQQLPEKYKEIFFDQSKNGYAGYIDGGASQEEFYKFIKPILEKMDGTEELLVKLNREDLLRKQRTFDNGSIPHQIHLGELHAILRRQEDFYPFLKDNREKIEKILTFRIPYYVGPLARGNSRFAWMTRKSEETITPWNFEEVVDKGASAQSFIERMTNFDKNLPNEKVLPKHSLLYEYFTVYNELTKVKYVTEGMRKPAFLSGEQKKAIVDLLFKTNRKVTVKQLKEDYFKKIECFDSVEISGVEDRFNASLGTYHDLLKIIKDKDFLDNEENEDILEDIVLTLTLFEDREMIEERLKTYAHLFDDKVMKQLKRRRYTGWGRLSRKLINGIRDKQSGKTILDFLKSDGFANRNFMQLIHDDSLTFKEDIQKAQVSGQGDSLHEHIANLAGSPAIKKGILQTVKVVDELVKVMGRHKPENIVIEMARENQTTQKGQKNSRERMKRIEEGIKELGSQILKEHPVENTQLQNEKLYLYYLQNGRDMYVDQELDINRLSDYDVDHIVPQSFLKDDSIDNKVLTRSDKARGKSDNVPSEEVVKKMKNYWRQLLNAKLITQRKFDNLTKAERGGLSELDKAGFIKRQLVETRQITKHVAQILDSRMNTKYDENDKLIREVKVITLKSKLVSDFRKDFQFYKVREINNYHHAHDAYLNAVVGTALIKKYPKLESEFVYGDYKVYDVRKMIAKSEQEIGKATAKYFFYSNIMNFFKTEITLANGEIRKRPLIETNGETGEIVWDKGRDFATVRKVLSMPQVNIVKKTEVQTGGFSKESILPKRNSDKLIARKKDWDPKKYGGFDSPTVAYSVLVVAKVEKGKSKKLKSVKELLGITIMERSSFEKNPIDFLEAKGYKEVKKDLIIKLPKYSLFELENGRKRMLASAGELQKGNELALPSKYVNFLYLASHYEKLKGSPEDNEQKQLFVEQHKHYLDEIIEQISEFSKRVILADANLDKVLSAYNKHRDKPIREQAENIIHLFTLTNLGAPAAFKYFDTTIDRKRYTSTKEVLDATLIHQSITGLYETRIDLSQLGGDGGPAPGGSGGTVSLQDEHRLFDIPVTTSLPDVWLQDFPQAWAETGGLGRAKCQAPIIIDLKPTAVPVSIKQYPMSLEAHMGIRQHIIKFLELGVLRPCRSPWNTPLLPVKKPGTQDYRPVQDLREINKRTVDIHPTVPNPYNLLSTLKPDYSWYTVLDLKDAFFCLPLAPQSQELFAFEWKDPERGISGQLTWTRLPQGFKNSPTLFNEALHRDLTDFRTQHPEVTLLQYVDDLLLAAPTKKACTQGTRHLLQELGEKGYRASAKKAQICQTKVTYLGYILSEGKRWLTPGRIETVARIPPPRNPREVREFLGKAGFCRLFIPGFAELAAPLYALTKPSTPFTWQTEHQLAFEALKKALLSAPALGLPDTSKPFTLFLDERQGIAKGVLTQKLGPWKRPVAYLSKKLDPVAAGWPPCLRIMAATAMLVKDSAKLTLGQPLTVITPHTLEAIVRQPPDRWITNARLTHYQALLLDTDRVQFGPPVTLNPATLLPVPENQPSPHDCRQVLAETHGTREDLKDQELPDADHTWYTDGSSYLDSGTRRAGAAVVDGHNTIWAQSLPPGTSAQKAELIALTKALELSKGKKANIYTDSRYAFATAHTHGSIYERRGWLTSEGKEIKNKAEIIALLKALFLPQEVAIIHCPGHQKGQDPVAVGNRQADRVARQAAMAEVLTLATEPDNTSHITAGKRTADGSEFEKRTADGSEFESPKKKAKVE

SEQ ID NO: 2033 - protein, 2094 aa, synthetic construct
MPAAKRVKLDGGDKKYSIGLDIGTNSVGWAVITDEYKVPSKKFKVLGNTDRHSIKKNLIGALLFDSGETAEATRLKRTARRRYTRRKNRICYLQEIFSNEMAKVDDSFFHRLEESFLVEEDKKHERHPIFGNIVDEVAYHEKYPTIYHLRKKLVDSTDKADLRLIYLALAHMIKFRGHFLIEGDLNPDNSDVDKLFIQLVQTYNQLFEENPINASGVDAKAILSARLSKSRRLENLIAQLPGEKKNGLFGNLIALSLGLTPNFKSNFDLAEDAKLQLSKDTYDDDLDNLLAQIGDQYADLFLAAKNLSDAILLSDILRVNTEITKAPLSASMIKRYDEHHQDLTLLKALVRQQLPEKYKEIFFDQSKNGYAGYIDGGASQEEFYKFIKPILEKMDGTEELLVKLNREDLLRKQRTFDNGSIPHQIHLGELHAILRRQEDFYPFLKDNREKIEKILTFRIPYYVGPLARGNSRFAWMTRKSEETITPWNFEEVVDKGASAQSFIERMTNFDKNLPNEKVLPKHSLLYEYFTVYNELTKVKYVTEGMRKPAFLSGEQKKAIVDLLFKTNRKVTVKQLKEDYFKKIECFDSVEISGVEDRFNASLGTYHDLLKIIKDKDFLDNEENEDILEDIVLTLTLFEDREMIEERLKTYAHLFDDKVMKQLKRRRYTGWGRLSRKLINGIRDKQSGKTILDFLKSDGFANRNFMQLIHDDSLTFKEDIQKAQVSGQGDSLHEHIANLAGSPAIKKGILQTVKVVDELVKVMGRHKPENIVIEMARENQTTQKGQKNSRERMKRIEEGIKELGSQILKEHPVENTQLQNEKLYLYYLQNGRDMYVDQELDINRLSDYDVDHIVPQSFLKDDSIDNKVLTRSDKARGKSDNVPSEEVVKKMKNYWRQLLNAKLITQRKFDNLTKAERGGLSELDKAGFIKRQLVETRQITKHVAQILDSRMNTKYDENDKLIREVKVITLKSKLVSDFRKDFQFYKVREINNYHHAHDAYLNAVVGTALIKKYPKLESEFVYGDYKVYDVRKMIAKSEQEIGKATAKYFFYSNIMNFFKTEITLANGEIRKRPLIETNGETGEIVWDKGRDFATVRKVLSMPQVNIVKKTEVQTGGFSKESILPKRNSDKLIARKKDWDPKKYGGFDSPTVAYSVLVVAKVEKGKSKKLKSVKELLGITIMERSSFEKNPIDFLEAKGYKEVKKDLIIKLPKYSLFELENGRKRMLASAGELQKGNELALPSKYVNFLYLASHYEKLKGSPEDNEQKQLFVEQHKHYLDEIIEQISEFSKRVILADANLDKVLSAYNKHRDKPIREQAENIIHLFTLTNLGAPAAFKYFDTTIDRKRYTSTKEVLDATLIHQSITGLYETRIDLSQLGGDGGGSSGGTVSLQDEHRLFDIPVTTSLPDVWLQDFPQAWAETGGLGRAKCQAPIIIDLKPTAVPVSIKQYPMSLEAHMGIRQHIIKFLELGVLRPCRSPWNTPLLPVKKPGTQDYRPVQDLREINKRTVDIHPTVPNPYNLLSTLKPDYSWYTVLDLKDAFFCLPLAPQSQELFAFEWKDPERGISGQLTWTRLPQGFKNSPTLFNEALHRDLTDFRTQHPEVTLLQYVDDLLLAAPTKKACTQGTRHLLQELGEKGYRASAKKAQICQTKVTYLGYILSEGKRWLTPGRIETVARIPPPRNPREVREFLGKAGFCRLFIPGFAELAAPLYALTKPSTPFTWQTEHQLAFEALKKALLSAPALGLPDTSKPFTLFLDERQGIAKGVLTQKLGPWKRPVAYLSKKLDPVAAGWPPCLRIMAATAMLVKDSAKLTLGQPLTVITPHTLEAIVRQPPDRWITNARLTHYQALLLDTDRVQFGPPVTLNPATLLPVPENQPSPHDCRQVLAETHGTREDLKDQELPDADHTWYTDGSSYLDSGTRRAGAAVVDGHNTIWAQSLPPGTSAQKAELIALTKALELSKGKKANIYTDSRYAFATAHTHGSIYERRGWLTSEGKEIKNKAEIIALLKALFLPQEVAIIHCPGHQKGQDPVAVGNRQADRVARQAAMAEVLTLATEPDNTSHITAGKRTADGSEFEKRTADGSEFESPKKKAKVE

SEQ ID NO: 2034 - protein, 2100 aa, synthetic construct
MPAAKRVKLDGGDKKYSIGLDIGTNSVGWAVITDEYKVPSKKFKVLGNTDRHSIKKNLIGALLFDSGETAEATRLKRTARRRYTRRKNRICYLQEIFSNEMAKVDDSFFHRLEESFLVEEDKKHERHPIFGNIVDEVAYHEKYPTIYHLRKKLVDSTDKADLRLIYLALAHMIKFRGHFLIEGDLNPDNSDVDKLFIQLVQTYNQLFEENPINASGVDAKAILSARLSKSRRLENLIAQLPGEKKNGLFGNLIALSLGLTPNFKSNFDLAEDAKLQLSKDTYDDDLDNLLAQIGDQYADLFLAAKNLSDAILLSDILRVNTEITKAPLSASMIKRYDEHHQDLTLLKALVRQQLPEKYKEIFFDQSKNGYAGYIDGGASQEEFYKFIKPILEKMDGTEELLVKLNREDLLRKQRTFDNGSIPHQIHLGELHAILRRQEDFYPFLKDNREKIEKILTFRIPYYVGPLARGNSRFAWMTRKSEETITPWNFEEVVDKGASAQSFIERMTNFDKNLPNEKVLPKHSLLYEYFTVYNELTKVKYVTEGMRKPAFLSGEQKKAIVDLLFKTNRKVTVKQLKEDYFKKIECFDSVEISGVEDRFNASLGTYHDLLKIIKDKDFLDNEENEDILEDIVLTLTLFEDREMIEERLKTYAHLFDDKVMKQLKRRRYTGWGRLSRKLINGIRDKQSGKTILDFLKSDGFANRNFMQLIHDDSLTFKEDIQKAQVSGQGDSLHEHIANLAGSPAIKKGILQTVKVVDELVKVMGRHKPENIVIEMARENQTTQKGQKNSRERMKRIEEGIKELGSQILKEHPVENTQLQNEKLYLYYLQNGRDMYVDQELDINRLSDYDVDHIVPQSFLKDDSIDNKVLTRSDKARGKSDNVPSEEVVKKMKNYWRQLLNAKLITQRKFDNLTKAERGGLSELDKAGFIKRQLVETRQITKHVAQILDSRMNTKYDENDKLIREVKVITLKSKLVSDFRKDFQFYKVREINNYHHAHDAYLNAVVGTALIKKYPKLESEFVYGDYKVYDVRKMIAKSEQEIGKATAKYFFYSNIMNFFKTEITLANGEIRKRPLIETNGETGEIVWDKGRDFATVRKVLSMPQVNIVKKTEVQTGGFSKESILPKRNSDKLIARKKDWDPKKYGGFDSPTVAYSVLVVAKVEKGKSKKLKSVKELLGITIMERSSFEKNPIDFLEAKGYKEVKKDLIIKLPKYSLFELENGRKRMLASAGELQKGNELALPSKYVNFLYLASHYEKLKGSPEDNEQKQLFVEQHKHYLDEIIEQISEFSKRVILADANLDKVLSAYNKHRDKPIREQAENIIHLFTLTNLGAPAAFKYFDTTIDRKRYTSTKEVLDATLIHQSITGLYETRIDLSQLGGDGGGGGGGSPAPGGTVSLQDEHRLFDIPVTTSLPDVWLQDFPQAWAETGGLGRAKCQAPIIIDLKPTAVPVSIKQYPMSLEAHMGIRQHIIKFLELGVLRPCRSPWNTPLLPVKKPGTQDYRPVQDLREINKRTVDIHPTVPNPYNLLSTLKPDYSWYTVLDLKDAFFCLPLAPQSQELFAFEWKDPERGISGQLTWTRLPQGFKNSPTLFNEALHRDLTDFRTQHPEVTLLQYVDDLLLAAPTKKACTQGTRHLLQELGEKGYRASAKKAQICQTKVTYLGYILSEGKRWLTPGRIETVARIPPPRNPREVREFLGKAGFCRLFIPGFAELAAPLYALTKPSTPFTWQTEHQLAFEALKKALLSAPALGLPDTSKPFTLFLDERQGIAKGVLTQKLGPWKRPVAYLSKKLDPVAAGWPPCLRIMAATAMLVKDSAKLTLGQPLTVITPHTLEAIVRQPPDRWITNARLTHYQALLLDTDRVQFGPPVTLNPATLLPVPENQPSPHDCRQVLAETHGTREDLKDQELPDADHTWYTDGSSYLDSGTRRAGAAVVDGHNTIWAQSLPPGTSAQKAELIALTKALELSKGKKANIYTDSRYAFATAHTHGSIYERRGWLTSEGKEIKNKAEIIALLKALFLPQEVAIIHCPGHQKGQDPVAVGNRQADRVARQAAMAEVLTLATEPDNTSHITAGKRTADGSEFEKRTADGSEFESPKKKAKVE

SEQ ID NO: 2035 - protein, 2109 aa, synthetic construct
MPAAKRVKLDGGDKKYSIGLDIGTNSVGWAVITDEYKVPSKKFKVLGNTDRHSIKKNLIGALLFDSGETAEATRLKRTARRRYTRRKNRICYLQEIFSNEMAKVDDSFFHRLEESFLVEEDKKHERHPIFGNIVDEVAYHEKYPTIYHLRKKLVDSTDKADLRLIYLALAHMIKFRGHFLIEGDLNPDNSDVDKLFIQLVQTYNQLFEENPINASGVDAKAILSARLSKSRRLENLIAQLPGEKKNGLFGNLIALSLGLTPNFKSNFDLAEDAKLQLSKDTYDDDLDNLLAQIGDQYADLFLAAKNLSDAILLSDILRVNTEITKAPLSASMIKRYDEHHQDLTLLKALVRQQLPEKYKEIFFDQSKNGYAGYIDGGASQEEFYKFIKPILEKMDGTEELLVKLNREDLLRKQRTFDNGSIPHQIHLGELHAILRRQEDFYPFLKDNREKIEKILTFRIPYYVGPLARGNSRFAWMTRKSEETITPWNFEEVVDKGASAQSFIERMTNFDKNLPNEKVLPKHSLLYEYFTVYNELTKVKYVTEGMRKPAFLSGEQKKAIVDLLFKTNRKVTVKQLKEDYFKKIECFDSVEISGVEDRFNASLGTYHDLLKIIKDKDFLDNEENEDILEDIVLTLTLFEDREMIEERLKTYAHLFDDKVMKQLKRRRYTGWGRLSRKLINGIRDKQSGKTILDFLKSDGFANRNFMQLIHDDSLTFKEDIQKAQVSGQGDSLHEHIANLAGSPAIKKGILQTVKVVDELVKVMGRHKPENIVIEMARENQTTQKGQKNSRERMKRIEEGIKELGSQILKEHPVENTQLQNEKLYLYYLQNGRDMYVDQELDINRLSDYDVDHIVPQSFLKDDSIDNKVLTRSDKARGKSDNVPSEEVVKKMKNYWRQLLNAKLITQRKFDNLTKAERGGLSELDKAGFIKRQLVETRQITKHVAQILDSRMNTKYDENDKLIREVKVITLKSKLVSDFRKDFQFYKVREINNYHHAHDAYLNAVVGTALIKKYPKLESEFVYGDYKVYDVRKMIAKSEQEIGKATAKYFFYSNIMNFFKTEITLANGEIRKRPLIETNGETGEIVWDKGRDFATVRKVLSMPQVNIVKKTEVQTGGFSKESILPKRNSDKLIARKKDWDPKKYGGFDSPTVAYSVLVVAKVEKGKSKKLKSVKELLGITIMERSSFEKNPIDFLEAKGYKEVKKDLIIKLPKYSLFELENGRKRMLASAGELQKGNELALPSKYVNFLYLASHYEKLKGSPEDNEQKQLFVEQHKHYLDEIIEQISEFSKRVILADANLDKVLSAYNKHRDKPIREQAENIIHLFTLTNLGAPAAFKYFDTTIDRKRYTSTKEVLDATLIHQSITGLYETRIDLSQLGGDGGGSSGSSGSSGSSGSSGSSGGTVSLQDEHRLFDIPVTTSLPDVWLQDFPQAWAETGGLGRAKCQAPIIIDLKPTAVPVSIKQYPMSLEAHMGIRQHIIKFLELGVLRPCRSPWNTPLLPVKKPGTQDYRPVQDLREINKRTVDIHPTVPNPYNLLSTLKPDYSWYTVLDLKDAFFCLPLAPQSQELFAFEWKDPERGISGQLTWTRLPQGFKNSPTLFNEALHRDLTDFRTQHPEVTLLQYVDDLLLAAPTKKACTQGTRHLLQELGEKGYRASAKKAQICQTKVTYLGYILSEGKRWLTPGRIETVARIPPPRNPREVREFLGKAGFCRLFIPGFAELAAPLYALTKPSTPFTWQTEHQLAFEALKKALLSAPALGLPDTSKPFTLFLDERQGIAKGVLTQKLGPWKRPVAYLSKKLDPVAAGWPPCLRIMAATAMLVKDSAKLTLGQPLTVITPHTLEAIVRQPPDRWITNARLTHYQALLLDTDRVQFGPPVTLNPATLLPVPENQPSPHDCRQVLAETHGTREDLKDQELPDADHTWYTDGSSYLDSGTRRAGAAVVDGHNTIWAQSLPPGTSAQKAELIALTKALELSKGKKANIYTDSRYAFATAHTHGSIYERRGWLTSEGKEIKNKAEIIALLKALFLPQEVAIIHCPGHQKGQDPVAVGNRQADRVARQAAMAEVLTLATEPDNTSHITAGKRTADGSEFEKRTADGSEFESPKKKAKVE

SEQ ID NO: 2036 - protein, 2097 aa, synthetic construct
MPAAKRVKLDGGDKKYSIGLDIGTNSVGWAVITDEYKVPSKKFKVLGNTDRHSIKKNLIGALLFDSGETAEATRLKRTARRRYTRRKNRICYLQEIFSNEMAKVDDSFFHRLEESFLVEEDKKHERHPIFGNIVDEVAYHEKYPTIYHLRKKLVDSTDKADLRLIYLALAHMIKFRGHFLIEGDLNPDNSDVDKLFIQLVQTYNQLFEENPINASGVDAKAILSARLSKSRRLENLIAQLPGEKKNGLFGNLIALSLGLTPNFKSNFDLAEDAKLQLSKDTYDDDLDNLLAQIGDQYADLFLAAKNLSDAILLSDILRVNTEITKAPLSASMIKRYDEHHQDLTLLKALVRQQLPEKYKEIFFDQSKNGYAGYIDGGASQEEFYKFIKPILEKMDGTEELLVKLNREDLLRKQRTFDNGSIPHQIHLGELHAILRRQEDFYPFLKDNREKIEKILTFRIPYYVGPLARGNSRFAWMTRKSEETITPWNFEEVVDKGASAQSFIERMTNFDKNLPNEKVLPKHSLLYEYFTVYNELTKVKYVTEGMRKPAFLSGEQKKAIVDLLFKTNRKVTVKQLKEDYFKKIECFDSVEISGVEDRFNASLGTYHDLLKIIKDKDFLDNEENEDILEDIVLTLTLFEDREMIEERLKTYAHLFDDKVMKQLKRRRYTGWGRLSRKLINGIRDKQSGKTILDFLKSDGFANRNFMQLIHDDSLTFKEDIQKAQVSGQGDSLHEHIANLAGSPAIKKGILQTVKVVDELVKVMGRHKPENIVIEMARENQTTQKGQKNSRERMKRIEEGIKELGSQILKEHPVENTQLQNEKLYLYYLQNGRDMYVDQELDINRLSDYDVDHIVPQSFLKDDSIDNKVLTRSDKARGKSDNVPSEEVVKKMKNYWRQLLNAKLITQRKFDNLTKAERGGLSELDKAGFIKRQLVETRQITKHVAQILDSRMNTKYDENDKLIREVKVITLKSKLVSDFRKDFQFYKVREINNYHHAHDAYLNAVVGTALIKKYPKLESEFVYGDYKVYDVRKMIAKSEQEIGKATAKYFFYSNIMNFFKTEITLANGEIRKRPLIETNGETGEIVWDKGRDFATVRKVLSMPQVNIVKKTEVQTGGFSKESILPKRNSDKLIARKKDWDPKKYGGFDSPTVAYSVLVVAKVEKGKSKKLKSVKELLGITIMERSSFEKNPIDFLEAKGYKEVKKDLIIKLPKYSLFELENGRKRMLASAGELQKGNELALPSKYVNFLYLASHYEKLKGSPEDNEQKQLFVEQHKHYLDEIIEQISEFSKRVILADANLDKVLSAYNKHRDKPIREQAENIIHLFTLTNLGAPAAFKYFDTTIDRKRYTSTKEVLDATLIHQSITGLYETRIDLSQLGGDGGPAPGSSGGTVSLQDEHRLFDIPVTTSLPDVWLQDFPQAWAETGGLGRAKCQAPIIIDLKPTAVPVSIKQYPMSLEAHMGIRQHIIKFLELGVLRPCRSPWNTPLLPVKKPGTQDYRPVQDLREINKRTVDIHPTVPNPYNLLSTLKPDYSWYTVLDLKDAFFCLPLAPQSQELFAFEWKDPERGISGQLTWTRLPQGFKNSPTLFNEALHRDLTDFRTQHPEVTLLQYVDDLLLAAPTKKACTQGTRHLLQELGEKGYRASAKKAQICQTKVTYLGYILSEGKRWLTPGRIETVARIPPPRNPREVREFLGKAGFCRLFIPGFAELAAPLYALTKPSTPFTWQTEHQLAFEALKKALLSAPALGLPDTSKPFTLFLDERQGIAKGVLTQKLGPWKRPVAYLSKKLDPVAAGWPPCLRIMAATAMLVKDSAKLTLGQPLTVITPHTLEAIVRQPPDRWITNARLTHYQALLLDTDRVQFGPPVTLNPATLLPVPENQPSPHDCRQVLAETHGTREDLKDQELPDADHTWYTDGSSYLDSGTRRAGAAVVDGHNTIWAQSLPPGTSAQKAELIALTKALELSKGKKANIYTDSRYAFATAHTHGSIYERRGWLTSEGKEIKNKAEIIALLKALFLPQEVAIIHCPGHQKGQDPVAVGNRQADRVARQAAMAEVLTLATEPDNTSHITAGKRTADGSEFEKRTADGSEFESPKKKAKVE

SEQ ID NO: 2037 - protein, 2102 aa, synthetic construct
MPAAKRVKLDGGDKKYSIGLDIGTNSVGWAVITDEYKVPSKKFKVLGNTDRHSIKKNLIGALLFDSGETAEATRLKRTARRRYTRRKNRICYLQEIFSNEMAKVDDSFFHRLEESFLVEEDKKHERHPIFGNIVDEVAYHEKYPTIYHLRKKLVDSTDKADLRLIYLALAHMIKFRGHFLIEGDLNPDNSDVDKLFIQLVQTYNQLFEENPINASGVDAKAILSARLSKSRRLENLIAQLPGEKKNGLFGNLIALSLGLTPNFKSNFDLAEDAKLQLSKDTYDDDLDNLLAQIGDQYADLFLAAKNLSDAILLSDILRVNTEITKAPLSASMIKRYDEHHQDLTLLKALVRQQLPEKYKEIFFDQSKNGYAGYIDGGASQEEFYKFIKPILEKMDGTEELLVKLNREDLLRKQRTFDNGSIPHQIHLGELHAILRRQEDFYPFLKDNREKIEKILTFRIPYYVGPLARGNSRFAWMTRKSEETITPWNFEEVVDKGASAQSFIERMTNFDKNLPNEKVLPKHSLLYEYFTVYNELTKVKYVTEGMRKPAFLSGEQKKAIVDLLFKTNRKVTVKQLKEDYFKKIECFDSVEISGVEDRFNASLGTYHDLLKIIKDKDFLDNEENEDILEDIVLTLTLFEDREMIEERLKTYAHLFDDKVMKQLKRRRYTGWGRLSRKLINGIRDKQSGKTILDFLKSDGFANRNFMQLIHDDSLTFKEDIQKAQVSGQGDSLHEHIANLAGSPAIKKGILQTVKVVDELVKVMGRHKPENIVIEMARENQTTQKGQKNSRERMKRIEEGIKELGSQILKEHPVENTQLQNEKLYLYYLQNGRDMYVDQELDINRLSDYDVDHIVPQSFLKDDSIDNKVLTRSDKARGKSDNVPSEEVVKKMKNYWRQLLNAKLITQRKFDNLTKAERGGLSELDKAGFIKRQLVETRQITKHVAQILDSRMNTKYDENDKLIREVKVITLKSKLVSDFRKDFQFYKVREINNYHHAHDAYLNAVVGTALIKKYPKLESEFVYGDYKVYDVRKMIAKSEQEIGKATAKYFFYSNIMNFFKTEITLANGEIRKRPLIETNGETGEIVWDKGRDFATVRKVLSMPQVNIVKKTEVQTGGFSKESILPKRNSDKLIARKKDWDPKKYGGFDSPTVAYSVLVVAKVEKGKSKKLKSVKELLGITIMERSSFEKNPIDFLEAKGYKEVKKDLIIKLPKYSLFELENGRKRMLASAGELQKGNELALPSKYVNFLYLASHYEKLKGSPEDNEQKQLFVEQHKHYLDEIIEQISEFSKRVILADANLDKVLSAYNKHRDKPIREQAENIIHLFTLTNLGAPAAFKYFDTTIDRKRYTSTKEVLDATLIHQSITGLYETRIDLSQLGGDGGGSSEAAAKPAPGGTVSLQDEHRLFDIPVTTSLPDVWLQDFPQAWAETGGLGRAKCQAPIIIDLKPTAVPVSIKQYPMSLEAHMGIRQHIIKFLELGVLRPCRSPWNTPLLPVKKPGTQDYRPVQDLREINKRTVDIHPTVPNPYNLLSTLKPDYSWYTVLDLKDAFFCLPLAPQSQELFAFEWKDPERGISGQLTWTRLPQGFKNSPTLFNEALHRDLTDFRTQHPEVTLLQYVDDLLLAAPTKKACTQGTRHLLQELGEKGYRASAKKAQICQTKVTYLGYILSEGKRWLTPGRIETVARIPPPRNPREVREFLGKAGFCRLFIPGFAELAAPLYALTKPSTPFTWQTEHQLAFEALKKALLSAPALGLPDTSKPFTLFLDERQGIAKGVLTQKLGPWKRPVAYLSKKLDPVAAGWPPCLRIMAATAMLVKDSAKLTLGQPLTVITPHTLEAIVRQPPDRWITNARLTHYQALLLDTDRVQFGPPVTLNPATLLPVPENQPSPHDCRQVLAETHGTREDLKDQELPDADHTWYTDGSSYLDSGTRRAGAAVVDGHNTIWAQSLPPGTSAQKAELIALTKALELSKGKKANIYTDSRYAFATAHTHGSIYERRGWLTSEGKEIKNKAEIIALLKALFLPQEVAIIHCPGHQKGQDPVAVGNRQADRVARQAAMAEVLTLATEPDNTSHITAGKRTADGSEFEKRTADGSEFESPKKKAKVE

SEQ ID NO: 2038 - protein, 2100 aa, synthetic construct
MPAAKRVKLDGGDKKYSIGLDIGTNSVGWAVITDEYKVPSKKFKVLGNTDRHSIKKNLIGALLFDSGETAEATRLKRTARRRYTRRKNRICYLQEIFSNEMAKVDDSFFHRLEESFLVEEDKKHERHPIFGNIVDEVAYHEKYPTIYHLRKKLVDSTDKADLRLIYLALAHMIKFRGHFLIEGDLNPDNSDVDKLFIQLVQTYNQLFEENPINASGVDAKAILSARLSKSRRLENLIAQLPGEKKNGLFGNLIALSLGLTPNFKSNFDLAEDAKLQLSKDTYDDDLDNLLAQIGDQYADLFLAAKNLSDAILLSDILRVNTEITKAPLSASMIKRYDEHHQDLTLLKALVRQQLPEKYKEIFFDQSKNGYAGYIDGGASQEEFYKFIKPILEKMDGTEELLVKLNREDLLRKQRTFDNGSIPHQIHLGELHAILRRQEDFYPFLKDNREKIEKILTFRIPYYVGPLARGNSRFAWMTRKSEETITPWNFEEVVDKGASAQSFIERMTNFDKNLPNEKVLPKHSLLYEYFTVYNELTKVKYVTEGMRKPAFLSGEQKKAIVDLLFKTNRKVTVKQLKEDYFKKIECFDSVEISGVEDRFNASLGTYHDLLKIIKDKDFLDNEENEDILEDIVLTLTLFEDREMIEERLKTYAHLFDDKVMKQLKRRRYTGWGRLSRKLINGIRDKQSGKTILDFLKSDGFANRNFMQLIHDDSLTFKEDIQKAQVSGQGDSLHEHIANLAGSPAIKKGILQTVKVVDELVKVMGRHKPENIVIEMARENQTTQKGQKNSRERMKRIEEGIKELGSQILKEHPVENTQLQNEKLYLYYLQNGRDMYVDQELDINRLSDYDVDHIVPQSFLKDDSIDNKVLTRSDKARGKSDNVPSEEVVKKMKNYWRQLLNAKLITQRKFDNLTKAERGGLSELDKAGFIKRQLVETRQITKHVAQILDSRMNTKYDENDKLIREVKVITLKSKLVSDFRKDFQFYKVREINNYHHAHDAYLNAVVGTALIKKYPKLESEFVYGDYKVYDVRKMIAKSEQEIGKATAKYFFYSNIMNFFKTEITLANGEIRKRPLIETNGETGEIVWDKGRDFATVRKVLSMPQVNIVKKTEVQTGGFSKESILPKRNSDKLIARKKDWDPKKYGGFDSPTVAYSVLVVAKVEKGKSKKLKSVKELLGITIMERSSFEKNPIDFLEAKGYKEVKKDLIIKLPKYSLFELENGRKRMLASAGELQKGNELALPSKYVNFLYLASHYEKLKGSPEDNEQKQLFVEQHKHYLDEIIEQISEFSKRVILADANLDKVLSAYNKHRDKPIREQAENIIHLFTLTNLGAPAAFKYFDTTIDRKRYTSTKEVLDATLIHQSITGLYETRIDLSQLGGDGGGGSGGGGSSGGTVSLQDEHRLFDIPVTTSLPDVWLQDFPQAWAETGGLGRAKCQAPIIIDLKPTAVPVSIKQYPMSLEAHMGIRQHIIKFLELGVLRPCRSPWNTPLLPVKKPGTQDYRPVQDLREINKRTVDIHPTVPNPYNLLSTLKPDYSWYTVLDLKDAFFCLPLAPQSQELFAFEWKDPERGISGQLTWTRLPQGFKNSPTLFNEALHRDLTDFRTQHPEVTLLQYVDDLLLAAPTKKACTQGTRHLLQELGEKGYRASAKKAQICQTKVTYLGYILSEGKRWLTPGRIETVARIPPPRNPREVREFLGKAGFCRLFIPGFAELAAPLYALTKPSTPFTWQTEHQLAFEALKKALLSAPALGLPDTSKPFTLFLDERQGIAKGVLTQKLGPWKRPVAYLSKKLDPVAAGWPPCLRIMAATAMLVKDSAKLTLGQPLTVITPHTLEAIVRQPPDRWITNARLTHYQALLLDTDRVQFGPPVTLNPATLLPVPENQPSPHDCRQVLAETHGTREDLKDQELPDADHTWYTDGSSYLDSGTRRAGAAVVDGHNTIWAQSLPPGTSAQKAELIALTKALELSKGKKANIYTDSRYAFATAHTHGSIYERRGWLTSEGKEIKNKAEIIALLKALFLPQEVAIIHCPGHQKGQDPVAVGNRQADRVARQAAMAEVLTLATEPDNTSHITAGKRTADGSEFEKRTADGSEFESPKKKAKVE

SEQ ID NO: 2039 - protein, 2102 aa, synthetic construct
MPAAKRVKLDGGDKKYSIGLDIGTNSVGWAVITDEYKVPSKKFKVLGNTDRHSIKKNLIGALLFDSGETAEATRLKRTARRRYTRRKNRICYLQEIFSNEMAKVDDSFFHRLEESFLVEEDKKHERHPIFGNIVDEVAYHEKYPTIYHLRKKLVDSTDKADLRLIYLALAHMIKFRGHFLIEGDLNPDNSDVDKLFIQLVQTYNQLFEENPINASGVDAKAILSARLSKSRRLENLIAQLPGEKKNGLFGNLIALSLGLTPNFKSNFDLAEDAKLQLSKDTYDDDLDNLLAQIGDQYADLFLAAKNLSDAILLSDILRVNTEITKAPLSASMIKRYDEHHQDLTLLKALVRQQLPEKYKEIFFDQSKNGYAGYIDGGASQEEFYKFIKPILEKMDGTEELLVKLNREDLLRKQRTFDNGSIPHQIHLGELHAILRRQEDFYPFLKDNREKIEKILTFRIPYYVGPLARGNSRFAWMTRKSEETITPWNFEEVVDKGASAQSFIERMTNFDKNLPNEKVLPKHSLLYEYFTVYNELTKVKYVTEGMRKPAFLSGEQKKAIVDLLFKTNRKVTVKQLKEDYFKKIECFDSVEISGVEDRFNASLGTYHDLLKIIKDKDFLDNEENEDILEDIVLTLTLFEDREMIEERLKTYAHLFDDKVMKQLKRRRYTGWGRLSRKLINGIRDKQSGKTILDFLKSDGFANRNFMQLIHDDSLTFKEDIQKAQVSGQGDSLHEHIANLAGSPAIKKGILQTVKVVDELVKVMGRHKPENIVIEMARENQTTQKGQKNSRERMKRIEEGIKELGSQILKEHPVENTQLQNEKLYLYYLQNGRDMYVDQELDINRLSDYDVDHIVPQSFLKDDSIDNKVLTRSDKARGKSDNVPSEEVVKKMKNYWRQLLNAKLITQRKFDNLTKAERGGLSELDKAGFIKRQLVETRQITKHVAQILDSRMNTKYDENDKLIREVKVITLKSKLVSDFRKDFQFYKVREINNYHHAHDAYLNAVVGTALIKKYPKLESEFVYGDYKVYDVRKMIAKSEQEIGKATAKYFFYSNIMNFFKTEITLANGEIRKRPLIETNGETGEIVWDKGRDFATVRKVLSMPQVNIVKKTEVQTGGFSKESILPKRNSDKLIARKKDWDPKKYGGFDSPTVAYSVLVVAKVEKGKSKKLKSVKELLGITIMERSSFEKNPIDFLEAKGYKEVKKDLIIKLPKYSLFELENGRKRMLASAGELQKGNELALPSKYVNFLYLASHYEKLKGSPEDNEQKQLFVEQHKHYLDEIIEQISEFSKRVILADANLDKVLSAYNKHRDKPIREQAENIIHLFTLTNLGAPAAFKYFDTTIDRKRYTSTKEVLDATLIHQSITGLYETRIDLSQLGGDGGEAAAKGSSPAPGGTVSLQDEHRLFDIPVTTSLPDVWLQDFPQAWAETGGLGRAKCQAPIIIDLKPTAVPVSIKQYPMSLEAHMGIRQHIIKFLELGVLRPCRSPWNTPLLPVKKPGTQDYRPVQDLREINKRTVDIHPTVPNPYNLLSTLKPDYSWYTVLDLKDAFFCLPLAPQSQELFAFEWKDPERGISGQLTWTRLPQGFKNSPTLFNEALHRDLTDFRTQHPEVTLLQYVDDLLLAAPTKKACTQGTRHLLQELGEKGYRASAKKAQICQTKVTYLGYILSEGKRWLTPGRIETVARIPPPRNPREVREFLGKAGFCRLFIPGFAELAAPLYALTKPSTPFTWQTEHQLAFEALKKALLSAPALGLPDTSKPFTLFLDERQGIAKGVLTQKLGPWKRPVAYLSKKLDPVAAGWPPCLRIMAATAMLVKDSAKLTLGQPLTVITPHTLEAIVRQPPDRWITNARLTHYQALLLDTDRVQFGPPVTLNPATLLPVPENQPSPHDCRQVLAETHGTREDLKDQELPDADHTWYTDGSSYLDSGTRRAGAAVVDGHNTIWAQSLPPGTSAQKAELIALTKALELSKGKKANIYTDSRYAFATAHTHGSIYERRGWLTSEGKEIKNKAEIIALLKALFLPQEVAIIHCPGHQKGQDPVAVGNRQADRVARQAAMAEVLTLATEPDNTSHITAGKRTADGSEFEKRTADGSEFESPKKKAKVE

SEQ ID NO: 2040 - protein, 2102 aa, synthetic construct
MPAAKRVKLDGGDKKYSIGLDIGTNSVGWAVITDEYKVPSKKFKVLGNTDRHSIKKNLIGALLFDSGETAEATRLKRTARRRYTRRKNRICYLQEIFSNEMAKVDDSFFHRLEESFLVEEDKKHERHPIFGNIVDEVAYHEKYPTIYHLRKKLVDSTDKADLRLIYLALAHMIKFRGHFLIEGDLNPDNSDVDKLFIQLVQTYNQLFEENPINASGVDAKAILSARLSKSRRLENLIAQLPGEKKNGLFGNLIALSLGLTPNFKSNFDLAEDAKLQLSKDTYDDDLDNLLAQIGDQYADLFLAAKNLSDAILLSDILRVNTEITKAPLSASMIKRYDEHHQDLTLLKALVRQQLPEKYKEIFFDQSKNGYAGYIDGGASQEEFYKFIKPILEKMDGTEELLVKLNREDLLRKQRTFDNGSIPHQIHLGELHAILRRQEDFYPFLKDNREKIEKILTFRIPYYVGPLARGNSRFAWMTRKSEETITPWNFEEVVDKGASAQSFIERMTNFDKNLPNEKVLPKHSLLYEYFTVYNELTKVKYVTEGMRKPAFLSGEQKKAIVDLLFKTNRKVTVKQLKEDYFKKIECFDSVEISGVEDRFNASLGTYHDLLKIIKDKDFLDNEENEDILEDIVLTLTLFEDREMIEERLKTYAHLFDDKVMKQLKRRRYTGWGRLSRKLINGIRDKQSGKTILDFLKSDGFANRNFMQLIHDDSLTFKEDIQKAQVSGQGDSLHEHIANLAGSPAIKKGILQTVKVVDELVKVMGRHKPENIVIEMARENQTTQKGQKNSRERMKRIEEGIKELGSQILKEHPVENTQLQNEKLYLYYLQNGRDMYVDQELDINRLSDYDVDHIVPQSFLKDDSIDNKVLTRSDKARGKSDNVPSEEVVKKMKNYWRQLLNAKLITQRKFDNLTKAERGGLSELDKAGFIKRQLVETRQITKHVAQILDSRMNTKYDENDKLIREVKVITLKSKLVSDFRKDFQFYKVREINNYHHAHDAYLNAVVGTALIKKYPKLESEFVYGDYKVYDVRKMIAKSEQEIGKATAKYFFYSNIMNFFKTEITLANGEIRKRPLIETNGETGEIVWDKGRDFATVRKVLSMPQVNIVKKTEVQTGGFSKESILPKRNSDKLIARKKDWDPKKYGGFDSPTVAYSVLVVAKVEKGKSKKLKSVKELLGITIMERSSFEKNPIDFLEAKGYKEVKKDLIIKLPKYSLFELENGRKRMLASAGELQKGNELALPSKYVNFLYLASHYEKLKGSPEDNEQKQLFVEQHKHYLDEIIEQISEFSKRVILADANLDKVLSAYNKHRDKPIREQAENIIHLFTLTNLGAPAAFKYFDTTIDRKRYTSTKEVLDATLIHQSITGLYETRIDLSQLGGDGGPAPEAAAKGSSGGTVSLQDEHRLFDIPVTTSLPDVWLQDFPQAWAETGGLGRAKCQAPIIIDLKPTAVPVSIKQYPMSLEAHMGIRQHIIKFLELGVLRPCRSPWNTPLLPVKKPGTQDYRPVQDLREINKRTVDIHPTVPNPYNLLSTLKPDYSWYTVLDLKDAFFCLPLAPQSQELFAFEWKDPERGISGQLTWTRLPQGFKNSPTLFNEALHRDLTDFRTQHPEVTLLQYVDDLLLAAPTKKACTQGTRHLLQELGEKGYRASAKKAQICQTKVTYLGYILSEGKRWLTPGRIETVARIPPPRNPREVREFLGKAGFCRLFIPGFAELAAPLYALTKPSTPFTWQTEHQLAFEALKKALLSAPALGLPDTSKPFTLFLDERQGIAKGVLTQKLGPWKRPVAYLSKKLDPVAAGWPPCLRIMAATAMLVKDSAKLTLGQPLTVITPHTLEAIVRQPPDRWITNARLTHYQALLLDTDRVQFGPPVTLNPATLLPVPENQPSPHDCRQVLAETHGTREDLKDQELPDADHTWYTDGSSYLDSGTRRAGAAVVDGHNTIWAQSLPPGTSAQKAELIALTKALELSKGKKANIYTDSRYAFATAHTHGSIYERRGWLTSEGKEIKNKAEIIALLKALFLPQEVAIIHCPGHQKGQDPVAVGNRQADRVARQAAMAEVLTLATEPDNTSHITAGKRTADGSEFEKRTADGSEFESPKKKAKVE

SEQ ID NO: 2041 - protein, 2102 aa, synthetic construct
MPAAKRVKLDGGDKKYSIGLDIGTNSVGWAVITDEYKVPSKKFKVLGNTDRHSIKKNLIGALLFDSGETAEATRLKRTARRRYTRRKNRICYLQEIFSNEMAKVDDSFFHRLEESFLVEEDKKHERHPIFGNIVDEVAYHEKYPTIYHLRKKLVDSTDKADLRLIYLALAHMIKFRGHFLIEGDLNPDNSDVDKLFIQLVQTYNQLFEENPINASGVDAKAILSARLSKSRRLENLIAQLPGEKKNGLFGNLIALSLGLTPNFKSNFDLAEDAKLQLSKDTYDDDLDNLLAQIGDQYADLFLAAKNLSDAILLSDILRVNTEITKAPLSASMIKRYDEHHQDLTLLKALVRQQLPEKYKEIFFDQSKNGYAGYIDGGASQEEFYKFIKPILEKMDGTEELLVKLNREDLLRKQRTFDNGSIPHQIHLGELHAILRRQEDFYPFLKDNREKIEKILTFRIPYYVGPLARGNSRFAWMTRKSEETITPWNFEEVVDKGASAQSFIERMTNFDKNLPNEKVLPKHSLLYEYFTVYNELTKVKYVTEGMRKPAFLSGEQKKAIVDLLFKTNRKVTVKQLKEDYFKKIECFDSVEISGVEDRFNASLGTYHDLLKIIKDKDFLDNEENEDILEDIVLTLTLFEDREMIEERLKTYAHLFDDKVMKQLKRRRYTGWGRLSRKLINGIRDKQSGKTILDFLKSDGFANRNFMQLIHDDSLTFKEDIQKAQVSGQGDSLHEHIANLAGSPAIKKGILQTVKVVDELVKVMGRHKPENIVIEMARENQTTQKGQKNSRERMKRIEEGIKELGSQILKEHPVENTQLQNEKLYLYYLQNGRDMYVDQELDINRLSDYDVDHIVPQSFLKDDSIDNKVLTRSDKARGKSDNVPSEEVVKKMKNYWRQLLNAKLITQRKFDNLTKAERGGLSELDKAGFIKRQLVETRQITKHVAQILDSRMNTKYDENDKLIREVKVITLKSKLVSDFRKDFQFYKVREINNYHHAHDAYLNAVVGTALIKKYPKLESEFVYGDYKVYDVRKMIAKSEQEIGKATAKYFFYSNIMNFFKTEITLANGEIRKRPLIETNGETGEIVWDKGRDFATVRKVLSMPQVNIVKKTEVQTGGFSKESILPKRNSDKLIARKKDWDPKKYGGFDSPTVAYSVLVVAKVEKGKSKKLKSVKELLGITIMERSSFEKNPIDFLEAKGYKEVKKDLIIKLPKYSLFELENGRKRMLASAGELQKGNELALPSKYVNFLYLASHYEKLKGSPEDNEQKQLFVEQHKHYLDEIIEQISEFSKRVILADANLDKVLSAYNKHRDKPIREQAENIIHLFTLTNLGAPAAFKYFDTTIDRKRYTSTKEVLDATLIHQSITGLYETRIDLSQLGGDGGEAAAKGGGPAPGGTVSLQDEHRLFDIPVTTSLPDVWLQDFPQAWAETGGLGRAKCQAPIIIDLKPTAVPVSIKQYPMSLEAHMGIRQHIIKFLELGVLRPCRSPWNTPLLPVKKPGTQDYRPVQDLREINKRTVDIHPTVPNPYNLLSTLKPDYSWYTVLDLKDAFFCLPLAPQSQELFAFEWKDPERGISGQLTWTRLPQGFKNSPTLFNEALHRDLTDFRTQHPEVTLLQYVDDLLLAAPTKKACTQGTRHLLQELGEKGYRASAKKAQICQTKVTYLGYILSEGKRWLTPGRIETVARIPPPRNPREVREFLGKAGFCRLFIPGFAELAAPLYALTKPSTPFTWQTEHQLAFEALKKALLSAPALGLPDTSKPFTLFLDERQGIAKGVLTQKLGPWKRPVAYLSKKLDPVAAGWPPCLRIMAATAMLVKDSAKLTLGQPLTVITPHTLEAIVRQPPDRWITNARLTHYQALLLDTDRVQFGPPVTLNPATLLPVPENQPSPHDCRQVLAETHGTREDLKDQELPDADHTWYTDGSSYLDSGTRRAGAAVVDGHNTIWAQSLPPGTSAQKAELIALTKALELSKGKKANIYTDSRYAFATAHTHGSIYERRGWLTSEGKEIKNKAEIIALLKALFLPQEVAIIHCPGHQKGQDPVAVGNRQADRVARQAAMAEVLTLATEPDNTSHITAGKRTADGSEFEKRTADGSEFESPKKKAKVE

SEQ ID NO: 2042 - protein, 2100 aa, synthetic construct
MPAAKRVKLDGGDKKYSIGLDIGTNSVGWAVITDEYKVPSKKFKVLGNTDRHSIKKNLIGALLFDSGETAEATRLKRTARRRYTRRKNRICYLQEIFSNEMAKVDDSFFHRLEESFLVEEDKKHERHPIFGNIVDEVAYHEKYPTIYHLRKKLVDSTDKADLRLIYLALAHMIKFRGHFLIEGDLNPDNSDVDKLFIQLVQTYNQLFEENPINASGVDAKAILSARLSKSRRLENLIAQLPGEKKNGLFGNLIALSLGLTPNFKSNFDLAEDAKLQLSKDTYDDDLDNLLAQIGDQYADLFLAAKNLSDAILLSDILRVNTEITKAPLSASMIKRYDEHHQDLTLLKALVRQQLPEKYKEIFFDQSKNGYAGYIDGGASQEEFYKFIKPILEKMDGTEELLVKLNREDLLRKQRTFDNGSIPHQIHLGELHAILRRQEDFYPFLKDNREKIEKILTFRIPYYVGPLARGNSRFAWMTRKSEETITPWNFEEVVDKGASAQSFIERMTNFDKNLPNEKVLPKHSLLYEYFTVYNELTKVKYVTEGMRKPAFLSGEQKKAIVDLLFKTNRKVTVKQLKEDYFKKIECFDSVEISGVEDRFNASLGTYHDLLKIIKDKDFLDNEENEDILEDIVLTLTLFEDREMIEERLKTYAHLFDDKVMKQLKRRRYTGWGRLSRKLINGIRDKQSGKTILDFLKSDGFANRNFMQLIHDDSLTFKEDIQKAQVSGQGDSLHEHIANLAGSPAIKKGILQTVKVVDELVKVMGRHKPENIVIEMARENQTTQKGQKNSRERMKRIEEGIKELGSQILKEHPVENTQLQNEKLYLYYLQNGRDMYVDQELDINRLSDYDVDHIVPQSFLKDDSIDNKVLTRSDKARGKSDNVPSEEVVKKMKNYWRQLLNAKLITQRKFDNLTKAERGGLSELDKAGFIKRQLVETRQITKHVAQILDSRMNTKYDENDKLIREVKVITLKSKLVSDFRKDFQFYKVREINNYHHAHDAYLNAVVGTALIKKYPKLESEFVYGDYKVYDVRKMIAKSEQEIGKATAKYFFYSNIMNFFKTEITLANGEIRKRPLIETNGETGEIVWDKGRDFATVRKVLSMPQVNIVKKTEVQTGGFSKESILPKRNSDKLIARKKDWDPKKYGGFDSPTVAYSVLVVAKVEKGKSKKLKSVKELLGITIMERSSFEKNPIDFLEAKGYKEVKKDLIIKLPKYSLFELENGRKRMLASAGELQKGNELALPSKYVNFLYLASHYEKLKGSPEDNEQKQLFVEQHKHYLDEIIEQISEFSKRVILADANLDKVLSAYNKHRDKPIREQAENIIHLFTLTNLGAPAAFKYFDTTIDRKRYTSTKEVLDATLIHQSITGLYETRIDLSQLGGDGGGSSGSSGSSGGTVSLQDEHRLFDIPVTTSLPDVWLQDFPQAWAETGGLGRAKCQAPIIIDLKPTAVPVSIKQYPMSLEAHMGIRQHIIKFLELGVLRPCRSPWNTPLLPVKKPGTQDYRPVQDLREINKRTVDIHPTVPNPYNLLSTLKPDYSWYTVLDLKDAFFCLPLAPQSQELFAFEWKDPERGISGQLTWTRLPQGFKNSPTLFNEALHRDLTDFRTQHPEVTLLQYVDDLLLAAPTKKACTQGTRHLLQELGEKGYRASAKKAQICQTKVTYLGYILSEGKRWLTPGRIETVARIPPPRNPREVREFLGKAGFCRLFIPGFAELAAPLYALTKPSTPFTWQTEHQLAFEALKKALLSAPALGLPDTSKPFTLFLDERQGIAKGVLTQKLGPWKRPVAYLSKKLDPVAAGWPPCLRIMAATAMLVKDSAKLTLGQPLTVITPHTLEAIVRQPPDRWITNARLTHYQALLLDTDRVQFGPPVTLNPATLLPVPENQPSPHDCRQVLAETHGTREDLKDQELPDADHTWYTDGSSYLDSGTRRAGAAVVDGHNTIWAQSLPPGTSAQKAELIALTKALELSKGKKANIYTDSRYAFATAHTHGSIYERRGWLTSEGKEIKNKAEIIALLKALFLPQEVAIIHCPGHQKGQDPVAVGNRQADRVARQAAMAEVLTLATEPDNTSHITAGKRTADGSEFEKRTADGSEFESPKKKAKVE

SEQ ID NO: 2043 - protein, 2106 aa, synthetic construct
MPAAKRVKLDGGDKKYSIGLDIGTNSVGWAVITDEYKVPSKKFKVLGNTDRHSIKKNLIGALLFDSGETAEATRLKRTARRRYTRRKNRICYLQEIFSNEMAKVDDSFFHRLEESFLVEEDKKHERHPIFGNIVDEVAYHEKYPTIYHLRKKLVDSTDKADLRLIYLALAHMIKFRGHFLIEGDLNPDNSDVDKLFIQLVQTYNQLFEENPINASGVDAKAILSARLSKSRRLENLIAQLPGEKKNGLFGNLIALSLGLTPNFKSNFDLAEDAKLQLSKDTYDDDLDNLLAQIGDQYADLFLAAKNLSDAILLSDILRVNTEITKAPLSASMIKRYDEHHQDLTLLKALVRQQLPEKYKEIFFDQSKNGYAGYIDGGASQEEFYKFIKPILEKMDGTEELLVKLNREDLLRKQRTFDNGSIPHQIHLGELHAILRRQEDFYPFLKDNREKIEKILTFRIPYYVGPLARGNSRFAWMTRKSEETITPWNFEEVVDKGASAQSFIERMTNFDKNLPNEKVLPKHSLLYEYFTVYNELTKVKYVTEGMRKPAFLSGEQKKAIVDLLFKTNRKVTVKQLKEDYFKKIECFDSVEISGVEDRFNASLGTYHDLLKIIKDKDFLDNEENEDILEDIVLTLTLFEDREMIEERLKTYAHLFDDKVMKQLKRRRYTGWGRLSRKLINGIRDKQSGKTILDFLKSDGFANRNFMQLIHDDSLTFKEDIQKAQVSGQGDSLHEHIANLAGSPAIKKGILQTVKVVDELVKVMGRHKPENIVIEMARENQTTQKGQKNSRERMKRIEEGIKELGSQILKEHPVENTQLQNEKLYLYYLQNGRDMYVDQELDINRLSDYDVDHIVPQSFLKDDSIDNKVLTRSDKARGKSDNVPSEEVVKKMKNYWRQLLNAKLITQRKFDNLTKAERGGLSELDKAGFIKRQLVETRQITKHVAQILDSRMNTKYDENDKLIREVKVITLKSKLVSDFRKDFQFYKVREINNYHHAHDAYLNAVVGTALIKKYPKLESEFVYGDYKVYDVRKMIAKSEQEIGKATAKYFFYSNIMNFFKTEITLANGEIRKRPLIETNGETGEIVWDKGRDFATVRKVLSMPQVNIVKKTEVQTGGFSKESILPKRNSDKLIARKKDWDPKKYGGFDSPTVAYSVLVVAKVEKGKSKKLKSVKELLGITIMERSSFEKNPIDFLEAKGYKEVKKDLIIKLPKYSLFELENGRKRMLASAGELQKGNELALPSKYVNFLYLASHYEKLKGSPEDNEQKQLFVEQHKHYLDEIIEQISEFSKRVILADANLDKVLSAYNKHRDKPIREQAENIIHLFTLTNLGAPAAFKYFDTTIDRKRYTSTKEVLDATLIHQSITGLYETRIDLSQLGGDGGEAAAKEAAAKEAAAKGGTVSLQDEHRLFDIPVTTSLPDVWLQDFPQAWAETGGLGRAKCQAPIIIDLKPTAVPVSIKQYPMSLEAHMGIRQHIIKFLELGVLRPCRSPWNTPLLPVKKPGTQDYRPVQDLREINKRTVDIHPTVPNPYNLLSTLKPDYSWYTVLDLKDAFFCLPLAPQSQELFAFEWKDPERGISGQLTWTRLPQGFKNSPTLFNEALHRDLTDFRTQHPEVTLLQYVDDLLLAAPTKKACTQGTRHLLQELGEKGYRASAKKAQICQTKVTYLGYILSEGKRWLTPGRIETVARIPPPRNPREVREFLGKAGFCRLFIPGFAELAAPLYALTKPSTPFTWQTEHQLAFEALKKALLSAPALGLPDTSKPFTLFLDERQGIAKGVLTQKLGPWKRPVAYLSKKLDPVAAGWPPCLRIMAATAMLVKDSAKLTLGQPLTVITPHTLEAIVRQPPDRWITNARLTHYQALLLDTDRVQFGPPVTLNPATLLPVPENQPSPHDCRQVLAETHGTREDLKDQELPDADHTWYTDGSSYLDSGTRRAGAAVVDGHNTIWAQSLPPGTSAQKAELIALTKALELSKGKKANIYTDSRYAFATAHTHGSIYERRGWLTSEGKEIKNKAEIIALLKALFLPQEVAIIHCPGHQKGQDPVAVGNRQADRVARQAAMAEVLTLATEPDNTSHITAGKRTADGSEFEKRTADGSEFESPKKKAKVE

SEQ ID NO: 2044 - protein, 2102 aa, synthetic construct
MPAAKRVKLDGGDKKYSIGLDIGTNSVGWAVITDEYKVPSKKFKVLGNTDRHSIKKNLIGALLFDSGETAEATRLKRTARRRYTRRKNRICYLQEIFSNEMAKVDDSFFHRLEESFLVEEDKKHERHPIFGNIVDEVAYHEKYPTIYHLRKKLVDSTDKADLRLIYLALAHMIKFRGHFLIEGDLNPDNSDVDKLFIQLVQTYNQLFEENPINASGVDAKAILSARLSKSRRLENLIAQLPGEKKNGLFGNLIALSLGLTPNFKSNFDLAEDAKLQLSKDTYDDDLDNLLAQIGDQYADLFLAAKNLSDAILLSDILRVNTEITKAPLSASMIKRYDEHHQDLTLLKALVRQQLPEKYKEIFFDQSKNGYAGYIDGGASQEEFYKFIKPILEKMDGTEELLVKLNREDLLRKQRTFDNGSIPHQIHLGELHAILRRQEDFYPFLKDNREKIEKILTFRIPYYVGPLARGNSRFAWMTRKSEETITPWNFEEVVDKGASAQSFIERMTNFDKNLPNEKVLPKHSLLYEYFTVYNELTKVKYVTEGMRKPAFLSGEQKKAIVDLLFKTNRKVTVKQLKEDYFKKIECFDSVEISGVEDRFNASLGTYHDLLKIIKDKDFLDNEENEDILEDIVLTLTLFEDREMIEERLKTYAHLFDDKVMKQLKRRRYTGWGRLSRKLINGIRDKQSGKTILDFLKSDGFANRNFMQLIHDDSLTFKEDIQKAQVSGQGDSLHEHIANLAGSPAIKKGILQTVKVVDELVKVMGRHKPENIVIEMARENQTTQKGQKNSRERMKRIEEGIKELGSQILKEHPVENTQLQNEKLYLYYLQNGRDMYVDQELDINRLSDYDVDHIVPQSFLKDDSIDNKVLTRSDKARGKSDNVPSEEVVKKMKNYWRQLLNAKLITQRKFDNLTKAERGGLSELDKAGFIKRQLVETRQITKHVAQILDSRMNTKYDENDKLIREVKVITLKSKLVSDFRKDFQFYKVREINNYHHAHDAYLNAVVGTALIKKYPKLESEFVYGDYKVYDVRKMIAKSEQEIGKATAKYFFYSNIMNFFKTEITLANGEIRKRPLIETNGETGEIVWDKGRDFATVRKVLSMPQVNIVKKTEVQTGGFSKESILPKRNSDKLIARKKDWDPKKYGGFDSPTVAYSVLVVAKVEKGKSKKLKSVKELLGITIMERSSFEKNPIDFLEAKGYKEVKKDLIIKLPKYSLFELENGRKRMLASAGELQKGNELALPSKYVNFLYLASHYEKLKGSPEDNEQKQLFVEQHKHYLDEIIEQISEFSKRVILADANLDKVLSAYNKHRDKPIREQAENIIHLFTLTNLGAPAAFKYFDTTIDRKRYTSTKEVLDATLIHQSITGLYETRIDLSQLGGDGGPAPEAAAKGGSGGTVSLQDEHRLFDIPVTTSLPDVWLQDFPQAWAETGGLGRAKCQAPIIIDLKPTAVPVSIKQYPMSLEAHMGIRQHIIKFLELGVLRPCRSPWNTPLLPVKKPGTQDYRPVQDLREINKRTVDIHPTVPNPYNLLSTLKPDYSWYTVLDLKDAFFCLPLAPQSQELFAFEWKDPERGISGQLTWTRLPQGFKNSPTLFNEALHRDLTDFRTQHPEVTLLQYVDDLLLAAPTKKACTQGTRHLLQELGEKGYRASAKKAQICQTKVTYLGYILSEGKRWLTPGRIETVARIPPPRNPREVREFLGKAGFCRLFIPGFAELAAPLYALTKPSTPFTWQTEHQLAFEALKKALLSAPALGLPDTSKPFTLFLDERQGIAKGVLTQKLGPWKRPVAYLSKKLDPVAAGWPPCLRIMAATAMLVKDSAKLTLGQPLTVITPHTLEAIVRQPPDRWITNARLTHYQALLLDTDRVQFGPPVTLNPATLLPVPENQPSPHDCRQVLAETHGTREDLKDQELPDADHTWYTDGSSYLDSGTRRAGAAVVDGHNTIWAQSLPPGTSAQKAELIALTKALELSKGKKANIYTDSRYAFATAHTHGSIYERRGWLTSEGKEIKNKAEIIALLKALFLPQEVAIIHCPGHQKGQDPVAVGNRQADRVARQAAMAEVLTLATEPDNTSHITAGKRTADGSEFEKRTADGSEFESPKKKAKVE

SEQ ID NO: 2045 - protein, 2124 aa, synthetic construct
MPAAKRVKLDGGDKKYSIGLDIGTNSVGWAVITDEYKVPSKKFKVLGNTDRHSIKKNLIGALLFDSGETAEATRLKRTARRRYTRRKNRICYLQEIFSNEMAKVDDSFFHRLEESFLVEEDKKHERHPIFGNIVDEVAYHEKYPTIYHLRKKLVDSTDKADLRLIYLALAHMIKFRGHFLIEGDLNPDNSDVDKLFIQLVQTYNQLFEENPINASGVDAKAILSARLSKSRRLENLIAQLPGEKKNGLFGNLIALSLGLTPNFKSNFDLAEDAKLQLSKDTYDDDLDNLLAQIGDQYADLFLAAKNLSDAILLSDILRVNTEITKAPLSASMIKRYDEHHQDLTLLKALVRQQLPEKYKEIFFDQSKNGYAGYIDGGASQEEFYKFIKPILEKMDGTEELLVKLNREDLLRKQRTFDNGSIPHQIHLGELHAILRRQEDFYPFLKDNREKIEKILTFRIPYYVGPLARGNSRFAWMTRKSEETITPWNFEEVVDKGASAQSFIERMTNFDKNLPNEKVLPKHSLLYEYFTVYNELTKVKYVTEGMRKPAFLSGEQKKAIVDLLFKTNRKVTVKQLKEDYFKKIECFDSVEISGVEDRFNASLGTYHDLLKIIKDKDFLDNEENEDILEDIVLTLTLFEDREMIEERLKTYAHLFDDKVMKQLKRRRYTGWGRLSRKLINGIRDKQSGKTILDFLKSDGFANRNFMQLIHDDSLTFKEDIQKAQVSGQGDSLHEHIANLAGSPAIKKGILQTVKVVDELVKVMGRHKPENIVIEMARENQTTQKGQKNSRERMKRIEEGIKELGSQILKEHPVENTQLQNEKLYLYYLQNGRDMYVDQELDINRLSDYDVDHIVPQSFLKDDSIDNKVLTRSDKARGKSDNVPSEEVVKKMKNYWRQLLNAKLITQRKFDNLTKAERGGLSELDKAGFIKRQLVETRQITKHVAQILDSRMNTKYDENDKLIREVKVITLKSKLVSDFRKDFQFYKVREINNYHHAHDAYLNAVVGTALIKKYPKLESEFVYGDYKVYDVRKMIAKSEQEIGKATAKYFFYSNIMNFFKTEITLANGEIRKRPLIETNGETGEIVWDKGRDFATVRKVLSMPQVNIVKKTEVQTGGFSKESILPKRNSDKLIARKKDWDPKKYGGFDSPTVAYSVLVVAKVEKGKSKKLKSVKELLGITIMERSSFEKNPIDFLEAKGYKEVKKDLIIKLPKYSLFELENGRKRMLASAGELQKGNELALPSKYVNFLYLASHYEKLKGSPEDNEQKQLFVEQHKHYLDEIIEQISEFSKRVILADANLDKVLSAYNKHRDKPIREQAENIIHLFTLTNLGAPAAFKYFDTTIDRKRYTSTKEVLDATLIHQSITGLYETRIDLSQLGGDGGSGGSSGGSSGSETPGTSESATPESSGGSSGGSSGGTVSLQDEHRLFDIPVTTSLPDVWLQDFPQAWAETGGLGRAKCQAPIIIDLKPTAVPVSIKQYPMSLEAHMGIRQHIIKFLELGVLRPCRSPWNTPLLPVKKPGTQDYRPVQDLREINKRTVDIHPTVPNPYNLLSTLKPDYSWYTVLDLKDAFFCLPLAPQSQELFAFEWKDPERGISGQLTWTRLPQGFKNSPTLFNEALHRDLTDFRTQHPEVTLLQYVDDLLLAAPTKKACTQGTRHLLQELGEKGYRASAKKAQICQTKVTYLGYILSEGKRWLTPGRIETVARIPPPRNPREVREFLGKAGFCRLFIPGFAELAAPLYALTKPSTPFTWQTEHQLAFEALKKALLSAPALGLPDTSKPFTLFLDERQGIAKGVLTQKLGPWKRPVAYLSKKLDPVAAGWPPCLRIMAATAMLVKDSAKLTLGQPLTVITPHTLEAIVRQPPDRWITNARLTHYQALLLDTDRVQFGPPVTLNPATLLPVPENQPSPHDCRQVLAETHGTREDLKDQELPDADHTWYTDGSSYLDSGTRRAGAAVVDGHNTIWAQSLPPGTSAQKAELIALTKALELSKGKKANIYTDSRYAFATAHTHGSIYERRGWLTSEGKEIKNKAEIIALLKALFLPQEVAIIHCPGHQKGQDPVAVGNRQADRVARQAAMAEVLTLATEPDNTSHITAGKRTADGSEFEKRTADGSEFESPKKKAKVE

SEQ ID NO: 2046 - protein, 2102 aa, synthetic construct
MPAAKRVKLDGGDKKYSIGLDIGTNSVGWAVITDEYKVPSKKFKVLGNTDRHSIKKNLIGALLFDSGETAEATRLKRTARRRYTRRKNRICYLQEIFSNEMAKVDDSFFHRLEESFLVEEDKKHERHPIFGNIVDEVAYHEKYPTIYHLRKKLVDSTDKADLRLIYLALAHMIKFRGHFLIEGDLNPDNSDVDKLFIQLVQTYNQLFEENPINASGVDAKAILSARLSKSRRLENLIAQLPGEKKNGLFGNLIALSLGLTPNFKSNFDLAEDAKLQLSKDTYDDDLDNLLAQIGDQYADLFLAAKNLSDAILLSDILRVNTEITKAPLSASMIKRYDEHHQDLTLLKALVRQQLPEKYKEIFFDQSKNGYAGYIDGGASQEEFYKFIKPILEKMDGTEELLVKLNREDLLRKQRTFDNGSIPHQIHLGELHAILRRQEDFYPFLKDNREKIEKILTFRIPYYVGPLARGNSRFAWMTRKSEETITPWNFEEVVDKGASAQSFIERMTNFDKNLPNEKVLPKHSLLYEYFTVYNELTKVKYVTEGMRKPAFLSGEQKKAIVDLLFKTNRKVTVKQLKEDYFKKIECFDSVEISGVEDRFNASLGTYHDLLKIIKDKDFLDNEENEDILEDIVLTLTLFEDREMIEERLKTYAHLFDDKVMKQLKRRRYTGWGRLSRKLINGIRDKQSGKTILDFLKSDGFANRNFMQLIHDDSLTFKEDIQKAQVSGQGDSLHEHIANLAGSPAIKKGILQTVKVVDELVKVMGRHKPENIVIEMARENQTTQKGQKNSRERMKRIEEGIKELGSQILKEHPVENTQLQNEKLYLYYLQNGRDMYVDQELDINRLSDYDVDHIVPQSFLKDDSIDNKVLTRSDKARGKSDNVPSEEVVKKMKNYWRQLLNAKLITQRKFDNLTKAERGGLSELDKAGFIKRQLVETRQITKHVAQILDSRMNTKYDENDKLIREVKVITLKSKLVSDFRKDFQFYKVREINNYHHAHDAYLNAVVGTALIKKYPKLESEFVYGDYKVYDVRKMIAKSEQEIGKATAKYFFYSNIMNFFKTEITLANGEIRKRPLIETNGETGEIVWDKGRDFATVRKVLSMPQVNIVKKTEVQTGGFSKESILPKRNSDKLIARKKDWDPKKYGGFDSPTVAYSVLVVAKVEKGKSKKLKSVKELLGITIMERSSFEKNPIDFLEAKGYKEVKKDLIIKLPKYSLFELENGRKRMLASAGELQKGNELALPSKYVNFLYLASHYEKLKGSPEDNEQKQLFVEQHKHYLDEIIEQISEFSKRVILADANLDKVLSAYNKHRDKPIREQAENIIHLFTLTNLGAPAAFKYFDTTIDRKRYTSTKEVLDATLIHQSITGLYETRIDLSQLGGDGGGGSEAAAKGSSGGTVSLQDEHRLFDIPVTTSLPDVWLQDFPQAWAETGGLGRAKCQAPIIIDLKPTAVPVSIKQYPMSLEAHMGIRQHIIKFLELGVLRPCRSPWNTPLLPVKKPGTQDYRPVQDLREINKRTVDIHPTVPNPYNLLSTLKPDYSWYTVLDLKDAFFCLPLAPQSQELFAFEWKDPERGISGQLTWTRLPQGFKNSPTLFNEALHRDLTDFRTQHPEVTLLQYVDDLLLAAPTKKACTQGTRHLLQELGEKGYRASAKKAQICQTKVTYLGYILSEGKRWLTPGRIETVARIPPPRNPREVREFLGKAGFCRLFIPGFAELAAPLYALTKPSTPFTWQTEHQLAFEALKKALLSAPALGLPDTSKPFTLFLDERQGIAKGVLTQKLGPWKRPVAYLSKKLDPVAAGWPPCLRIMAATAMLVKDSAKLTLGQPLTVITPHTLEAIVRQPPDRWITNARLTHYQALLLDTDRVQFGPPVTLNPATLLPVPENQPSPHDCRQVLAETHGTREDLKDQELPDADHTWYTDGSSYLDSGTRRAGAAVVDGHNTIWAQSLPPGTSAQKAELIALTKALELSKGKKANIYTDSRYAFATAHTHGSIYERRGWLTSEGKEIKNKAEIIALLKALFLPQEVAIIHCPGHQKGQDPVAVGNRQADRVARQAAMAEVLTLATEPDNTSHITAGKRTADGSEFEKRTADGSEFESPKKKAKVE

SEQ ID NO: 2047 - protein, 2097 aa, synthetic construct
MPAAKRVKLDGGDKKYSIGLDIGTNSVGWAVITDEYKVPSKKFKVLGNTDRHSIKKNLIGALLFDSGETAEATRLKRTARRRYTRRKNRICYLQEIFSNEMAKVDDSFFHRLEESFLVEEDKKHERHPIFGNIVDEVAYHEKYPTIYHLRKKLVDSTDKADLRLIYLALAHMIKFRGHFLIEGDLNPDNSDVDKLFIQLVQTYNQLFEENPINASGVDAKAILSARLSKSRRLENLIAQLPGEKKNGLFGNLIALSLGLTPNFKSNFDLAEDAKLQLSKDTYDDDLDNLLAQIGDQYADLFLAAKNLSDAILLSDILRVNTEITKAPLSASMIKRYDEHHQDLTLLKALVRQQLPEKYKEIFFDQSKNGYAGYIDGGASQEEFYKFIKPILEKMDGTEELLVKLNREDLLRKQRTFDNGSIPHQIHLGELHAILRRQEDFYPFLKDNREKIEKILTFRIPYYVGPLARGNSRFAWMTRKSEETITPWNFEEVVDKGASAQSFIERMTNFDKNLPNEKVLPKHSLLYEYFTVYNELTKVKYVTEGMRKPAFLSGEQKKAIVDLLFKTNRKVTVKQLKEDYFKKIECFDSVEISGVEDRFNASLGTYHDLLKIIKDKDFLDNEENEDILEDIVLTLTLFEDREMIEERLKTYAHLFDDKVMKQLKRRRYTGWGRLSRKLINGIRDKQSGKTILDFLKSDGFANRNFMQLIHDDSLTFKEDIQKAQVSGQGDSLHEHIANLAGSPAIKKGILQTVKVVDELVKVMGRHKPENIVIEMARENQTTQKGQKNSRERMKRIEEGIKELGSQILKEHPVENTQLQNEKLYLYYLQNGRDMYVDQELDINRLSDYDVDHIVPQSFLKDDSIDNKVLTRSDKARGKSDNVPSEEVVKKMKNYWRQLLNAKLITQRKFDNLTKAERGGLSELDKAGFIKRQLVETRQITKHVAQILDSRMNTKYDENDKLIREVKVITLKSKLVSDFRKDFQFYKVREINNYHHAHDAYLNAVVGTALIKKYPKLESEFVYGDYKVYDVRKMIAKSEQEIGKATAKYFFYSNIMNFFKTEITLANGEIRKRPLIETNGETGEIVWDKGRDFATVRKVLSMPQVNIVKKTEVQTGGFSKESILPKRNSDKLIARKKDWDPKKYGGFDSPTVAYSVLVVAKVEKGKSKKLKSVKELLGITIMERSSFEKNPIDFLEAKGYKEVKKDLIIKLPKYSLFELENGRKRMLASAGELQKGNELALPSKYVNFLYLASHYEKLKGSPEDNEQKQLFVEQHKHYLDEIIEQISEFSKRVILADANLDKVLSAYNKHRDKPIREQAENIIHLFTLTNLGAPAAFKYFDTTIDRKRYTSTKEVLDATLIHQSITGLYETRIDLSQLGGDGGGSSGGSGGTVSLQDEHRLFDIPVTTSLPDVWLQDFPQAWAETGGLGRAKCQAPIIIDLKPTAVPVSIKQYPMSLEAHMGIRQHIIKFLELGVLRPCRSPWNTPLLPVKKPGTQDYRPVQDLREINKRTVDIHPTVPNPYNLLSTLKPDYSWYTVLDLKDAFFCLPLAPQSQELFAFEWKDPERGISGQLTWTRLPQGFKNSPTLFNEALHRDLTDFRTQHPEVTLLQYVDDLLLAAPTKKACTQGTRHLLQELGEKGYRASAKKAQICQTKVTYLGYILSEGKRWLTPGRIETVARIPPPRNPREVREFLGKAGFCRLFIPGFAELAAPLYALTKPSTPFTWQTEHQLAFEALKKALLSAPALGLPDTSKPFTLFLDERQGIAKGVLTQKLGPWKRPVAYLSKKLDPVAAGWPPCLRIMAATAMLVKDSAKLTLGQPLTVITPHTLEAIVRQPPDRWITNARLTHYQALLLDTDRVQFGPPVTLNPATLLPVPENQPSPHDCRQVLAETHGTREDLKDQELPDADHTWYTDGSSYLDSGTRRAGAAVVDGHNTIWAQSLPPGTSAQKAELIALTKALELSKGKKANIYTDSRYAFATAHTHGSIYERRGWLTSEGKEIKNKAEIIALLKALFLPQEVAIIHCPGHQKGQDPVAVGNRQADRVARQAAMAEVLTLATEPDNTSHITAGKRTADGSEFEKRTADGSEFESPKKKAKVE

SEQ ID NO: 2048 - protein, 2096 aa, synthetic construct
MPAAKRVKLDGGDKKYSIGLDIGTNSVGWAVITDEYKVPSKKFKVLGNTDRHSIKKNLIGALLFDSGETAEATRLKRTARRRYTRRKNRICYLQEIFSNEMAKVDDSFFHRLEESFLVEEDKKHERHPIFGNIVDEVAYHEKYPTIYHLRKKLVDSTDKADLRLIYLALAHMIKFRGHFLIEGDLNPDNSDVDKLFIQLVQTYNQLFEENPINASGVDAKAILSARLSKSRRLENLIAQLPGEKKNGLFGNLIALSLGLTPNFKSNFDLAEDAKLQLSKDTYDDDLDNLLAQIGDQYADLFLAAKNLSDAILLSDILRVNTEITKAPLSASMIKRYDEHHQDLTLLKALVRQQLPEKYKEIFFDQSKNGYAGYIDGGASQEEFYKFIKPILEKMDGTEELLVKLNREDLLRKQRTFDNGSIPHQIHLGELHAILRRQEDFYPFLKDNREKIEKILTFRIPYYVGPLARGNSRFAWMTRKSEETITPWNFEEVVDKGASAQSFIERMTNFDKNLPNEKVLPKHSLLYEYFTVYNELTKVKYVTEGMRKPAFLSGEQKKAIVDLLFKTNRKVTVKQLKEDYFKKIECFDSVEISGVEDRFNASLGTYHDLLKIIKDKDFLDNEENEDILEDIVLTLTLFEDREMIEERLKTYAHLFDDKVMKQLKRRRYTGWGRLSRKLINGIRDKQSGKTILDFLKSDGFANRNFMQLIHDDSLTFKEDIQKAQVSGQGDSLHEHIANLAGSPAIKKGILQTVKVVDELVKVMGRHKPENIVIEMARENQTTQKGQKNSRERMKRIEEGIKELGSQILKEHPVENTQLQNEKLYLYYLQNGRDMYVDQELDINRLSDYDVDHIVPQSFLKDDSIDNKVLTRSDKARGKSDNVPSEEVVKKMKNYWRQLLNAKLITQRKFDNLTKAERGGLSELDKAGFIKRQLVETRQITKHVAQILDSRMNTKYDENDKLIREVKVITLKSKLVSDFRKDFQFYKVREINNYHHAHDAYLNAVVGTALIKKYPKLESEFVYGDYKVYDVRKMIAKSEQEIGKATAKYFFYSNIMNFFKTEITLANGEIRKRPLIETNGETGEIVWDKGRDFATVRKVLSMPQVNIVKKTEVQTGGFSKESILPKRNSDKLIARKKDWDPKKYGGFDSPTVAYSVLVVAKVEKGKSKKLKSVKELLGITIMERSSFEKNPIDFLEAKGYKEVKKDLIIKLPKYSLFELENGRKRMLASAGELQKGNELALPSKYVNFLYLASHYEKLKGSPEDNEQKQLFVEQHKHYLDEIIEQISEFSKRVILADANLDKVLSAYNKHRDKPIREQAENIIHLFTLTNLGAPAAFKYFDTTIDRKRYTSTKEVLDATLIHQSITGLYETRIDLSQLGGDGGPAPGGSEAAAKGGLGIEDEYRLHETSTEPDVSLGSTWLSDFPQAWAETGGMGLAVRQAPLIIPLKATSTPVSIQQYPMSHEARLGIKPHIQRLLDQGILVPCQSPWNTPLLPVKKPGTNDYRPVQDLREVNKRVEDIHPTVPNPYNLLSGLPPSHQWYTVLDLKDAFFCLRLHPTSQPLFAFEWRDPGMGISGQLTWTRLPQGFKNSPTLFNEALHRDLADFRIQHPDLILLQYVDDILLAATSELDCQQGTRALLQTLGDLGYRASAKKAQICQKQVKYLGYLLREGQRWLTEARKETVMGQPVPKTPRQLREFLGKAGFCRLFIPGFAEMAAPLYPLTKPGTLFSWGPDQQKAYQEIKQALLTAPALGLPDLTKPFELFVDEKQGYAKGVLTQKLGPWRRPVAYLSKKLDPVAAGWPPCLRMVAAIAVLTKDAGKLTMGQPLVILAPHAVEALVKQPPDRWLSNARMTHYQAMLLDTDRVQFGPVVALNPATLLPLPEEGAPHDCLEILAETHGTRPDLTDQPIPDADHTWYTDGSSFLQEGQRKAGAAVTTETEVIWAGALPAGTSAQRAELIALTQALKMAEGKRLNVYTDSRYAFATAHIHGEIYRRRGWLTSEGREIKNKSEILALLKALFLPKRLSIIHCLGHQKGDSAEARGNRLADQAAREAAIKTPPDTSTLLIAGKRTADGSEFEKRTADGSEFESPKKKAKVE

SEQ ID NO: 2049 - protein, 2100 aa, synthetic construct
MPAAKRVKLDGGDKKYSIGLDIGTNSVGWAVITDEYKVPSKKFKVLGNTDRHSIKKNLIGALLFDSGETAEATRLKRTARRRYTRRKNRICYLQEIFSNEMAKVDDSFFHRLEESFLVEEDKKHERHPIFGNIVDEVAYHEKYPTIYHLRKKLVDSTDKADLRLIYLALAHMIKFRGHFLIEGDLNPDNSDVDKLFIQLVQTYNQLFEENPINASGVDAKAILSARLSKSRRLENLIAQLPGEKKNGLFGNLIALSLGLTPNFKSNFDLAEDAKLQLSKDTYDDDLDNLLAQIGDQYADLFLAAKNLSDAILLSDILRVNTEITKAPLSASMIKRYDEHHQDLTLLKALVRQQLPEKYKEIFFDQSKNGYAGYIDGGASQEEFYKFIKPILEKMDGTEELLVKLNREDLLRKQRTFDNGSIPHQIHLGELHAILRRQEDFYPFLKDNREKIEKILTFRIPYYVGPLARGNSRFAWMTRKSEETITPWNFEEVVDKGASAQSFIERMTNFDKNLPNEKVLPKHSLLYEYFTVYNELTKVKYVTEGMRKPAFLSGEQKKAIVDLLFKTNRKVTVKQLKEDYFKKIECFDSVEISGVEDRFNASLGTYHDLLKIIKDKDFLDNEENEDILEDIVLTLTLFEDREMIEERLKTYAHLFDDKVMKQLKRRRYTGWGRLSRKLINGIRDKQSGKTILDFLKSDGFANRNFMQLIHDDSLTFKEDIQKAQVSGQGDSLHEHIANLAGSPAIKKGILQTVKVVDELVKVMGRHKPENIVIEMARENQTTQKGQKNSRERMKRIEEGIKELGSQILKEHPVENTQLQNEKLYLYYLQNGRDMYVDQELDINRLSDYDVDHIVPQSFLKDDSIDNKVLTRSDKARGKSDNVPSEEVVKKMKNYWRQLLNAKLITQRKFDNLTKAERGGLSELDKAGFIKRQLVETRQITKHVAQILDSRMNTKYDENDKLIREVKVITLKSKLVSDFRKDFQFYKVREINNYHHAHDAYLNAVVGTALIKKYPKLESEFVYGDYKVYDVRKMIAKSEQEIGKATAKYFFYSNIMNFFKTEITLANGEIRKRPLIETNGETGEIVWDKGRDFATVRKVLSMPQVNIVKKTEVQTGGFSKESILPKRNSDKLIARKKDWDPKKYGGFDSPTVAYSVLVVAKVEKGKSKKLKSVKELLGITIMERSSFEKNPIDFLEAKGYKEVKKDLIIKLPKYSLFELENGRKRMLASAGELQKGNELALPSKYVNFLYLASHYEKLKGSPEDNEQKQLFVEQHKHYLDEIIEQISEFSKRVILADANLDKVLSAYNKHRDKPIREQAENIIHLFTLTNLGAPAAFKYFDTTIDRKRYTSTKEVLDATLIHQSITGLYETRIDLSQLGGDGGEAAAKGGGGSEAAAKGGLGIEDEYRLHETSTEPDVSLGSTWLSDFPQAWAETGGMGLAVRQAPLIIPLKATSTPVSIQQYPMSHEARLGIKPHIQRLLDQGILVPCQSPWNTPLLPVKKPGTNDYRPVQDLREVNKRVEDIHPTVPNPYNLLSGLPPSHQWYTVLDLKDAFFCLRLHPTSQPLFAFEWRDPGMGISGQLTWTRLPQGFKNSPTLFNEALHRDLADFRIQHPDLILLQYVDDILLAATSELDCQQGTRALLQTLGDLGYRASAKKAQICQKQVKYLGYLLREGQRWLTEARKETVMGQPVPKTPRQLREFLGKAGFCRLFIPGFAEMAAPLYPLTKPGTLFSWGPDQQKAYQEIKQALLTAPALGLPDLTKPFELFVDEKQGYAKGVLTQKLGPWRRPVAYLSKKLDPVAAGWPPCLRMVAAIAVLTKDAGKLTMGQPLVILAPHAVEALVKQPPDRWLSNARMTHYQAMLLDTDRVQFGPVVALNPATLLPLPEEGAPHDCLEILAETHGTRPDLTDQPIPDADHTWYTDGSSFLQEGQRKAGAAVTTETEVIWAGALPAGTSAQRAELIALTQALKMAEGKRLNVYTDSRYAFATAHIHGEIYRRRGWLTSEGREIKNKSEILALLKALFLPKRLSIIHCLGHQKGDSAEARGNRLADQAAREAAIKTPPDTSTLLIAGKRTADGSEFEKRTADGSEFESPKKKAKVE

SEQ ID NO: 2050 - protein, 2096 aa, synthetic construct
MPAAKRVKLDGGDKKYSIGLDIGTNSVGWAVITDEYKVPSKKFKVLGNTDRHSIKKNLIGALLFDSGETAEATRLKRTARRRYTRRKNRICYLQEIFSNEMAKVDDSFFHRLEESFLVEEDKKHERHPIFGNIVDEVAYHEKYPTIYHLRKKLVDSTDKADLRLIYLALAHMIKFRGHFLIEGDLNPDNSDVDKLFIQLVQTYNQLFEENPINASGVDAKAILSARLSKSRRLENLIAQLPGEKKNGLFGNLIALSLGLTPNFKSNFDLAEDAKLQLSKDTYDDDLDNLLAQIGDQYADLFLAAKNLSDAILLSDILRVNTEITKAPLSASMIKRYDEHHQDLTLLKALVRQQLPEKYKEIFFDQSKNGYAGYIDGGASQEEFYKFIKPILEKMDGTEELLVKLNREDLLRKQRTFDNGSIPHQIHLGELHAILRRQEDFYPFLKDNREKIEKILTFRIPYYVGPLARGNSRFAWMTRKSEETITPWNFEEVVDKGASAQSFIERMTNFDKNLPNEKVLPKHSLLYEYFTVYNELTKVKYVTEGMRKPAFLSGEQKKAIVDLLFKTNRKVTVKQLKEDYFKKIECFDSVEISGVEDRFNASLGTYHDLLKIIKDKDFLDNEENEDILEDIVLTLTLFEDREMIEERLKTYAHLFDDKVMKQLKRRRYTGWGRLSRKLINGIRDKQSGKTILDFLKSDGFANRNFMQLIHDDSLTFKEDIQKAQVSGQGDSLHEHIANLAGSPAIKKGILQTVKVVDELVKVMGRHKPENIVIEMARENQTTQKGQKNSRERMKRIEEGIKELGSQILKEHPVENTQLQNEKLYLYYLQNGRDMYVDQELDINRLSDYDVDHIVPQSFLKDDSIDNKVLTRSDKARGKSDNVPSEEVVKKMKNYWRQLLNAKLITQRKFDNLTKAERGGLSELDKAGFIKRQLVETRQITKHVAQILDSRMNTKYDENDKLIREVKVITLKSKLVSDFRKDFQFYKVREINNYHHAHDAYLNAVVGTALIKKYPKLESEFVYGDYKVYDVRKMIAKSEQEIGKATAKYFFYSNIMNFFKTEITLANGEIRKRPLIETNGETGEIVWDKGRDFATVRKVLSMPQVNIVKKTEVQTGGFSKESILPKRNSDKLIARKKDWDPKKYGGFDSPTVAYSVLVVAKVEKGKSKKLKSVKELLGITIMERSSFEKNPIDFLEAKGYKEVKKDLIIKLPKYSLFELENGRKRMLASAGELQKGNELALPSKYVNFLYLASHYEKLKGSPEDNEQKQLFVEQHKHYLDEIIEQISEFSKRVILADANLDKVLSAYNKHRDKPIREQAENIIHLFTLTNLGAPAAFKYFDTTIDRKRYTSTKEVLDATLIHQSITGLYETRIDLSQLGGDGGPAPGSSEAAAKGGLGIEDEYRLHETSTEPDVSLGSTWLSDFPQAWAETGGMGLAVRQAPLIIPLKATSTPVSIQQYPMSHEARLGIKPHIQRLLDQGILVPCQSPWNTPLLPVKKPGTNDYRPVQDLREVNKRVEDIHPTVPNPYNLLSGLPPSHQWYTVLDLKDAFFCLRLHPTSQPLFAFEWRDPGMGISGQLTWTRLPQGFKNSPTLFNEALHRDLADFRIQHPDLILLQYVDDILLAATSELDCQQGTRALLQTLGDLGYRASAKKAQICQKQVKYLGYLLREGQRWLTEARKETVMGQPVPKTPRQLREFLGKAGFCRLFIPGFAEMAAPLYPLTKPGTLFSWGPDQQKAYQEIKQALLTAPALGLPDLTKPFELFVDEKQGYAKGVLTQKLGPWRRPVAYLSKKLDPVAAGWPPCLRMVAAIAVLTKDAGKLTMGQPLVILAPHAVEALVKQPPDRWLSNARMTHYQAMLLDTDRVQFGPVVALNPATLLPLPEEGAPHDCLEILAETHGTRPDLTDQPIPDADHTWYTDGSSFLQEGQRKAGAAVTTETEVIWAGALPAGTSAQRAELIALTQALKMAEGKRLNVYTDSRYAFATAHIHGEIYRRRGWLTSEGREIKNKSEILALLKALFLPKRLSIIHCLGHQKGDSAEARGNRLADQAAREAAIKTPPDTSTLLIAGKRTADGSEFEKRTADGSEFESPKKKAKVE

SEQ ID NO: 2051 - protein, 2094 aa, synthetic construct
MPAAKRVKLDGGDKKYSIGLDIGTNSVGWAVITDEYKVPSKKFKVLGNTDRHSIKKNLIGALLFDSGETAEATRLKRTARRRYTRRKNRICYLQEIFSNEMAKVDDSFFHRLEESFLVEEDKKHERHPIFGNIVDEVAYHEKYPTIYHLRKKLVDSTDKADLRLIYLALAHMIKFRGHFLIEGDLNPDNSDVDKLFIQLVQTYNQLFEENPINASGVDAKAILSARLSKSRRLENLIAQLPGEKKNGLFGNLIALSLGLTPNFKSNFDLAEDAKLQLSKDTYDDDLDNLLAQIGDQYADLFLAAKNLSDAILLSDILRVNTEITKAPLSASMIKRYDEHHQDLTLLKALVRQQLPEKYKEIFFDQSKNGYAGYIDGGASQEEFYKFIKPILEKMDGTEELLVKLNREDLLRKQRTFDNGSIPHQIHLGELHAILRRQEDFYPFLKDNREKIEKILTFRIPYYVGPLARGNSRFAWMTRKSEETITPWNFEEVVDKGASAQSFIERMTNFDKNLPNEKVLPKHSLLYEYFTVYNELTKVKYVTEGMRKPAFLSGEQKKAIVDLLFKTNRKVTVKQLKEDYFKKIECFDSVEISGVEDRFNASLGTYHDLLKIIKDKDFLDNEENEDILEDIVLTLTLFEDREMIEERLKTYAHLFDDKVMKQLKRRRYTGWGRLSRKLINGIRDKQSGKTILDFLKSDGFANRNFMQLIHDDSLTFKEDIQKAQVSGQGDSLHEHIANLAGSPAIKKGILQTVKVVDELVKVMGRHKPENIVIEMARENQTTQKGQKNSRERMKRIEEGIKELGSQILKEHPVENTQLQNEKLYLYYLQNGRDMYVDQELDINRLSDYDVDHIVPQSFLKDDSIDNKVLTRSDKARGKSDNVPSEEVVKKMKNYWRQLLNAKLITQRKFDNLTKAERGGLSELDKAGFIKRQLVETRQITKHVAQILDSRMNTKYDENDKLIREVKVITLKSKLVSDFRKDFQFYKVREINNYHHAHDAYLNAVVGTALIKKYPKLESEFVYGDYKVYDVRKMIAKSEQEIGKATAKYFFYSNIMNFFKTEITLANGEIRKRPLIETNGETGEIVWDKGRDFATVRKVLSMPQVNIVKKTEVQTGGFSKESILPKRNSDKLIARKKDWDPKKYGGFDSPTVAYSVLVVAKVEKGKSKKLKSVKELLGITIMERSSFEKNPIDFLEAKGYKEVKKDLIIKLPKYSLFELENGRKRMLASAGELQKGNELALPSKYVNFLYLASHYEKLKGSPEDNEQKQLFVEQHKHYLDEIIEQISEFSKRVILADANLDKVLSAYNKHRDKPIREQAENIIHLFTLTNLGAPAAFKYFDTTIDRKRYTSTKEVLDATLIHQSITGLYETRIDLSQLGGDGGGGSPAPGSSGGLGIEDEYRLHETSTEPDVSLGSTWLSDFPQAWAETGGMGLAVRQAPLIIPLKATSTPVSIQQYPMSHEARLGIKPHIQRLLDQGILVPCQSPWNTPLLPVKKPGTNDYRPVQDLREVNKRVEDIHPTVPNPYNLLSGLPPSHQWYTVLDLKDAFFCLRLHPTSQPLFAFEWRDPGMGISGQLTWTRLPQGFKNSPTLFNEALHRDLADFRIQHPDLILLQYVDDILLAATSELDCQQGTRALLQTLGDLGYRASAKKAQICQKQVKYLGYLLREGQRWLTEARKETVMGQPVPKTPRQLREFLGKAGFCRLFIPGFAEMAAPLYPLTKPGTLFSWGPDQQKAYQEIKQALLTAPALGLPDLTKPFELFVDEKQGYAKGVLTQKLGPWRRPVAYLSKKLDPVAAGWPPCLRMVAAIAVLTKDAGKLTMGQPLVILAPHAVEALVKQPPDRWLSNARMTHYQAMLLDTDRVQFGPVVALNPATLLPLPEEGAPHDCLEILAETHGTRPDLTDQPIPDADHTWYTDGSSFLQEGQRKAGAAVTTETEVIWAGALPAGTSAQRAELIALTQALKMAEGKRLNVYTDSRYAFATAHIHGEIYRRRGWLTSEGREIKNKSEILALLKALFLPKRLSIIHCLGHQKGDSAEARGNRLADQAAREAAIKTPPDTSTLLIAGKRTADGSEFEKRTADGSEFESPKKKAKVE

SEQ ID NO: 2052 - protein, 2096 aa, synthetic construct
MPAAKRVKLDGGDKKYSIGLDIGTNSVGWAVITDEYKVPSKKFKVLGNTDRHSIKKNLIGALLFDSGETAEATRLKRTARRRYTRRKNRICYLQEIFSNEMAKVDDSFFHRLEESFLVEEDKKHERHPIFGNIVDEVAYHEKYPTIYHLRKKLVDSTDKADLRLIYLALAHMIKFRGHFLIEGDLNPDNSDVDKLFIQLVQTYNQLFEENPINASGVDAKAILSARLSKSRRLENLIAQLPGEKKNGLFGNLIALSLGLTPNFKSNFDLAEDAKLQLSKDTYDDDLDNLLAQIGDQYADLFLAAKNLSDAILLSDILRVNTEITKAPLSASMIKRYDEHHQDLTLLKALVRQQLPEKYKEIFFDQSKNGYAGYIDGGASQEEFYKFIKPILEKMDGTEELLVKLNREDLLRKQRTFDNGSIPHQIHLGELHAILRRQEDFYPFLKDNREKIEKILTFRIPYYVGPLARGNSRFAWMTRKSEETITPWNFEEVVDKGASAQSFIERMTNFDKNLPNEKVLPKHSLLYEYFTVYNELTKVKYVTEGMRKPAFLSGEQKKAIVDLLFKTNRKVTVKQLKEDYFKKIECFDSVEISGVEDRFNASLGTYHDLLKIIKDKDFLDNEENEDILEDIVLTLTLFEDREMIEERLKTYAHLFDDKVMKQLKRRRYTGWGRLSRKLINGIRDKQSGKTILDFLKSDGFANRNFMQLIHDDSLTFKEDIQKAQVSGQGDSLHEHIANLAGSPAIKKGILQTVKVVDELVKVMGRHKPENIVIEMARENQTTQKGQKNSRERMKRIEEGIKELGSQILKEHPVENTQLQNEKLYLYYLQNGRDMYVDQELDINRLSDYDVDHIVPQSFLKDDSIDNKVLTRSDKARGKSDNVPSEEVVKKMKNYWRQLLNAKLITQRKFDNLTKAERGGLSELDKAGFIKRQLVETRQITKHVAQILDSRMNTKYDENDKLIREVKVITLKSKLVSDFRKDFQFYKVREINNYHHAHDAYLNAVVGTALIKKYPKLESEFVYGDYKVYDVRKMIAKSEQEIGKATAKYFFYSNIMNFFKTEITLANGEIRKRPLIETNGETGEIVWDKGRDFATVRKVLSMPQVNIVKKTEVQTGGFSKESILPKRNSDKLIARKKDWDPKKYGGFDSPTVAYSVLVVAKVEKGKSKKLKSVKELLGITIMERSSFEKNPIDFLEAKGYKEVKKDLIIKLPKYSLFELENGRKRMLASAGELQKGNELALPSKYVNFLYLASHYEKLKGSPEDNEQKQLFVEQHKHYLDEIIEQISEFSKRVILADANLDKVLSAYNKHRDKPIREQAENIIHLFTLTNLGAPAAFKYFDTTIDRKRYTSTKEVLDATLIHQSITGLYETRIDLSQLGGDGGEAAAKGSSPAPGGLGIEDEYRLHETSTEPDVSLGSTWLSDFPQAWAETGGMGLAVRQAPLIIPLKATSTPVSIQQYPMSHEARLGIKPHIQRLLDQGILVPCQSPWNTPLLPVKKPGTNDYRPVQDLREVNKRVEDIHPTVPNPYNLLSGLPPSHQWYTVLDLKDAFFCLRLHPTSQPLFAFEWRDPGMGISGQLTWTRLPQGFKNSPTLFNEALHRDLADFRIQHPDLILLQYVDDILLAATSELDCQQGTRALLQTLGDLGYRASAKKAQICQKQVKYLGYLLREGQRWLTEARKETVMGQPVPKTPRQLREFLGKAGFCRLFIPGFAEMAAPLYPLTKPGTLFSWGPDQQKAYQEIKQALLTAPALGLPDLTKPFELFVDEKQGYAKGVLTQKLGPWRRPVAYLSKKLDPVAAGWPPCLRMVAAIAVLTKDAGKLTMGQPLVILAPHAVEALVKQPPDRWLSNARMTHYQAMLLDTDRVQFGPVVALNPATLLPLPEEGAPHDCLEILAETHGTRPDLTDQPIPDADHTWYTDGSSFLQEGQRKAGAAVTTETEVIWAGALPAGTSAQRAELIALTQALKMAEGKRLNVYTDSRYAFATAHIHGEIYRRRGWLTSEGREIKNKSEILALLKALFLPKRLSIIHCLGHQKGDSAEARGNRLADQAAREAAIKTPPDTSTLLIAGKRTADGSEFEKRTADGSEFESPKKKAKVE

SEQ ID NO: 2053 - protein, 2088 aa, synthetic construct
MPAAKRVKLDGGDKKYSIGLDIGTNSVGWAVITDEYKVPSKKFKVLGNTDRHSIKKNLIGALLFDSGETAEATRLKRTARRRYTRRKNRICYLQEIFSNEMAKVDDSFFHRLEESFLVEEDKKHERHPIFGNIVDEVAYHEKYPTIYHLRKKLVDSTDKADLRLIYLALAHMIKFRGHFLIEGDLNPDNSDVDKLFIQLVQTYNQLFEENPINASGVDAKAILSARLSKSRRLENLIAQLPGEKKNGLFGNLIALSLGLTPNFKSNFDLAEDAKLQLSKDTYDDDLDNLLAQIGDQYADLFLAAKNLSDAILLSDILRVNTEITKAPLSASMIKRYDEHHQDLTLLKALVRQQLPEKYKEIFFDQSKNGYAGYIDGGASQEEFYKFIKPILEKMDGTEELLVKLNREDLLRKQRTFDNGSIPHQIHLGELHAILRRQEDFYPFLKDNREKIEKILTFRIPYYVGPLARGNSRFAWMTRKSEETITPWNFEEVVDKGASAQSFIERMTNFDKNLPNEKVLPKHSLLYEYFTVYNELTKVKYVTEGMRKPAFLSGEQKKAIVDLLFKTNRKVTVKQLKEDYFKKIECFDSVEISGVEDRFNASLGTYHDLLKIIKDKDFLDNEENEDILEDIVLTLTLFEDREMIEERLKTYAHLFDDKVMKQLKRRRYTGWGRLSRKLINGIRDKQSGKTILDFLKSDGFANRNFMQLIHDDSLTFKEDIQKAQVSGQGDSLHEHIANLAGSPAIKKGILQTVKVVDELVKVMGRHKPENIVIEMARENQTTQKGQKNSRERMKRIEEGIKELGSQILKEHPVENTQLQNEKLYLYYLQNGRDMYVDQELDINRLSDYDVDHIVPQSFLKDDSIDNKVLTRSDKARGKSDNVPSEEVVKKMKNYWRQLLNAKLITQRKFDNLTKAERGGLSELDKAGFIKRQLVETRQITKHVAQILDSRMNTKYDENDKLIREVKVITLKSKLVSDFRKDFQFYKVREINNYHHAHDAYLNAVVGTALIKKYPKLESEFVYGDYKVYDVRKMIAKSEQEIGKATAKYFFYSNIMNFFKTEITLANGEIRKRPLIETNGETGEIVWDKGRDFATVRKVLSMPQVNIVKKTEVQTGGFSKESILPKRNSDKLIARKKDWDPKKYGGFDSPTVAYSVLVVAKVEKGKSKKLKSVKELLGITIMERSSFEKNPIDFLEAKGYKEVKKDLIIKLPKYSLFELENGRKRMLASAGELQKGNELALPSKYVNFLYLASHYEKLKGSPEDNEQKQLFVEQHKHYLDEIIEQISEFSKRVILADANLDKVLSAYNKHRDKPIREQAENIIHLFTLTNLGAPAAFKYFDTTIDRKRYTSTKEVLDATLIHQSITGLYETRIDLSQLGGDGGGSSGGLGIEDEYRLHETSTEPDVSLGSTWLSDFPQAWAETGGMGLAVRQAPLIIPLKATSTPVSIQQYPMSHEARLGIKPHIQRLLDQGILVPCQSPWNTPLLPVKKPGTNDYRPVQDLREVNKRVEDIHPTVPNPYNLLSGLPPSHQWYTVLDLKDAFFCLRLHPTSQPLFAFEWRDPGMGISGQLTWTRLPQGFKNSPTLFNEALHRDLADFRIQHPDLILLQYVDDILLAATSELDCQQGTRALLQTLGDLGYRASAKKAQICQKQVKYLGYLLREGQRWLTEARKETVMGQPVPKTPRQLREFLGKAGFCRLFIPGFAEMAAPLYPLTKPGTLFSWGPDQQKAYQEIKQALLTAPALGLPDLTKPFELFVDEKQGYAKGVLTQKLGPWRRPVAYLSKKLDPVAAGWPPCLRMVAAIAVLTKDAGKLTMGQPLVILAPHAVEALVKQPPDRWLSNARMTHYQAMLLDTDRVQFGPVVALNPATLLPLPEEGAPHDCLEILAETHGTRPDLTDQPIPDADHTWYTDGSSFLQEGQRKAGAAVTTETEVIWAGALPAGTSAQRAELIALTQALKMAEGKRLNVYTDSRYAFATAHIHGEIYRRRGWLTSEGREIKNKSEILALLKALFLPKRLSIIHCLGHQKGDSAEARGNRLADQAAREAAIKTPPDTSTLLIAGKRTADGSEFEKRTADGSEFESPKKKAKVE

SEQ ID NO: 2054 - protein, 2096 aa, synthetic construct
MPAAKRVKLDGGDKKYSIGLDIGTNSVGWAVITDEYKVPSKKFKVLGNTDRHSIKKNLIGALLFDSGETAEATRLKRTARRRYTRRKNRICYLQEIFSNEMAKVDDSFFHRLEESFLVEEDKKHERHPIFGNIVDEVAYHEKYPTIYHLRKKLVDSTDKADLRLIYLALAHMIKFRGHFLIEGDLNPDNSDVDKLFIQLVQTYNQLFEENPINASGVDAKAILSARLSKSRRLENLIAQLPGEKKNGLFGNLIALSLGLTPNFKSNFDLAEDAKLQLSKDTYDDDLDNLLAQIGDQYADLFLAAKNLSDAILLSDILRVNTEITKAPLSASMIKRYDEHHQDLTLLKALVRQQLPEKYKEIFFDQSKNGYAGYIDGGASQEEFYKFIKPILEKMDGTEELLVKLNREDLLRKQRTFDNGSIPHQIHLGELHAILRRQEDFYPFLKDNREKIEKILTFRIPYYVGPLARGNSRFAWMTRKSEETITPWNFEEVVDKGASAQSFIERMTNFDKNLPNEKVLPKHSLLYEYFTVYNELTKVKYVTEGMRKPAFLSGEQKKAIVDLLFKTNRKVTVKQLKEDYFKKIECFDSVEISGVEDRFNASLGTYHDLLKIIKDKDFLDNEENEDILEDIVLTLTLFEDREMIEERLKTYAHLFDDKVMKQLKRRRYTGWGRLSRKLINGIRDKQSGKTILDFLKSDGFANRNFMQLIHDDSLTFKEDIQKAQVSGQGDSLHEHIANLAGSPAIKKGILQTVKVVDELVKVMGRHKPENIVIEMARENQTTQKGQKNSRERMKRIEEGIKELGSQILKEHPVENTQLQNEKLYLYYLQNGRDMYVDQELDINRLSDYDVDHIVPQSFLKDDSIDNKVLTRSDKARGKSDNVPSEEVVKKMKNYWRQLLNAKLITQRKFDNLTKAERGGLSELDKAGFIKRQLVETRQITKHVAQILDSRMNTKYDENDKLIREVKVITLKSKLVSDFRKDFQFYKVREINNYHHAHDAYLNAVVGTALIKKYPKLESEFVYGDYKVYDVRKMIAKSEQEIGKATAKYFFYSNIMNFFKTEITLANGEIRKRPLIETNGETGEIVWDKGRDFATVRKVLSMPQVNIVKKTEVQTGGFSKESILPKRNSDKLIARKKDWDPKKYGGFDSPTVAYSVLVVAKVEKGKSKKLKSVKELLGITIMERSSFEKNPIDFLEAKGYKEVKKDLIIKLPKYSLFELENGRKRMLASAGELQKGNELALPSKYVNFLYLASHYEKLKGSPEDNEQKQLFVEQHKHYLDEIIEQISEFSKRVILADANLDKVLSAYNKHRDKPIREQAENIIHLFTLTNLGAPAAFKYFDTTIDRKRYTSTKEVLDATLIHQSITGLYETRIDLSQLGGDGGEAAAKGGGPAPGGLGIEDEYRLHETSTEPDVSLGSTWLSDFPQAWAETGGMGLAVRQAPLIIPLKATSTPVSIQQYPMSHEARLGIKPHIQRLLDQGILVPCQSPWNTPLLPVKKPGTNDYRPVQDLREVNKRVEDIHPTVPNPYNLLSGLPPSHQWYTVLDLKDAFFCLRLHPTSQPLFAFEWRDPGMGISGQLTWTRLPQGFKNSPTLFNEALHRDLADFRIQHPDLILLQYVDDILLAATSELDCQQGTRALLQTLGDLGYRASAKKAQICQKQVKYLGYLLREGQRWLTEARKETVMGQPVPKTPRQLREFLGKAGFCRLFIPGFAEMAAPLYPLTKPGTLFSWGPDQQKAYQEIKQALLTAPALGLPDLTKPFELFVDEKQGYAKGVLTQKLGPWRRPVAYLSKKLDPVAAGWPPCLRMVAAIAVLTKDAGKLTMGQPLVILAPHAVEALVKQPPDRWLSNARMTHYQAMLLDTDRVQFGPVVALNPATLLPLPEEGAPHDCLEILAETHGTRPDLTDQPIPDADHTWYTDGSSFLQEGQRKAGAAVTTETEVIWAGALPAGTSAQRAELIALTQALKMAEGKRLNVYTDSRYAFATAHIHGEIYRRRGWLTSEGREIKNKSEILALLKALFLPKRLSIIHCLGHQKGDSAEARGNRLADQAAREAAIKTPPDTSTLLIAGKRTADGSEFEKRTADGSEFESPKKKAKVE

SEQ ID NO: 2055 - protein, 2096 aa, synthetic construct
MPAAKRVKLDGGDKKYSIGLDIGTNSVGWAVITDEYKVPSKKFKVLGNTDRHSIKKNLIGALLFDSGETAEATRLKRTARRRYTRRKNRICYLQEIFSNEMAKVDDSFFHRLEESFLVEEDKKHERHPIFGNIVDEVAYHEKYPTIYHLRKKLVDSTDKADLRLIYLALAHMIKFRGHFLIEGDLNPDNSDVDKLFIQLVQTYNQLFEENPINASGVDAKAILSARLSKSRRLENLIAQLPGEKKNGLFGNLIALSLGLTPNFKSNFDLAEDAKLQLSKDTYDDDLDNLLAQIGDQYADLFLAAKNLSDAILLSDILRVNTEITKAPLSASMIKRYDEHHQDLTLLKALVRQQLPEKYKEIFFDQSKNGYAGYIDGGASQEEFYKFIKPILEKMDGTEELLVKLNREDLLRKQRTFDNGSIPHQIHLGELHAILRRQEDFYPFLKDNREKIEKILTFRIPYYVGPLARGNSRFAWMTRKSEETITPWNFEEVVDKGASAQSFIERMTNFDKNLPNEKVLPKHSLLYEYFTVYNELTKVKYVTEGMRKPAFLSGEQKKAIVDLLFKTNRKVTVKQLKEDYFKKIECFDSVEISGVEDRFNASLGTYHDLLKIIKDKDFLDNEENEDILEDIVLTLTLFEDREMIEERLKTYAHLFDDKVMKQLKRRRYTGWGRLSRKLINGIRDKQSGKTILDFLKSDGFANRNFMQLIHDDSLTFKEDIQKAQVSGQGDSLHEHIANLAGSPAIKKGILQTVKVVDELVKVMGRHKPENIVIEMARENQTTQKGQKNSRERMKRIEEGIKELGSQILKEHPVENTQLQNEKLYLYYLQNGRDMYVDQELDINRLSDYDVDHIVPQSFLKDDSIDNKVLTRSDKARGKSDNVPSEEVVKKMKNYWRQLLNAKLITQRKFDNLTKAERGGLSELDKAGFIKRQLVETRQITKHVAQILDSRMNTKYDENDKLIREVKVITLKSKLVSDFRKDFQFYKVREINNYHHAHDAYLNAVVGTALIKKYPKLESEFVYGDYKVYDVRKMIAKSEQEIGKATAKYFFYSNIMNFFKTEITLANGEIRKRPLIETNGETGEIVWDKGRDFATVRKVLSMPQVNIVKKTEVQTGGFSKESILPKRNSDKLIARKKDWDPKKYGGFDSPTVAYSVLVVAKVEKGKSKKLKSVKELLGITIMERSSFEKNPIDFLEAKGYKEVKKDLIIKLPKYSLFELENGRKRMLASAGELQKGNELALPSKYVNFLYLASHYEKLKGSPEDNEQKQLFVEQHKHYLDEIIEQISEFSKRVILADANLDKVLSAYNKHRDKPIREQAENIIHLFTLTNLGAPAAFKYFDTTIDRKRYTSTKEVLDATLIHQSITGLYETRIDLSQLGGDGGEAAAKGGSGSSGGLGIEDEYRLHETSTEPDVSLGSTWLSDFPQAWAETGGMGLAVRQAPLIIPLKATSTPVSIQQYPMSHEARLGIKPHIQRLLDQGILVPCQSPWNTPLLPVKKPGTNDYRPVQDLREVNKRVEDIHPTVPNPYNLLSGLPPSHQWYTVLDLKDAFFCLRLHPTSQPLFAFEWRDPGMGISGQLTWTRLPQGFKNSPTLFNEALHRDLADFRIQHPDLILLQYVDDILLAATSELDCQQGTRALLQTLGDLGYRASAKKAQICQKQVKYLGYLLREGQRWLTEARKETVMGQPVPKTPRQLREFLGKAGFCRLFIPGFAEMAAPLYPLTKPGTLFSWGPDQQKAYQEIKQALLTAPALGLPDLTKPFELFVDEKQGYAKGVLTQKLGPWRRPVAYLSKKLDPVAAGWPPCLRMVAAIAVLTKDAGKLTMGQPLVILAPHAVEALVKQPPDRWLSNARMTHYQAMLLDTDRVQFGPVVALNPATLLPLPEEGAPHDCLEILAETHGTRPDLTDQPIPDADHTWYTDGSSFLQEGQRKAGAAVTTETEVIWAGALPAGTSAQRAELIALTQALKMAEGKRLNVYTDSRYAFATAHIHGEIYRRRGWLTSEGREIKNKSEILALLKALFLPKRLSIIHCLGHQKGDSAEARGNRLADQAAREAAIKTPPDTSTLLIAGKRTADGSEFEKRTADGSEFESPKKKAKVE

SEQ ID NO: 2056 - protein, 2097 aa, synthetic construct
MPAAKRVKLDGGDKKYSIGLDIGTNSVGWAVITDEYKVPSKKFKVLGNTDRHSIKKNLIGALLFDSGETAEATRLKRTARRRYTRRKNRICYLQEIFSNEMAKVDDSFFHRLEESFLVEEDKKHERHPIFGNIVDEVAYHEKYPTIYHLRKKLVDSTDKADLRLIYLALAHMIKFRGHFLIEGDLNPDNSDVDKLFIQLVQTYNQLFEENPINASGVDAKAILSARLSKSRRLENLIAQLPGEKKNGLFGNLIALSLGLTPNFKSNFDLAEDAKLQLSKDTYDDDLDNLLAQIGDQYADLFLAAKNLSDAILLSDILRVNTEITKAPLSASMIKRYDEHHQDLTLLKALVRQQLPEKYKEIFFDQSKNGYAGYIDGGASQEEFYKFIKPILEKMDGTEELLVKLNREDLLRKQRTFDNGSIPHQIHLGELHAILRRQEDFYPFLKDNREKIEKILTFRIPYYVGPLARGNSRFAWMTRKSEETITPWNFEEVVDKGASAQSFIERMTNFDKNLPNEKVLPKHSLLYEYFTVYNELTKVKYVTEGMRKPAFLSGEQKKAIVDLLFKTNRKVTVKQLKEDYFKKIECFDSVEISGVEDRFNASLGTYHDLLKIIKDKDFLDNEENEDILEDIVLTLTLFEDREMIEERLKTYAHLFDDKVMKQLKRRRYTGWGRLSRKLINGIRDKQSGKTILDFLKSDGFANRNFMQLIHDDSLTFKEDIQKAQVSGQGDSLHEHIANLAGSPAIKKGILQTVKVVDELVKVMGRHKPENIVIEMARENQTTQKGQKNSRERMKRIEEGIKELGSQILKEHPVENTQLQNEKLYLYYLQNGRDMYVDQELDINRLSDYDVDHIVPQSFLKDDSIDNKVLTRSDKARGKSDNVPSEEVVKKMKNYWRQLLNAKLITQRKFDNLTKAERGGLSELDKAGFIKRQLVETRQITKHVAQILDSRMNTKYDENDKLIREVKVITLKSKLVSDFRKDFQFYKVREINNYHHAHDAYLNAVVGTALIKKYPKLESEFVYGDYKVYDVRKMIAKSEQEIGKATAKYFFYSNIMNFFKTEITLANGEIRKRPLIETNGETGEIVWDKGRDFATVRKVLSMPQVNIVKKTEVQTGGFSKESILPKRNSDKLIARKKDWDPKKYGGFDSPTVAYSVLVVAKVEKGKSKKLKSVKELLGITIMERSSFEKNPIDFLEAKGYKEVKKDLIIKLPKYSLFELENGRKRMLASAGELQKGNELALPSKYVNFLYLASHYEKLKGSPEDNEQKQLFVEQHKHYLDEIIEQISEFSKRVILADANLDKVLSAYNKHRDKPIREQAENIIHLFTLTNLGAPAAFKYFDTTIDRKRYTSTKEVLDATLIHQSITGLYETRIDLSQLGGDGGGSAGSAAGSGEFGGLGIEDEYRLHETSTEPDVSLGSTWLSDFPQAWAETGGMGLAVRQAPLIIPLKATSTPVSIQQYPMSHEARLGIKPHIQRLLDQGILVPCQSPWNTPLLPVKKPGTNDYRPVQDLREVNKRVEDIHPTVPNPYNLLSGLPPSHQWYTVLDLKDAFFCLRLHPTSQPLFAFEWRDPGMGISGQLTWTRLPQGFKNSPTLFNEALHRDLADFRIQHPDLILLQYVDDILLAATSELDCQQGTRALLQTLGDLGYRASAKKAQICQKQVKYLGYLLREGQRWLTEARKETVMGQPVPKTPRQLREFLGKAGFCRLFIPGFAEMAAPLYPLTKPGTLFSWGPDQQKAYQEIKQALLTAPALGLPDLTKPFELFVDEKQGYAKGVLTQKLGPWRRPVAYLSKKLDPVAAGWPPCLRMVAAIAVLTKDAGKLTMGQPLVILAPHAVEALVKQPPDRWLSNARMTHYQAMLLDTDRVQFGPVVALNPATLLPLPEEGAPHDCLEILAETHGTRPDLTDQPIPDADHTWYTDGSSFLQEGQRKAGAAVTTETEVIWAGALPAGTSAQRAELIALTQALKMAEGKRLNVYTDSRYAFATAHIHGEIYRRRGWLTSEGREIKNKSEILALLKALFLPKRLSIIHCLGHQKGDSAEARGNRLADQAAREAAIKTPPDTSTLLIAGKRTADGSEFEKRTADGSEFESPKKKAKVE

SEQ ID NO: 2057 - protein, 2091 aa, synthetic construct
MPAAKRVKLDGGDKKYSIGLDIGTNSVGWAVITDEYKVPSKKFKVLGNTDRHSIKKNLIGALLFDSGETAEATRLKRTARRRYTRRKNRICYLQEIFSNEMAKVDDSFFHRLEESFLVEEDKKHERHPIFGNIVDEVAYHEKYPTIYHLRKKLVDSTDKADLRLIYLALAHMIKFRGHFLIEGDLNPDNSDVDKLFIQLVQTYNQLFEENPINASGVDAKAILSARLSKSRRLENLIAQLPGEKKNGLFGNLIALSLGLTPNFKSNFDLAEDAKLQLSKDTYDDDLDNLLAQIGDQYADLFLAAKNLSDAILLSDILRVNTEITKAPLSASMIKRYDEHHQDLTLLKALVRQQLPEKYKEIFFDQSKNGYAGYIDGGASQEEFYKFIKPILEKMDGTEELLVKLNREDLLRKQRTFDNGSIPHQIHLGELHAILRRQEDFYPFLKDNREKIEKILTFRIPYYVGPLARGNSRFAWMTRKSEETITPWNFEEVVDKGASAQSFIERMTNFDKNLPNEKVLPKHSLLYEYFTVYNELTKVKYVTEGMRKPAFLSGEQKKAIVDLLFKTNRKVTVKQLKEDYFKKIECFDSVEISGVEDRFNASLGTYHDLLKIIKDKDFLDNEENEDILEDIVLTLTLFEDREMIEERLKTYAHLFDDKVMKQLKRRRYTGWGRLSRKLINGIRDKQSGKTILDFLKSDGFANRNFMQLIHDDSLTFKEDIQKAQVSGQGDSLHEHIANLAGSPAIKKGILQTVKVVDELVKVMGRHKPENIVIEMARENQTTQKGQKNSRERMKRIEEGIKELGSQILKEHPVENTQLQNEKLYLYYLQNGRDMYVDQELDINRLSDYDVDHIVPQSFLKDDSIDNKVLTRSDKARGKSDNVPSEEVVKKMKNYWRQLLNAKLITQRKFDNLTKAERGGLSELDKAGFIKRQLVETRQITKHVAQILDSRMNTKYDENDKLIREVKVITLKSKLVSDFRKDFQFYKVREINNYHHAHDAYLNAVVGTALIKKYPKLESEFVYGDYKVYDVRKMIAKSEQEIGKATAKYFFYSNIMNFFKTEITLANGEIRKRPLIETNGETGEIVWDKGRDFATVRKVLSMPQVNIVKKTEVQTGGFSKESILPKRNSDKLIARKKDWDPKKYGGFDSPTVAYSVLVVAKVEKGKSKKLKSVKELLGITIMERSSFEKNPIDFLEAKGYKEVKKDLIIKLPKYSLFELENGRKRMLASAGELQKGNELALPSKYVNFLYLASHYEKLKGSPEDNEQKQLFVEQHKHYLDEIIEQISEFSKRVILADANLDKVLSAYNKHRDKPIREQAENIIHLFTLTNLGAPAAFKYFDTTIDRKRYTSTKEVLDATLIHQSITGLYETRIDLSQLGGDGGPAPGSSGGLGIEDEYRLHETSTEPDVSLGSTWLSDFPQAWAETGGMGLAVRQAPLIIPLKATSTPVSIQQYPMSHEARLGIKPHIQRLLDQGILVPCQSPWNTPLLPVKKPGTNDYRPVQDLREVNKRVEDIHPTVPNPYNLLSGLPPSHQWYTVLDLKDAFFCLRLHPTSQPLFAFEWRDPGMGISGQLTWTRLPQGFKNSPTLFNEALHRDLADFRIQHPDLILLQYVDDILLAATSELDCQQGTRALLQTLGDLGYRASAKKAQICQKQVKYLGYLLREGQRWLTEARKETVMGQPVPKTPRQLREFLGKAGFCRLFIPGFAEMAAPLYPLTKPGTLFSWGPDQQKAYQEIKQALLTAPALGLPDLTKPFELFVDEKQGYAKGVLTQKLGPWRRPVAYLSKKLDPVAAGWPPCLRMVAAIAVLTKDAGKLTMGQPLVILAPHAVEALVKQPPDRWLSNARMTHYQAMLLDTDRVQFGPVVALNPATLLPLPEEGAPHDCLEILAETHGTRPDLTDQPIPDADHTWYTDGSSFLQEGQRKAGAAVTTETEVIWAGALPAGTSAQRAELIALTQALKMAEGKRLNVYTDSRYAFATAHIHGEIYRRRGWLTSEGREIKNKSEILALLKALFLPKRLSIIHCLGHQKGDSAEARGNRLADQAAREAAIKTPPDTSTLLIAGKRTADGSEFEKRTADGSEFESPKKKAKVE

SEQ ID NO: 2058 - protein, 2094 aa, synthetic construct
MPAAKRVKLDGGDKKYSIGLDIGTNSVGWAVITDEYKVPSKKFKVLGNTDRHSIKKNLIGALLFDSGETAEATRLKRTARRRYTRRKNRICYLQEIFSNEMAKVDDSFFHRLEESFLVEEDKKHERHPIFGNIVDEVAYHEKYPTIYHLRKKLVDSTDKADLRLIYLALAHMIKFRGHFLIEGDLNPDNSDVDKLFIQLVQTYNQLFEENPINASGVDAKAILSARLSKSRRLENLIAQLPGEKKNGLFGNLIALSLGLTPNFKSNFDLAEDAKLQLSKDTYDDDLDNLLAQIGDQYADLFLAAKNLSDAILLSDILRVNTEITKAPLSASMIKRYDEHHQDLTLLKALVRQQLPEKYKEIFFDQSKNGYAGYIDGGASQEEFYKFIKPILEKMDGTEELLVKLNREDLLRKQRTFDNGSIPHQIHLGELHAILRRQEDFYPFLKDNREKIEKILTFRIPYYVGPLARGNSRFAWMTRKSEETITPWNFEEVVDKGASAQSFIERMTNFDKNLPNEKVLPKHSLLYEYFTVYNELTKVKYVTEGMRKPAFLSGEQKKAIVDLLFKTNRKVTVKQLKEDYFKKIECFDSVEISGVEDRFNASLGTYHDLLKIIKDKDFLDNEENEDILEDIVLTLTLFEDREMIEERLKTYAHLFDDKVMKQLKRRRYTGWGRLSRKLINGIRDKQSGKTILDFLKSDGFANRNFMQLIHDDSLTFKEDIQKAQVSGQGDSLHEHIANLAGSPAIKKGILQTVKVVDELVKVMGRHKPENIVIEMARENQTTQKGQKNSRERMKRIEEGIKELGSQILKEHPVENTQLQNEKLYLYYLQNGRDMYVDQELDINRLSDYDVDHIVPQSFLKDDSIDNKVLTRSDKARGKSDNVPSEEVVKKMKNYWRQLLNAKLITQRKFDNLTKAERGGLSELDKAGFIKRQLVETRQITKHVAQILDSRMNTKYDENDKLIREVKVITLKSKLVSDFRKDFQFYKVREINNYHHAHDAYLNAVVGTALIKKYPKLESEFVYGDYKVYDVRKMIAKSEQEIGKATAKYFFYSNIMNFFKTEITLANGEIRKRPLIETNGETGEIVWDKGRDFATVRKVLSMPQVNIVKKTEVQTGGFSKESILPKRNSDKLIARKKDWDPKKYGGFDSPTVAYSVLVVAKVEKGKSKKLKSVKELLGITIMERSSFEKNPIDFLEAKGYKEVKKDLIIKLPKYSLFELENGRKRMLASAGELQKGNELALPSKYVNFLYLASHYEKLKGSPEDNEQKQLFVEQHKHYLDEIIEQISEFSKRVILADANLDKVLSAYNKHRDKPIREQAENIIHLFTLTNLGAPAAFKYFDTTIDRKRYTSTKEVLDATLIHQSITGLYETRIDLSQLGGDGGGGSPAPGGGGGLGIEDEYRLHETSTEPDVSLGSTWLSDFPQAWAETGGMGLAVRQAPLIIPLKATSTPVSIQQYPMSHEARLGIKPHIQRLLDQGILVPCQSPWNTPLLPVKKPGTNDYRPVQDLREVNKRVEDIHPTVPNPYNLLSGLPPSHQWYTVLDLKDAFFCLRLHPTSQPLFAFEWRDPGMGISGQLTWTRLPQGFKNSPTLFNEALHRDLADFRIQHPDLILLQYVDDILLAATSELDCQQGTRALLQTLGDLGYRASAKKAQICQKQVKYLGYLLREGQRWLTEARKETVMGQPVPKTPRQLREFLGKAGFCRLFIPGFAEMAAPLYPLTKPGTLFSWGPDQQKAYQEIKQALLTAPALGLPDLTKPFELFVDEKQGYAKGVLTQKLGPWRRPVAYLSKKLDPVAAGWPPCLRMVAAIAVLTKDAGKLTMGQPLVILAPHAVEALVKQPPDRWLSNARMTHYQAMLLDTDRVQFGPVVALNPATLLPLPEEGAPHDCLEILAETHGTRPDLTDQPIPDADHTWYTDGSSFLQEGQRKAGAAVTTETEVIWAGALPAGTSAQRAELIALTQALKMAEGKRLNVYTDSRYAFATAHIHGEIYRRRGWLTSEGREIKNKSEILALLKALFLPKRLSIIHCLGHQKGDSAEARGNRLADQAAREAAIKTPPDTSTLLIAGKRTADGSEFEKRTADGSEFESPKKKAKVE

SEQ ID NO: 2059 - protein, 2096 aa, synthetic construct
MPAAKRVKLDGGDKKYSIGLDIGTNSVGWAVITDEYKVPSKKFKVLGNTDRHSIKKNLIGALLFDSGETAEATRLKRTARRRYTRRKNRICYLQEIFSNEMAKVDDSFFHRLEESFLVEEDKKHERHPIFGNIVDEVAYHEKYPTIYHLRKKLVDSTDKADLRLIYLALAHMIKFRGHFLIEGDLNPDNSDVDKLFIQLVQTYNQLFEENPINASGVDAKAILSARLSKSRRLENLIAQLPGEKKNGLFGNLIALSLGLTPNFKSNFDLAEDAKLQLSKDTYDDDLDNLLAQIGDQYADLFLAAKNLSDAILLSDILRVNTEITKAPLSASMIKRYDEHHQDLTLLKALVRQQLPEKYKEIFFDQSKNGYAGYIDGGASQEEFYKFIKPILEKMDGTEELLVKLNREDLLRKQRTFDNGSIPHQIHLGELHAILRRQEDFYPFLKDNREKIEKILTFRIPYYVGPLARGNSRFAWMTRKSEETITPWNFEEVVDKGASAQSFIERMTNFDKNLPNEKVLPKHSLLYEYFTVYNELTKVKYVTEGMRKPAFLSGEQKKAIVDLLFKTNRKVTVKQLKEDYFKKIECFDSVEISGVEDRFNASLGTYHDLLKIIKDKDFLDNEENEDILEDIVLTLTLFEDREMIEERLKTYAHLFDDKVMKQLKRRRYTGWGRLSRKLINGIRDKQSGKTILDFLKSDGFANRNFMQLIHDDSLTFKEDIQKAQVSGQGDSLHEHIANLAGSPAIKKGILQTVKVVDELVKVMGRHKPENIVIEMARENQTTQKGQKNSRERMKRIEEGIKELGSQILKEHPVENTQLQNEKLYLYYLQNGRDMYVDQELDINRLSDYDVDHIVPQSFLKDDSIDNKVLTRSDKARGKSDNVPSEEVVKKMKNYWRQLLNAKLITQRKFDNLTKAERGGLSELDKAGFIKRQLVETRQITKHVAQILDSRMNTKYDENDKLIREVKVITLKSKLVSDFRKDFQFYKVREINNYHHAHDAYLNAVVGTALIKKYPKLESEFVYGDYKVYDVRKMIAKSEQEIGKATAKYFFYSNIMNFFKTEITLANGEIRKRPLIETNGETGEIVWDKGRDFATVRKVLSMPQVNIVKKTEVQTGGFSKESILPKRNSDKLIARKKDWDPKKYGGFDSPTVAYSVLVVAKVEKGKSKKLKSVKELLGITIMERSSFEKNPIDFLEAKGYKEVKKDLIIKLPKYSLFELENGRKRMLASAGELQKGNELALPSKYVNFLYLASHYEKLKGSPEDNEQKQLFVEQHKHYLDEIIEQISEFSKRVILADANLDKVLSAYNKHRDKPIREQAENIIHLFTLTNLGAPAAFKYFDTTIDRKRYTSTKEVLDATLIHQSITGLYETRIDLSQLGGDGGGGGGGSEAAAKGGLGIEDEYRLHETSTEPDVSLGSTWLSDFPQAWAETGGMGLAVRQAPLIIPLKATSTPVSIQQYPMSHEARLGIKPHIQRLLDQGILVPCQSPWNTPLLPVKKPGTNDYRPVQDLREVNKRVEDIHPTVPNPYNLLSGLPPSHQWYTVLDLKDAFFCLRLHPTSQPLFAFEWRDPGMGISGQLTWTRLPQGFKNSPTLFNEALHRDLADFRIQHPDLILLQYVDDILLAATSELDCQQGTRALLQTLGDLGYRASAKKAQICQKQVKYLGYLLREGQRWLTEARKETVMGQPVPKTPRQLREFLGKAGFCRLFIPGFAEMAAPLYPLTKPGTLFSWGPDQQKAYQEIKQALLTAPALGLPDLTKPFELFVDEKQGYAKGVLTQKLGPWRRPVAYLSKKLDPVAAGWPPCLRMVAAIAVLTKDAGKLTMGQPLVILAPHAVEALVKQPPDRWLSNARMTHYQAMLLDTDRVQFGPVVALNPATLLPLPEEGAPHDCLEILAETHGTRPDLTDQPIPDADHTWYTDGSSFLQEGQRKAGAAVTTETEVIWAGALPAGTSAQRAELIALTQALKMAEGKRLNVYTDSRYAFATAHIHGEIYRRRGWLTSEGREIKNKSEILALLKALFLPKRLSIIHCLGHQKGDSAEARGNRLADQAAREAAIKTPPDTSTLLIAGKRTADGSEFEKRTADGSEFESPKKKAKVE

SEQ ID NO: 2060 - protein, 2094 aa, synthetic construct
MPAAKRVKLDGGDKKYSIGLDIGTNSVGWAVITDEYKVPSKKFKVLGNTDRHSIKKNLIGALLFDSGETAEATRLKRTARRRYTRRKNRICYLQEIFSNEMAKVDDSFFHRLEESFLVEEDKKHERHPIFGNIVDEVAYHEKYPTIYHLRKKLVDSTDKADLRLIYLALAHMIKFRGHFLIEGDLNPDNSDVDKLFIQLVQTYNQLFEENPINASGVDAKAILSARLSKSRRLENLIAQLPGEKKNGLFGNLIALSLGLTPNFKSNFDLAEDAKLQLSKDTYDDDLDNLLAQIGDQYADLFLAAKNLSDAILLSDILRVNTEITKAPLSASMIKRYDEHHQDLTLLKALVRQQLPEKYKEIFFDQSKNGYAGYIDGGASQEEFYKFIKPILEKMDGTEELLVKLNREDLLRKQRTFDNGSIPHQIHLGELHAILRRQEDFYPFLKDNREKIEKILTFRIPYYVGPLARGNSRFAWMTRKSEETITPWNFEEVVDKGASAQSFIERMTNFDKNLPNEKVLPKHSLLYEYFTVYNELTKVKYVTEGMRKPAFLSGEQKKAIVDLLFKTNRKVTVKQLKEDYFKKIECFDSVEISGVEDRFNASLGTYHDLLKIIKDKDFLDNEENEDILEDIVLTLTLFEDREMIEERLKTYAHLFDDKVMKQLKRRRYTGWGRLSRKLINGIRDKQSGKTILDFLKSDGFANRNFMQLIHDDSLTFKEDIQKAQVSGQGDSLHEHIANLAGSPAIKKGILQTVKVVDELVKVMGRHKPENIVIEMARENQTTQKGQKNSRERMKRIEEGIKELGSQILKEHPVENTQLQNEKLYLYYLQNGRDMYVDQELDINRLSDYDVDHIVPQSFLKDDSIDNKVLTRSDKARGKSDNVPSEEVVKKMKNYWRQLLNAKLITQRKFDNLTKAERGGLSELDKAGFIKRQLVETRQITKHVAQILDSRMNTKYDENDKLIREVKVITLKSKLVSDFRKDFQFYKVREINNYHHAHDAYLNAVVGTALIKKYPKLESEFVYGDYKVYDVRKMIAKSEQEIGKATAKYFFYSNIMNFFKTEITLANGEIRKRPLIETNGETGEIVWDKGRDFATVRKVLSMPQVNIVKKTEVQTGGFSKESILPKRNSDKLIARKKDWDPKKYGGFDSPTVAYSVLVVAKVEKGKSKKLKSVKELLGITIMERSSFEKNPIDFLEAKGYKEVKKDLIIKLPKYSLFELENGRKRMLASAGELQKGNELALPSKYVNFLYLASHYEKLKGSPEDNEQKQLFVEQHKHYLDEIIEQISEFSKRVILADANLDKVLSAYNKHRDKPIREQAENIIHLFTLTNLGAPAAFKYFDTTIDRKRYTSTKEVLDATLIHQSITGLYETRIDLSQLGGDGGGSSPAPGGGGGLGIEDEYRLHETSTEPDVSLGSTWLSDFPQAWAETGGMGLAVRQAPLIIPLKATSTPVSIQQYPMSHEARLGIKPHIQRLLDQGILVPCQSPWNTPLLPVKKPGTNDYRPVQDLREVNKRVEDIHPTVPNPYNLLSGLPPSHQWYTVLDLKDAFFCLRLHPTSQPLFAFEWRDPGMGISGQLTWTRLPQGFKNSPTLFNEALHRDLADFRIQHPDLILLQYVDDILLAATSELDCQQGTRALLQTLGDLGYRASAKKAQICQKQVKYLGYLLREGQRWLTEARKETVMGQPVPKTPRQLREFLGKAGFCRLFIPGFAEMAAPLYPLTKPGTLFSWGPDQQKAYQEIKQALLTAPALGLPDLTKPFELFVDEKQGYAKGVLTQKLGPWRRPVAYLSKKLDPVAAGWPPCLRMVAAIAVLTKDAGKLTMGQPLVILAPHAVEALVKQPPDRWLSNARMTHYQAMLLDTDRVQFGPVVALNPATLLPLPEEGAPHDCLEILAETHGTRPDLTDQPIPDADHTWYTDGSSFLQEGQRKAGAAVTTETEVIWAGALPAGTSAQRAELIALTQALKMAEGKRLNVYTDSRYAFATAHIHGEIYRRRGWLTSEGREIKNKSEILALLKALFLPKRLSIIHCLGHQKGDSAEARGNRLADQAAREAAIKTPPDTSTLLIAGKRTADGSEFEKRTADGSEFESPKKKAKVE

SEQ ID NO: 2061 - protein, 2094 aa, synthetic construct
MPAAKRVKLDGGDKKYSIGLDIGTNSVGWAVITDEYKVPSKKFKVLGNTDRHSIKKNLIGALLFDSGETAEATRLKRTARRRYTRRKNRICYLQEIFSNEMAKVDDSFFHRLEESFLVEEDKKHERHPIFGNIVDEVAYHEKYPTIYHLRKKLVDSTDKADLRLIYLALAHMIKFRGHFLIEGDLNPDNSDVDKLFIQLVQTYNQLFEENPINASGVDAKAILSARLSKSRRLENLIAQLPGEKKNGLFGNLIALSLGLTPNFKSNFDLAEDAKLQLSKDTYDDDLDNLLAQIGDQYADLFLAAKNLSDAILLSDILRVNTEITKAPLSASMIKRYDEHHQDLTLLKALVRQQLPEKYKEIFFDQSKNGYAGYIDGGASQEEFYKFIKPILEKMDGTEELLVKLNREDLLRKQRTFDNGSIPHQIHLGELHAILRRQEDFYPFLKDNREKIEKILTFRIPYYVGPLARGNSRFAWMTRKSEETITPWNFEEVVDKGASAQSFIERMTNFDKNLPNEKVLPKHSLLYEYFTVYNELTKVKYVTEGMRKPAFLSGEQKKAIVDLLFKTNRKVTVKQLKEDYFKKIECFDSVEISGVEDRFNASLGTYHDLLKIIKDKDFLDNEENEDILEDIVLTLTLFEDREMIEERLKTYAHLFDDKVMKQLKRRRYTGWGRLSRKLINGIRDKQSGKTILDFLKSDGFANRNFMQLIHDDSLTFKEDIQKAQVSGQGDSLHEHIANLAGSPAIKKGILQTVKVVDELVKVMGRHKPENIVIEMARENQTTQKGQKNSRERMKRIEEGIKELGSQILKEHPVENTQLQNEKLYLYYLQNGRDMYVDQELDINRLSDYDVDHIVPQSFLKDDSIDNKVLTRSDKARGKSDNVPSEEVVKKMKNYWRQLLNAKLITQRKFDNLTKAERGGLSELDKAGFIKRQLVETRQITKHVAQILDSRMNTKYDENDKLIREVKVITLKSKLVSDFRKDFQFYKVREINNYHHAHDAYLNAVVGTALIKKYPKLESEFVYGDYKVYDVRKMIAKSEQEIGKATAKYFFYSNIMNFFKTEITLANGEIRKRPLIETNGETGEIVWDKGRDFATVRKVLSMPQVNIVKKTEVQTGGFSKESILPKRNSDKLIARKKDWDPKKYGGFDSPTVAYSVLVVAKVEKGKSKKLKSVKELLGITIMERSSFEKNPIDFLEAKGYKEVKKDLIIKLPKYSLFELENGRKRMLASAGELQKGNELALPSKYVNFLYLASHYEKLKGSPEDNEQKQLFVEQHKHYLDEIIEQISEFSKRVILADANLDKVLSAYNKHRDKPIREQAENIIHLFTLTNLGAPAAFKYFDTTIDRKRYTSTKEVLDATLIHQSITGLYETRIDLSQLGGDGGGGSGGGPAPGGLGIEDEYRLHETSTEPDVSLGSTWLSDFPQAWAETGGMGLAVRQAPLIIPLKATSTPVSIQQYPMSHEARLGIKPHIQRLLDQGILVPCQSPWNTPLLPVKKPGTNDYRPVQDLREVNKRVEDIHPTVPNPYNLLSGLPPSHQWYTVLDLKDAFFCLRLHPTSQPLFAFEWRDPGMGISGQLTWTRLPQGFKNSPTLFNEALHRDLADFRIQHPDLILLQYVDDILLAATSELDCQQGTRALLQTLGDLGYRASAKKAQICQKQVKYLGYLLREGQRWLTEARKETVMGQPVPKTPRQLREFLGKAGFCRLFIPGFAEMAAPLYPLTKPGTLFSWGPDQQKAYQEIKQALLTAPALGLPDLTKPFELFVDEKQGYAKGVLTQKLGPWRRPVAYLSKKLDPVAAGWPPCLRMVAAIAVLTKDAGKLTMGQPLVILAPHAVEALVKQPPDRWLSNARMTHYQAMLLDTDRVQFGPVVALNPATLLPLPEEGAPHDCLEILAETHGTRPDLTDQPIPDADHTWYTDGSSFLQEGQRKAGAAVTTETEVIWAGALPAGTSAQRAELIALTQALKMAEGKRLNVYTDSRYAFATAHIHGEIYRRRGWLTSEGREIKNKSEILALLKALFLPKRLSIIHCLGHQKGDSAEARGNRLADQAAREAAIKTPPDTSTLLIAGKRTADGSEFEKRTADGSEFESPKKKAKVE

SEQ ID NO: 2062 - protein, 2096 aa, synthetic construct
MPAAKRVKLDGGDKKYSIGLDIGTNSVGWAVITDEYKVPSKKFKVLGNTDRHSIKKNLIGALLFDSGETAEATRLKRTARRRYTRRKNRICYLQEIFSNEMAKVDDSFFHRLEESFLVEEDKKHERHPIFGNIVDEVAYHEKYPTIYHLRKKLVDSTDKADLRLIYLALAHMIKFRGHFLIEGDLNPDNSDVDKLFIQLVQTYNQLFEENPINASGVDAKAILSARLSKSRRLENLIAQLPGEKKNGLFGNLIALSLGLTPNFKSNFDLAEDAKLQLSKDTYDDDLDNLLAQIGDQYADLFLAAKNLSDAILLSDILRVNTEITKAPLSASMIKRYDEHHQDLTLLKALVRQQLPEKYKEIFFDQSKNGYAGYIDGGASQEEFYKFIKPILEKMDGTEELLVKLNREDLLRKQRTFDNGSIPHQIHLGELHAILRRQEDFYPFLKDNREKIEKILTFRIPYYVGPLARGNSRFAWMTRKSEETITPWNFEEVVDKGASAQSFIERMTNFDKNLPNEKVLPKHSLLYEYFTVYNELTKVKYVTEGMRKPAFLSGEQKKAIVDLLFKTNRKVTVKQLKEDYFKKIECFDSVEISGVEDRFNASLGTYHDLLKIIKDKDFLDNEENEDILEDIVLTLTLFEDREMIEERLKTYAHLFDDKVMKQLKRRRYTGWGRLSRKLINGIRDKQSGKTILDFLKSDGFANRNFMQLIHDDSLTFKEDIQKAQVSGQGDSLHEHIANLAGSPAIKKGILQTVKVVDELVKVMGRHKPENIVIEMARENQTTQKGQKNSRERMKRIEEGIKELGSQILKEHPVENTQLQNEKLYLYYLQNGRDMYVDQELDINRLSDYDVDHIVPQSFLKDDSIDNKVLTRSDKARGKSDNVPSEEVVKKMKNYWRQLLNAKLITQRKFDNLTKAERGGLSELDKAGFIKRQLVETRQITKHVAQILDSRMNTKYDENDKLIREVKVITLKSKLVSDFRKDFQFYKVREINNYHHAHDAYLNAVVGTALIKKYPKLESEFVYGDYKVYDVRKMIAKSEQEIGKATAKYFFYSNIMNFFKTEITLANGEIRKRPLIETNGETGEIVWDKGRDFATVRKVLSMPQVNIVKKTEVQTGGFSKESILPKRNSDKLIARKKDWDPKKYGGFDSPTVAYSVLVVAKVEKGKSKKLKSVKELLGITIMERSSFEKNPIDFLEAKGYKEVKKDLIIKLPKYSLFELENGRKRMLASAGELQKGNELALPSKYVNFLYLASHYEKLKGSPEDNEQKQLFVEQHKHYLDEIIEQISEFSKRVILADANLDKVLSAYNKHRDKPIREQAENIIHLFTLTNLGAPAAFKYFDTTIDRKRYTSTKEVLDATLIHQSITGLYETRIDLSQLGGDGGGSSPAPEAAAKGGTLGIEDEYRLHETSTEPDVSLGSTWLSDFPQAWAETGGMGLAVRQAPLIIPLKATSTPVSIQQYPMSHEARLGIKPHIQRLLDQGILVPCQSPWNTPLLPVKKPGTNDYRPVQDLREVNKRVEDIHPTVPNPYNLLSGLPPSHQWYTVLDLKDAFFCLRLHPTSQPLFAFEWRDPGMGISGQLTWTRLPQGFKNSPTLFDEALHRDLADFRIQHPDLILLQYVDDILLAATSELDCQQGTRALLQTLGDLGYRASAKKAQICQKQVKYLGYLLREGQRWLTEARKETVMGQPVPKTPRQLREFLGTAGFCRLWIPGFAEMAAPLYPLTKTGTLFSWGPDQQKAYQEIKQALLTAPALGLPDLTKPFELFVDEKQGYAKGVLTQKLGPWRRPVAYLSKKLDPVAAGWPPCLRMVAAIAVLTKDAGKLTMGQPLVILAPHAVEALVKQPPDRWLSNARMTHYQAMLLDTDRVQFGPVVALNPATLLPLPEEGAPHDCLEILAETHGTRPDLTDQPIPDADHTWYTDGSSFLQEGQRKAGAAVTTETEVIWAGALPAGTSAQRAELIALTQALKMAEGKRLNVYTDSRYAFATAHIHGEIYRRRGLLTSEGREIKNKSEILALLKALFLPKRLSIIHCLGHQKGDSAEARGNRLADQAAREAAIKTPPDTSTLLAGKRTADGSEFEKRTADGSEFESPKKKAKVE

SEQ ID NO: 2063 - protein, 2105 aa, synthetic construct
MPAAKRVKLDGGDKKYSIGLDIGTNSVGWAVITDEYKVPSKKFKVLGNTDRHSIKKNLIGALLFDSGETAEATRLKRTARRRYTRRKNRICYLQEIFSNEMAKVDDSFFHRLEESFLVEEDKKHERHPIFGNIVDEVAYHEKYPTIYHLRKKLVDSTDKADLRLIYLALAHMIKFRGHFLIEGDLNPDNSDVDKLFIQLVQTYNQLFEENPINASGVDAKAILSARLSKSRRLENLIAQLPGEKKNGLFGNLIALSLGLTPNFKSNFDLAEDAKLQLSKDTYDDDLDNLLAQIGDQYADLFLAAKNLSDAILLSDILRVNTEITKAPLSASMIKRYDEHHQDLTLLKALVRQQLPEKYKEIFFDQSKNGYAGYIDGGASQEEFYKFIKPILEKMDGTEELLVKLNREDLLRKQRTFDNGSIPHQIHLGELHAILRRQEDFYPFLKDNREKIEKILTFRIPYYVGPLARGNSRFAWMTRKSEETITPWNFEEVVDKGASAQSFIERMTNFDKNLPNEKVLPKHSLLYEYFTVYNELTKVKYVTEGMRKPAFLSGEQKKAIVDLLFKTNRKVTVKQLKEDYFKKIECFDSVEISGVEDRFNASLGTYHDLLKIIKDKDFLDNEENEDILEDIVLTLTLFEDREMIEERLKTYAHLFDDKVMKQLKRRRYTGWGRLSRKLINGIRDKQSGKTILDFLKSDGFANRNFMQLIHDDSLTFKEDIQKAQVSGQGDSLHEHIANLAGSPAIKKGILQTVKVVDELVKVMGRHKPENIVIEMARENQTTQKGQKNSRERMKRIEEGIKELGSQILKEHPVENTQLQNEKLYLYYLQNGRDMYVDQELDINRLSDYDVDHIVPQSFLKDDSIDNKVLTRSDKARGKSDNVPSEEVVKKMKNYWRQLLNAKLITQRKFDNLTKAERGGLSELDKAGFIKRQLVETRQITKHVAQILDSRMNTKYDENDKLIREVKVITLKSKLVSDFRKDFQFYKVREINNYHHAHDAYLNAVVGTALIKKYPKLESEFVYGDYKVYDVRKMIAKSEQEIGKATAKYFFYSNIMNFFKTEITLANGEIRKRPLIETNGETGEIVWDKGRDFATVRKVLSMPQVNIVKKTEVQTGGFSKESILPKRNSDKLIARKKDWDPKKYGGFDSPTVAYSVLVVAKVEKGKSKKLKSVKELLGITIMERSSFEKNPIDFLEAKGYKEVKKDLIIKLPKYSLFELENGRKRMLASAGELQKGNELALPSKYVNFLYLASHYEKLKGSPEDNEQKQLFVEQHKHYLDEIIEQISEFSKRVILADANLDKVLSAYNKHRDKPIREQAENIIHLFTLTNLGAPAAFKYFDTTIDRKRYTSTKEVLDATLIHQSITGLYETRIDLSQLGGDGGGGGGSGGGGSGGGGSGGGGSGGTLGIEDEYRLHETSTEPDVSLGSTWLSDFPQAWAETGGMGLAVRQAPLIIPLKATSTPVSIQQYPMSHEARLGIKPHIQRLLDQGILVPCQSPWNTPLLPVKKPGTNDYRPVQDLREVNKRVEDIHPTVPNPYNLLSGLPPSHQWYTVLDLKDAFFCLRLHPTSQPLFAFEWRDPGMGISGQLTWTRLPQGFKNSPTLFDEALHRDLADFRIQHPDLILLQYVDDILLAATSELDCQQGTRALLQTLGDLGYRASAKKAQICQKQVKYLGYLLREGQRWLTEARKETVMGQPVPKTPRQLREFLGTAGFCRLWIPGFAEMAAPLYPLTKTGTLFSWGPDQQKAYQEIKQALLTAPALGLPDLTKPFELFVDEKQGYAKGVLTQKLGPWRRPVAYLSKKLDPVAAGWPPCLRMVAAIAVLTKDAGKLTMGQPLVILAPHAVEALVKQPPDRWLSNARMTHYQAMLLDTDRVQFGPVVALNPATLLPLPEEGAPHDCLEILAETHGTRPDLTDQPIPDADHTWYTDGSSFLQEGQRKAGAAVTTETEVIWAGALPAGTSAQRAELIALTQALKMAEGKRLNVYTDSRYAFATAHIHGEIYRRRGLLTSEGREIKNKSEILALLKALFLPKRLSIIHCLGHQKGDSAEARGNRLADQAAREAAIKTPPDTSTLLAGKRTADGSEFEKRTADGSEFESPKKKAKVE

SEQ ID NO: 2064 - protein, 2095 aa, synthetic construct
MPAAKRVKLDGGDKKYSIGLDIGTNSVGWAVITDEYKVPSKKFKVLGNTDRHSIKKNLIGALLFDSGETAEATRLKRTARRRYTRRKNRICYLQEIFSNEMAKVDDSFFHRLEESFLVEEDKKHERHPIFGNIVDEVAYHEKYPTIYHLRKKLVDSTDKADLRLIYLALAHMIKFRGHFLIEGDLNPDNSDVDKLFIQLVQTYNQLFEENPINASGVDAKAILSARLSKSRRLENLIAQLPGEKKNGLFGNLIALSLGLTPNFKSNFDLAEDAKLQLSKDTYDDDLDNLLAQIGDQYADLFLAAKNLSDAILLSDILRVNTEITKAPLSASMIKRYDEHHQDLTLLKALVRQQLPEKYKEIFFDQSKNGYAGYIDGGASQEEFYKFIKPILEKMDGTEELLVKLNREDLLRKQRTFDNGSIPHQIHLGELHAILRRQEDFYPFLKDNREKIEKILTFRIPYYVGPLARGNSRFAWMTRKSEETITPWNFEEVVDKGASAQSFIERMTNFDKNLPNEKVLPKHSLLYEYFTVYNELTKVKYVTEGMRKPAFLSGEQKKAIVDLLFKTNRKVTVKQLKEDYFKKIECFDSVEISGVEDRFNASLGTYHDLLKIIKDKDFLDNEENEDILEDIVLTLTLFEDREMIEERLKTYAHLFDDKVMKQLKRRRYTGWGRLSRKLINGIRDKQSGKTILDFLKSDGFANRNFMQLIHDDSLTFKEDIQKAQVSGQGDSLHEHIANLAGSPAIKKGILQTVKVVDELVKVMGRHKPENIVIEMARENQTTQKGQKNSRERMKRIEEGIKELGSQILKEHPVENTQLQNEKLYLYYLQNGRDMYVDQELDINRLSDYDVDHIVPQSFLKDDSIDNKVLTRSDKARGKSDNVPSEEVVKKMKNYWRQLLNAKLITQRKFDNLTKAERGGLSELDKAGFIKRQLVETRQITKHVAQILDSRMNTKYDENDKLIREVKVITLKSKLVSDFRKDFQFYKVREINNYHHAHDAYLNAVVGTALIKKYPKLESEFVYGDYKVYDVRKMIAKSEQEIGKATAKYFFYSNIMNFFKTEITLANGEIRKRPLIETNGETGEIVWDKGRDFATVRKVLSMPQVNIVKKTEVQTGGFSKESILPKRNSDKLIARKKDWDPKKYGGFDSPTVAYSVLVVAKVEKGKSKKLKSVKELLGITIMERSSFEKNPIDFLEAKGYKEVKKDLIIKLPKYSLFELENGRKRMLASAGELQKGNELALPSKYVNFLYLASHYEKLKGSPEDNEQKQLFVEQHKHYLDEIIEQISEFSKRVILADANLDKVLSAYNKHRDKPIREQAENIIHLFTLTNLGAPAAFKYFDTTIDRKRYTSTKEVLDATLIHQSITGLYETRIDLSQLGGDGGEAAAKEAAAKGGTLGIEDEYRLHETSTEPDVSLGSTWLSDFPQAWAETGGMGLAVRQAPLIIPLKATSTPVSIQQYPMSHEARLGIKPHIQRLLDQGILVPCQSPWNTPLLPVKKPGTNDYRPVQDLREVNKRVEDIHPTVPNPYNLLSGLPPSHQWYTVLDLKDAFFCLRLHPTSQPLFAFEWRDPGMGISGQLTWTRLPQGFKNSPTLFDEALHRDLADFRIQHPDLILLQYVDDILLAATSELDCQQGTRALLQTLGDLGYRASAKKAQICQKQVKYLGYLLREGQRWLTEARKETVMGQPVPKTPRQLREFLGTAGFCRLWIPGFAEMAAPLYPLTKTGTLFSWGPDQQKAYQEIKQALLTAPALGLPDLTKPFELFVDEKQGYAKGVLTQKLGPWRRPVAYLSKKLDPVAAGWPPCLRMVAAIAVLTKDAGKLTMGQPLVILAPHAVEALVKQPPDRWLSNARMTHYQAMLLDTDRVQFGPVVALNPATLLPLPEEGAPHDCLEILAETHGTRPDLTDQPIPDADHTWYTDGSSFLQEGQRKAGAAVTTETEVIWAGALPAGTSAQRAELIALTQALKMAEGKRLNVYTDSRYAFATAHIHGEIYRRRGLLTSEGREIKNKSEILALLKALFLPKRLSIIHCLGHQKGDSAEARGNRLADQAAREAAIKTPPDTSTLLAGKRTADGSEFEKRTADGSEFESPKKKAKVE

SEQ ID NO: 2065 - protein, 2096 aa, synthetic construct
MPAAKRVKLDGGDKKYSIGLDIGTNSVGWAVITDEYKVPSKKFKVLGNTDRHSIKKNLIGALLFDSGETAEATRLKRTARRRYTRRKNRICYLQEIFSNEMAKVDDSFFHRLEESFLVEEDKKHERHPIFGNIVDEVAYHEKYPTIYHLRKKLVDSTDKADLRLIYLALAHMIKFRGHFLIEGDLNPDNSDVDKLFIQLVQTYNQLFEENPINASGVDAKAILSARLSKSRRLENLIAQLPGEKKNGLFGNLIALSLGLTPNFKSNFDLAEDAKLQLSKDTYDDDLDNLLAQIGDQYADLFLAAKNLSDAILLSDILRVNTEITKAPLSASMIKRYDEHHQDLTLLKALVRQQLPEKYKEIFFDQSKNGYAGYIDGGASQEEFYKFIKPILEKMDGTEELLVKLNREDLLRKQRTFDNGSIPHQIHLGELHAILRRQEDFYPFLKDNREKIEKILTFRIPYYVGPLARGNSRFAWMTRKSEETITPWNFEEVVDKGASAQSFIERMTNFDKNLPNEKVLPKHSLLYEYFTVYNELTKVKYVTEGMRKPAFLSGEQKKAIVDLLFKTNRKVTVKQLKEDYFKKIECFDSVEISGVEDRFNASLGTYHDLLKIIKDKDFLDNEENEDILEDIVLTLTLFEDREMIEERLKTYAHLFDDKVMKQLKRRRYTGWGRLSRKLINGIRDKQSGKTILDFLKSDGFANRNFMQLIHDDSLTFKEDIQKAQVSGQGDSLHEHIANLAGSPAIKKGILQTVKVVDELVKVMGRHKPENIVIEMARENQTTQKGQKNSRERMKRIEEGIKELGSQILKEHPVENTQLQNEKLYLYYLQNGRDMYVDQELDINRLSDYDVDHIVPQSFLKDDSIDNKVLTRSDKARGKSDNVPSEEVVKKMKNYWRQLLNAKLITQRKFDNLTKAERGGLSELDKAGFIKRQLVETRQITKHVAQILDSRMNTKYDENDKLIREVKVITLKSKLVSDFRKDFQFYKVREINNYHHAHDAYLNAVVGTALIKKYPKLESEFVYGDYKVYDVRKMIAKSEQEIGKATAKYFFYSNIMNFFKTEITLANGEIRKRPLIETNGETGEIVWDKGRDFATVRKVLSMPQVNIVKKTEVQTGGFSKESILPKRNSDKLIARKKDWDPKKYGGFDSPTVAYSVLVVAKVEKGKSKKLKSVKELLGITIMERSSFEKNPIDFLEAKGYKEVKKDLIIKLPKYSLFELENGRKRMLASAGELQKGNELALPSKYVNFLYLASHYEKLKGSPEDNEQKQLFVEQHKHYLDEIIEQISEFSKRVILADANLDKVLSAYNKHRDKPIREQAENIIHLFTLTNLGAPAAFKYFDTTIDRKRYTSTKEVLDATLIHQSITGLYETRIDLSQLGGDGGPAPGSSEAAAKGGTLGIEDEYRLHETSTEPDVSLGSTWLSDFPQAWAETGGMGLAVRQAPLIIPLKATSTPVSIQQYPMSHEARLGIKPHIQRLLDQGILVPCQSPWNTPLLPVKKPGTNDYRPVQDLREVNKRVEDIHPTVPNPYNLLSGLPPSHQWYTVLDLKDAFFCLRLHPTSQPLFAFEWRDPGMGISGQLTWTRLPQGFKNSPTLFDEALHRDLADFRIQHPDLILLQYVDDILLAATSELDCQQGTRALLQTLGDLGYRASAKKAQICQKQVKYLGYLLREGQRWLTEARKETVMGQPVPKTPRQLREFLGTAGFCRLWIPGFAEMAAPLYPLTKTGTLFSWGPDQQKAYQEIKQALLTAPALGLPDLTKPFELFVDEKQGYAKGVLTQKLGPWRRPVAYLSKKLDPVAAGWPPCLRMVAAIAVLTKDAGKLTMGQPLVILAPHAVEALVKQPPDRWLSNARMTHYQAMLLDTDRVQFGPVVALNPATLLPLPEEGAPHDCLEILAETHGTRPDLTDQPIPDADHTWYTDGSSFLQEGQRKAGAAVTTETEVIWAGALPAGTSAQRAELIALTQALKMAEGKRLNVYTDSRYAFATAHIHGEIYRRRGLLTSEGREIKNKSEILALLKALFLPKRLSIIHCLGHQKGDSAEARGNRLADQAAREAAIKTPPDTSTLLAGKRTADGSEFEKRTADGSEFESPKKKAKVE

SEQ ID NO: 2066 - protein, 2115 aa, synthetic construct
MPAAKRVKLDGGDKKYSIGLDIGTNSVGWAVITDEYKVPSKKFKVLGNTDRHSIKKNLIGALLFDSGETAEATRLKRTARRRYTRRKNRICYLQEIFSNEMAKVDDSFFHRLEESFLVEEDKKHERHPIFGNIVDEVAYHEKYPTIYHLRKKLVDSTDKADLRLIYLALAHMIKFRGHFLIEGDLNPDNSDVDKLFIQLVQTYNQLFEENPINASGVDAKAILSARLSKSRRLENLIAQLPGEKKNGLFGNLIALSLGLTPNFKSNFDLAEDAKLQLSKDTYDDDLDNLLAQIGDQYADLFLAAKNLSDAILLSDILRVNTEITKAPLSASMIKRYDEHHQDLTLLKALVRQQLPEKYKEIFFDQSKNGYAGYIDGGASQEEFYKFIKPILEKMDGTEELLVKLNREDLLRKQRTFDNGSIPHQIHLGELHAILRRQEDFYPFLKDNREKIEKILTFRIPYYVGPLARGNSRFAWMTRKSEETITPWNFEEVVDKGASAQSFIERMTNFDKNLPNEKVLPKHSLLYEYFTVYNELTKVKYVTEGMRKPAFLSGEQKKAIVDLLFKTNRKVTVKQLKEDYFKKIECFDSVEISGVEDRFNASLGTYHDLLKIIKDKDFLDNEENEDILEDIVLTLTLFEDREMIEERLKTYAHLFDDKVMKQLKRRRYTGWGRLSRKLINGIRDKQSGKTILDFLKSDGFANRNFMQLIHDDSLTFKEDIQKAQVSGQGDSLHEHIANLAGSPAIKKGILQTVKVVDELVKVMGRHKPENIVIEMARENQTTQKGQKNSRERMKRIEEGIKELGSQILKEHPVENTQLQNEKLYLYYLQNGRDMYVDQELDINRLSDYDVDHIVPQSFLKDDSIDNKVLTRSDKARGKSDNVPSEEVVKKMKNYWRQLLNAKLITQRKFDNLTKAERGGLSELDKAGFIKRQLVETRQITKHVAQILDSRMNTKYDENDKLIREVKVITLKSKLVSDFRKDFQFYKVREINNYHHAHDAYLNAVVGTALIKKYPKLESEFVYGDYKVYDVRKMIAKSEQEIGKATAKYFFYSNIMNFFKTEITLANGEIRKRPLIETNGETGEIVWDKGRDFATVRKVLSMPQVNIVKKTEVQTGGFSKESILPKRNSDKLIARKKDWDPKKYGGFDSPTVAYSVLVVAKVEKGKSKKLKSVKELLGITIMERSSFEKNPIDFLEAKGYKEVKKDLIIKLPKYSLFELENGRKRMLASAGELQKGNELALPSKYVNFLYLASHYEKLKGSPEDNEQKQLFVEQHKHYLDEIIEQISEFSKRVILADANLDKVLSAYNKHRDKPIREQAENIIHLFTLTNLGAPAAFKYFDTTIDRKRYTSTKEVLDATLIHQSITGLYETRIDLSQLGGDGGGGGGSGGGGSGGGGSGGGGSGGGGSGGGGSGGTLGIEDEYRLHETSTEPDVSLGSTWLSDFPQAWAETGGMGLAVRQAPLIIPLKATSTPVSIQQYPMSHEARLGIKPHIQRLLDQGILVPCQSPWNTPLLPVKKPGTNDYRPVQDLREVNKRVEDIHPTVPNPYNLLSGLPPSHQWYTVLDLKDAFFCLRLHPTSQPLFAFEWRDPGMGISGQLTWTRLPQGFKNSPTLFDEALHRDLADFRIQHPDLILLQYVDDILLAATSELDCQQGTRALLQTLGDLGYRASAKKAQICQKQVKYLGYLLREGQRWLTEARKETVMGQPVPKTPRQLREFLGTAGFCRLWIPGFAEMAAPLYPLTKTGTLFSWGPDQQKAYQEIKQALLTAPALGLPDLTKPFELFVDEKQGYAKGVLTQKLGPWRRPVAYLSKKLDPVAAGWPPCLRMVAAIAVLTKDAGKLTMGQPLVILAPHAVEALVKQPPDRWLSNARMTHYQAMLLDTDRVQFGPVVALNPATLLPLPEEGAPHDCLEILAETHGTRPDLTDQPIPDADHTWYTDGSSFLQEGQRKAGAAVTTETEVIWAGALPAGTSAQRAELIALTQALKMAEGKRLNVYTDSRYAFATAHIHGEIYRRRGLLTSEGREIKNKSEILALLKALFLPKRLSIIHCLGHQKGDSAEARGNRLADQAAREAAIKTPPDTSTLLAGKRTADGSEFEKRTADGSEFESPKKKAKVE

SEQ ID NO: 2067 - protein, 2093 aa, synthetic construct
MPAAKRVKLDGGDKKYSIGLDIGTNSVGWAVITDEYKVPSKKFKVLGNTDRHSIKKNLIGALLFDSGETAEATRLKRTARRRYTRRKNRICYLQEIFSNEMAKVDDSFFHRLEESFLVEEDKKHERHPIFGNIVDEVAYHEKYPTIYHLRKKLVDSTDKADLRLIYLALAHMIKFRGHFLIEGDLNPDNSDVDKLFIQLVQTYNQLFEENPINASGVDAKAILSARLSKSRRLENLIAQLPGEKKNGLFGNLIALSLGLTPNFKSNFDLAEDAKLQLSKDTYDDDLDNLLAQIGDQYADLFLAAKNLSDAILLSDILRVNTEITKAPLSASMIKRYDEHHQDLTLLKALVRQQLPEKYKEIFFDQSKNGYAGYIDGGASQEEFYKFIKPILEKMDGTEELLVKLNREDLLRKQRTFDNGSIPHQIHLGELHAILRRQEDFYPFLKDNREKIEKILTFRIPYYVGPLARGNSRFAWMTRKSEETITPWNFEEVVDKGASAQSFIERMTNFDKNLPNEKVLPKHSLLYEYFTVYNELTKVKYVTEGMRKPAFLSGEQKKAIVDLLFKTNRKVTVKQLKEDYFKKIECFDSVEISGVEDRFNASLGTYHDLLKIIKDKDFLDNEENEDILEDIVLTLTLFEDREMIEERLKTYAHLFDDKVMKQLKRRRYTGWGRLSRKLINGIRDKQSGKTILDFLKSDGFANRNFMQLIHDDSLTFKEDIQKAQVSGQGDSLHEHIANLAGSPAIKKGILQTVKVVDELVKVMGRHKPENIVIEMARENQTTQKGQKNSRERMKRIEEGIKELGSQILKEHPVENTQLQNEKLYLYYLQNGRDMYVDQELDINRLSDYDVDHIVPQSFLKDDSIDNKVLTRSDKARGKSDNVPSEEVVKKMKNYWRQLLNAKLITQRKFDNLTKAERGGLSELDKAGFIKRQLVETRQITKHVAQILDSRMNTKYDENDKLIREVKVITLKSKLVSDFRKDFQFYKVREINNYHHAHDAYLNAVVGTALIKKYPKLESEFVYGDYKVYDVRKMIAKSEQEIGKATAKYFFYSNIMNFFKTEITLANGEIRKRPLIETNGETGEIVWDKGRDFATVRKVLSMPQVNIVKKTEVQTGGFSKESILPKRNSDKLIARKKDWDPKKYGGFDSPTVAYSVLVVAKVEKGKSKKLKSVKELLGITIMERSSFEKNPIDFLEAKGYKEVKKDLIIKLPKYSLFELENGRKRMLASAGELQKGNELALPSKYVNFLYLASHYEKLKGSPEDNEQKQLFVEQHKHYLDEIIEQISEFSKRVILADANLDKVLSAYNKHRDKPIREQAENIIHLFTLTNLGAPAAFKYFDTTIDRKRYTSTKEVLDATLIHQSITGLYETRIDLSQLGGDGGEAAAKPAPGGTLGIEDEYRLHETSTEPDVSLGSTWLSDFPQAWAETGGMGLAVRQAPLIIPLKATSTPVSIQQYPMSHEARLGIKPHIQRLLDQGILVPCQSPWNTPLLPVKKPGTNDYRPVQDLREVNKRVEDIHPTVPNPYNLLSGLPPSHQWYTVLDLKDAFFCLRLHPTSQPLFAFEWRDPGMGISGQLTWTRLPQGFKNSPTLFDEALHRDLADFRIQHPDLILLQYVDDILLAATSELDCQQGTRALLQTLGDLGYRASAKKAQICQKQVKYLGYLLREGQRWLTEARKETVMGQPVPKTPRQLREFLGTAGFCRLWIPGFAEMAAPLYPLTKTGTLFSWGPDQQKAYQEIKQALLTAPALGLPDLTKPFELFVDEKQGYAKGVLTQKLGPWRRPVAYLSKKLDPVAAGWPPCLRMVAAIAVLTKDAGKLTMGQPLVILAPHAVEALVKQPPDRWLSNARMTHYQAMLLDTDRVQFGPVVALNPATLLPLPEEGAPHDCLEILAETHGTRPDLTDQPIPDADHTWYTDGSSFLQEGQRKAGAAVTTETEVIWAGALPAGTSAQRAELIALTQALKMAEGKRLNVYTDSRYAFATAHIHGEIYRRRGLLTSEGREIKNKSEILALLKALFLPKRLSIIHCLGHQKGDSAEARGNRLADQAAREAAIKTPPDTSTLLAGKRTADGSEFEKRTADGSEFESPKKKAKVE

SEQ ID NO: 2068 - protein, 2096 aa, synthetic construct
MPAAKRVKLDGGDKKYSIGLDIGTNSVGWAVITDEYKVPSKKFKVLGNTDRHSIKKNLIGALLFDSGETAEATRLKRTARRRYTRRKNRICYLQEIFSNEMAKVDDSFFHRLEESFLVEEDKKHERHPIFGNIVDEVAYHEKYPTIYHLRKKLVDSTDKADLRLIYLALAHMIKFRGHFLIEGDLNPDNSDVDKLFIQLVQTYNQLFEENPINASGVDAKAILSARLSKSRRLENLIAQLPGEKKNGLFGNLIALSLGLTPNFKSNFDLAEDAKLQLSKDTYDDDLDNLLAQIGDQYADLFLAAKNLSDAILLSDILRVNTEITKAPLSASMIKRYDEHHQDLTLLKALVRQQLPEKYKEIFFDQSKNGYAGYIDGGASQEEFYKFIKPILEKMDGTEELLVKLNREDLLRKQRTFDNGSIPHQIHLGELHAILRRQEDFYPFLKDNREKIEKILTFRIPYYVGPLARGNSRFAWMTRKSEETITPWNFEEVVDKGASAQSFIERMTNFDKNLPNEKVLPKHSLLYEYFTVYNELTKVKYVTEGMRKPAFLSGEQKKAIVDLLFKTNRKVTVKQLKEDYFKKIECFDSVEISGVEDRFNASLGTYHDLLKIIKDKDFLDNEENEDILEDIVLTLTLFEDREMIEERLKTYAHLFDDKVMKQLKRRRYTGWGRLSRKLINGIRDKQSGKTILDFLKSDGFANRNFMQLIHDDSLTFKEDIQKAQVSGQGDSLHEHIANLAGSPAIKKGILQTVKVVDELVKVMGRHKPENIVIEMARENQTTQKGQKNSRERMKRIEEGIKELGSQILKEHPVENTQLQNEKLYLYYLQNGRDMYVDQELDINRLSDYDVDHIVPQSFLKDDSIDNKVLTRSDKARGKSDNVPSEEVVKKMKNYWRQLLNAKLITQRKFDNLTKAERGGLSELDKAGFIKRQLVETRQITKHVAQILDSRMNTKYDENDKLIREVKVITLKSKLVSDFRKDFQFYKVREINNYHHAHDAYLNAVVGTALIKKYPKLESEFVYGDYKVYDVRKMIAKSEQEIGKATAKYFFYSNIMNFFKTEITLANGEIRKRPLIETNGETGEIVWDKGRDFATVRKVLSMPQVNIVKKTEVQTGGFSKESILPKRNSDKLIARKKDWDPKKYGGFDSPTVAYSVLVVAKVEKGKSKKLKSVKELLGITIMERSSFEKNPIDFLEAKGYKEVKKDLIIKLPKYSLFELENGRKRMLASAGELQKGNELALPSKYVNFLYLASHYEKLKGSPEDNEQKQLFVEQHKHYLDEIIEQISEFSKRVILADANLDKVLSAYNKHRDKPIREQAENIIHLFTLTNLGAPAAFKYFDTTIDRKRYTSTKEVLDATLIHQSITGLYETRIDLSQLGGDGGGGGGGSEAAAKGGTLGIEDEYRLHETSTEPDVSLGSTWLSDFPQAWAETGGMGLAVRQAPLIIPLKATSTPVSIQQYPMSHEARLGIKPHIQRLLDQGILVPCQSPWNTPLLPVKKPGTNDYRPVQDLREVNKRVEDIHPTVPNPYNLLSGLPPSHQWYTVLDLKDAFFCLRLHPTSQPLFAFEWRDPGMGISGQLTWTRLPQGFKNSPTLFDEALHRDLADFRIQHPDLILLQYVDDILLAATSELDCQQGTRALLQTLGDLGYRASAKKAQICQKQVKYLGYLLREGQRWLTEARKETVMGQPVPKTPRQLREFLGTAGFCRLWIPGFAEMAAPLYPLTKTGTLFSWGPDQQKAYQEIKQALLTAPALGLPDLTKPFELFVDEKQGYAKGVLTQKLGPWRRPVAYLSKKLDPVAAGWPPCLRMVAAIAVLTKDAGKLTMGQPLVILAPHAVEALVKQPPDRWLSNARMTHYQAMLLDTDRVQFGPVVALNPATLLPLPEEGAPHDCLEILAETHGTRPDLTDQPIPDADHTWYTDGSSFLQEGQRKAGAAVTTETEVIWAGALPAGTSAQRAELIALTQALKMAEGKRLNVYTDSRYAFATAHIHGEIYRRRGLLTSEGREIKNKSEILALLKALFLPKRLSIIHCLGHQKGDSAEARGNRLADQAAREAAIKTPPDTSTLLAGKRTADGSEFEKRTADGSEFESPKKKAKVE

SEQ ID NO: 2069 - protein, 2096 aa, synthetic construct
MPAAKRVKLDGGDKKYSIGLDIGTNSVGWAVITDEYKVPSKKFKVLGNTDRHSIKKNLIGALLFDSGETAEATRLKRTARRRYTRRKNRICYLQEIFSNEMAKVDDSFFHRLEESFLVEEDKKHERHPIFGNIVDEVAYHEKYPTIYHLRKKLVDSTDKADLRLIYLALAHMIKFRGHFLIEGDLNPDNSDVDKLFIQLVQTYNQLFEENPINASGVDAKAILSARLSKSRRLENLIAQLPGEKKNGLFGNLIALSLGLTPNFKSNFDLAEDAKLQLSKDTYDDDLDNLLAQIGDQYADLFLAAKNLSDAILLSDILRVNTEITKAPLSASMIKRYDEHHQDLTLLKALVRQQLPEKYKEIFFDQSKNGYAGYIDGGASQEEFYKFIKPILEKMDGTEELLVKLNREDLLRKQRTFDNGSIPHQIHLGELHAILRRQEDFYPFLKDNREKIEKILTFRIPYYVGPLARGNSRFAWMTRKSEETITPWNFEEVVDKGASAQSFIERMTNFDKNLPNEKVLPKHSLLYEYFTVYNELTKVKYVTEGMRKPAFLSGEQKKAIVDLLFKTNRKVTVKQLKEDYFKKIECFDSVEISGVEDRFNASLGTYHDLLKIIKDKDFLDNEENEDILEDIVLTLTLFEDREMIEERLKTYAHLFDDKVMKQLKRRRYTGWGRLSRKLINGIRDKQSGKTILDFLKSDGFANRNFMQLIHDDSLTFKEDIQKAQVSGQGDSLHEHIANLAGSPAIKKGILQTVKVVDELVKVMGRHKPENIVIEMARENQTTQKGQKNSRERMKRIEEGIKELGSQILKEHPVENTQLQNEKLYLYYLQNGRDMYVDQELDINRLSDYDVDHIVPQSFLKDDSIDNKVLTRSDKARGKSDNVPSEEVVKKMKNYWRQLLNAKLITQRKFDNLTKAERGGLSELDKAGFIKRQLVETRQITKHVAQILDSRMNTKYDENDKLIREVKVITLKSKLVSDFRKDFQFYKVREINNYHHAHDAYLNAVVGTALIKKYPKLESEFVYGDYKVYDVRKMIAKSEQEIGKATAKYFFYSNIMNFFKTEITLANGEIRKRPLIETNGETGEIVWDKGRDFATVRKVLSMPQVNIVKKTEVQTGGFSKESILPKRNSDKLIARKKDWDPKKYGGFDSPTVAYSVLVVAKVEKGKSKKLKSVKELLGITIMERSSFEKNPIDFLEAKGYKEVKKDLIIKLPKYSLFELENGRKRMLASAGELQKGNELALPSKYVNFLYLASHYEKLKGSPEDNEQKQLFVEQHKHYLDEIIEQISEFSKRVILADANLDKVLSAYNKHRDKPIREQAENIIHLFTLTNLGAPAAFKYFDTTIDRKRYTSTKEVLDATLIHQSITGLYETRIDLSQLGGDGGGGSEAAAKPAPGGTLGIEDEYRLHETSTEPDVSLGSTWLSDFPQAWAETGGMGLAVRQAPLIIPLKATSTPVSIQQYPMSHEARLGIKPHIQRLLDQGILVPCQSPWNTPLLPVKKPGTNDYRPVQDLREVNKRVEDIHPTVPNPYNLLSGLPPSHQWYTVLDLKDAFFCLRLHPTSQPLFAFEWRDPGMGISGQLTWTRLPQGFKNSPTLFDEALHRDLADFRIQHPDLILLQYVDDILLAATSELDCQQGTRALLQTLGDLGYRASAKKAQICQKQVKYLGYLLREGQRWLTEARKETVMGQPVPKTPRQLREFLGTAGFCRLWIPGFAEMAAPLYPLTKTGTLFSWGPDQQKAYQEIKQALLTAPALGLPDLTKPFELFVDEKQGYAKGVLTQKLGPWRRPVAYLSKKLDPVAAGWPPCLRMVAAIAVLTKDAGKLTMGQPLVILAPHAVEALVKQPPDRWLSNARMTHYQAMLLDTDRVQFGPVVALNPATLLPLPEEGAPHDCLEILAETHGTRPDLTDQPIPDADHTWYTDGSSFLQEGQRKAGAAVTTETEVIWAGALPAGTSAQRAELIALTQALKMAEGKRLNVYTDSRYAFATAHIHGEIYRRRGLLTSEGREIKNKSEILALLKALFLPKRLSIIHCLGHQKGDSAEARGNRLADQAAREAAIKTPPDTSTLLAGKRTADGSEFEKRTADGSEFESPKKKAKVE

SEQ ID NO: 2070 - protein, 2105 aa, synthetic construct
MPAAKRVKLDGGDKKYSIGLDIGTNSVGWAVITDEYKVPSKKFKVLGNTDRHSIKKNLIGALLFDSGETAEATRLKRTARRRYTRRKNRICYLQEIFSNEMAKVDDSFFHRLEESFLVEEDKKHERHPIFGNIVDEVAYHEKYPTIYHLRKKLVDSTDKADLRLIYLALAHMIKFRGHFLIEGDLNPDNSDVDKLFIQLVQTYNQLFEENPINASGVDAKAILSARLSKSRRLENLIAQLPGEKKNGLFGNLIALSLGLTPNFKSNFDLAEDAKLQLSKDTYDDDLDNLLAQIGDQYADLFLAAKNLSDAILLSDILRVNTEITKAPLSASMIKRYDEHHQDLTLLKALVRQQLPEKYKEIFFDQSKNGYAGYIDGGASQEEFYKFIKPILEKMDGTEELLVKLNREDLLRKQRTFDNGSIPHQIHLGELHAILRRQEDFYPFLKDNREKIEKILTFRIPYYVGPLARGNSRFAWMTRKSEETITPWNFEEVVDKGASAQSFIERMTNFDKNLPNEKVLPKHSLLYEYFTVYNELTKVKYVTEGMRKPAFLSGEQKKAIVDLLFKTNRKVTVKQLKEDYFKKIECFDSVEISGVEDRFNASLGTYHDLLKIIKDKDFLDNEENEDILEDIVLTLTLFEDREMIEERLKTYAHLFDDKVMKQLKRRRYTGWGRLSRKLINGIRDKQSGKTILDFLKSDGFANRNFMQLIHDDSLTFKEDIQKAQVSGQGDSLHEHIANLAGSPAIKKGILQTVKVVDELVKVMGRHKPENIVIEMARENQTTQKGQKNSRERMKRIEEGIKELGSQILKEHPVENTQLQNEKLYLYYLQNGRDMYVDQELDINRLSDYDVDHIVPQSFLKDDSIDNKVLTRSDKARGKSDNVPSEEVVKKMKNYWRQLLNAKLITQRKFDNLTKAERGGLSELDKAGFIKRQLVETRQITKHVAQILDSRMNTKYDENDKLIREVKVITLKSKLVSDFRKDFQFYKVREINNYHHAHDAYLNAVVGTALIKKYPKLESEFVYGDYKVYDVRKMIAKSEQEIGKATAKYFFYSNIMNFFKTEITLANGEIRKRPLIETNGETGEIVWDKGRDFATVRKVLSMPQVNIVKKTEVQTGGFSKESILPKRNSDKLIARKKDWDPKKYGGFDSPTVAYSVLVVAKVEKGKSKKLKSVKELLGITIMERSSFEKNPIDFLEAKGYKEVKKDLIIKLPKYSLFELENGRKRMLASAGELQKGNELALPSKYVNFLYLASHYEKLKGSPEDNEQKQLFVEQHKHYLDEIIEQISEFSKRVILADANLDKVLSAYNKHRDKPIREQAENIIHLFTLTNLGAPAAFKYFDTTIDRKRYTSTKEVLDATLIHQSITGLYETRIDLSQLGGDGGEAAAKEAAAKEAAAKEAAAKGGTLGIEDEYRLHETSTEPDVSLGSTWLSDFPQAWAETGGMGLAVRQAPLIIPLKATSTPVSIQQYPMSHEARLGIKPHIQRLLDQGILVPCQSPWNTPLLPVKKPGTNDYRPVQDLREVNKRVEDIHPTVPNPYNLLSGLPPSHQWYTVLDLKDAFFCLRLHPTSQPLFAFEWRDPGMGISGQLTWTRLPQGFKNSPTLFNEALHRDLADFRIQHPDLILLQYVDDILLAATSELDCQQGTRALLQTLGDLGYRASAKKAQICQKQVKYLGYLLREGQRWLTEARKETVMGQPVPKTPRQLREFLGTAGFCRLWIPGFAEMAAPLYPLTKPGTLFSWGPDQQKAYQEIKQALLTAPALGLPDLTKPFELFVDEKQGYAKGVLTQKLGPWRRPVAYLSKKLDPVAAGWPPCLRMVAAIAVLTKDAGKLTMGQPLVILAPHAVEALVKQPPDRWLSNARMTHYQAMLLDTDRVQFGPVVALNPATLLPLPEEGAPHDCLEILAETHGTRPDLTDQPIPDADHTWYTDGSSFLQEGQRKAGAAVTTETEVIWAGALPAGTSAQRAELIALTQALKMAEGKRLNVYTDSRYAFATAHIHGEIYRRRGWLTSEGREIKNKSEILALLKALFLPKRLSIIHCLGHQKGDSAEARGNRLADQAAREAAIKTPPDTSTLLAGKRTADGSEFEKRTADGSEFESPKKKAKVE

SEQ ID NO: 2071 - protein, 2096 aa, synthetic construct
MPAAKRVKLDGGDKKYSIGLDIGTNSVGWAVITDEYKVPSKKFKVLGNTDRHSIKKNLIGALLFDSGETAEATRLKRTARRRYTRRKNRICYLQEIFSNEMAKVDDSFFHRLEESFLVEEDKKHERHPIFGNIVDEVAYHEKYPTIYHLRKKLVDSTDKADLRLIYLALAHMIKFRGHFLIEGDLNPDNSDVDKLFIQLVQTYNQLFEENPINASGVDAKAILSARLSKSRRLENLIAQLPGEKKNGLFGNLIALSLGLTPNFKSNFDLAEDAKLQLSKDTYDDDLDNLLAQIGDQYADLFLAAKNLSDAILLSDILRVNTEITKAPLSASMIKRYDEHHQDLTLLKALVRQQLPEKYKEIFFDQSKNGYAGYIDGGASQEEFYKFIKPILEKMDGTEELLVKLNREDLLRKQRTFDNGSIPHQIHLGELHAILRRQEDFYPFLKDNREKIEKILTFRIPYYVGPLARGNSRFAWMTRKSEETITPWNFEEVVDKGASAQSFIERMTNFDKNLPNEKVLPKHSLLYEYFTVYNELTKVKYVTEGMRKPAFLSGEQKKAIVDLLFKTNRKVTVKQLKEDYFKKIECFDSVEISGVEDRFNASLGTYHDLLKIIKDKDFLDNEENEDILEDIVLTLTLFEDREMIEERLKTYAHLFDDKVMKQLKRRRYTGWGRLSRKLINGIRDKQSGKTILDFLKSDGFANRNFMQLIHDDSLTFKEDIQKAQVSGQGDSLHEHIANLAGSPAIKKGILQTVKVVDELVKVMGRHKPENIVIEMARENQTTQKGQKNSRERMKRIEEGIKELGSQILKEHPVENTQLQNEKLYLYYLQNGRDMYVDQELDINRLSDYDVDHIVPQSFLKDDSIDNKVLTRSDKARGKSDNVPSEEVVKKMKNYWRQLLNAKLITQRKFDNLTKAERGGLSELDKAGFIKRQLVETRQITKHVAQILDSRMNTKYDENDKLIREVKVITLKSKLVSDFRKDFQFYKVREINNYHHAHDAYLNAVVGTALIKKYPKLESEFVYGDYKVYDVRKMIAKSEQEIGKATAKYFFYSNIMNFFKTEITLANGEIRKRPLIETNGETGEIVWDKGRDFATVRKVLSMPQVNIVKKTEVQTGGFSKESILPKRNSDKLIARKKDWDPKKYGGFDSPTVAYSVLVVAKVEKGKSKKLKSVKELLGITIMERSSFEKNPIDFLEAKGYKEVKKDLIIKLPKYSLFELENGRKRMLASAGELQKGNELALPSKYVNFLYLASHYEKLKGSPEDNEQKQLFVEQHKHYLDEIIEQISEFSKRVILADANLDKVLSAYNKHRDKPIREQAENIIHLFTLTNLGAPAAFKYFDTTIDRKRYTSTKEVLDATLIHQSITGLYETRIDLSQLGGDGGGGSEAAAKPAPGGTLGIEDEYRLHETSTEPDVSLGSTWLSDFPQAWAETGGMGLAVRQAPLIIPLKATSTPVSIQQYPMSHEARLGIKPHIQRLLDQGILVPCQSPWNTPLLPVKKPGTNDYRPVQDLREVNKRVEDIHPTVPNPYNLLSGLPPSHQWYTVLDLKDAFFCLRLHPTSQPLFAFEWRDPGMGISGQLTWTRLPQGFKNSPTLFNEALHRDLADFRIQHPDLILLQYVDDILLAATSELDCQQGTRALLQTLGDLGYRASAKKAQICQKQVKYLGYLLREGQRWLTEARKETVMGQPVPKTPRQLREFLGTAGFCRLWIPGFAEMAAPLYPLTKPGTLFSWGPDQQKAYQEIKQALLTAPALGLPDLTKPFELFVDEKQGYAKGVLTQKLGPWRRPVAYLSKKLDPVAAGWPPCLRMVAAIAVLTKDAGKLTMGQPLVILAPHAVEALVKQPPDRWLSNARMTHYQAMLLDTDRVQFGPVVALNPATLLPLPEEGAPHDCLEILAETHGTRPDLTDQPIPDADHTWYTDGSSFLQEGQRKAGAAVTTETEVIWAGALPAGTSAQRAELIALTQALKMAEGKRLNVYTDSRYAFATAHIHGEIYRRRGWLTSEGREIKNKSEILALLKALFLPKRLSIIHCLGHQKGDSAEARGNRLADQAAREAAIKTPPDTSTLLAGKRTADGSEFEKRTADGSEFESPKKKAKVE

SEQ ID NO: 2072 - protein, 2105 aa, synthetic construct
MPAAKRVKLDGGDKKYSIGLDIGTNSVGWAVITDEYKVPSKKFKVLGNTDRHSIKKNLIGALLFDSGETAEATRLKRTARRRYTRRKNRICYLQEIFSNEMAKVDDSFFHRLEESFLVEEDKKHERHPIFGNIVDEVAYHEKYPTIYHLRKKLVDSTDKADLRLIYLALAHMIKFRGHFLIEGDLNPDNSDVDKLFIQLVQTYNQLFEENPINASGVDAKAILSARLSKSRRLENLIAQLPGEKKNGLFGNLIALSLGLTPNFKSNFDLAEDAKLQLSKDTYDDDLDNLLAQIGDQYADLFLAAKNLSDAILLSDILRVNTEITKAPLSASMIKRYDEHHQDLTLLKALVRQQLPEKYKEIFFDQSKNGYAGYIDGGASQEEFYKFIKPILEKMDGTEELLVKLNREDLLRKQRTFDNGSIPHQIHLGELHAILRRQEDFYPFLKDNREKIEKILTFRIPYYVGPLARGNSRFAWMTRKSEETITPWNFEEVVDKGASAQSFIERMTNFDKNLPNEKVLPKHSLLYEYFTVYNELTKVKYVTEGMRKPAFLSGEQKKAIVDLLFKTNRKVTVKQLKEDYFKKIECFDSVEISGVEDRFNASLGTYHDLLKIIKDKDFLDNEENEDILEDIVLTLTLFEDREMIEERLKTYAHLFDDKVMKQLKRRRYTGWGRLSRKLINGIRDKQSGKTILDFLKSDGFANRNFMQLIHDDSLTFKEDIQKAQVSGQGDSLHEHIANLAGSPAIKKGILQTVKVVDELVKVMGRHKPENIVIEMARENQTTQKGQKNSRERMKRIEEGIKELGSQILKEHPVENTQLQNEKLYLYYLQNGRDMYVDQELDINRLSDYDVDHIVPQSFLKDDSIDNKVLTRSDKARGKSDNVPSEEVVKKMKNYWRQLLNAKLITQRKFDNLTKAERGGLSELDKAGFIKRQLVETRQITKHVAQILDSRMNTKYDENDKLIREVKVITLKSKLVSDFRKDFQFYKVREINNYHHAHDAYLNAVVGTALIKKYPKLESEFVYGDYKVYDVRKMIAKSEQEIGKATAKYFFYSNIMNFFKTEITLANGEIRKRPLIETNGETGEIVWDKGRDFATVRKVLSMPQVNIVKKTEVQTGGFSKESILPKRNSDKLIARKKDWDPKKYGGFDSPTVAYSVLVVAKVEKGKSKKLKSVKELLGITIMERSSFEKNPIDFLEAKGYKEVKKDLIIKLPKYSLFELENGRKRMLASAGELQKGNELALPSKYVNFLYLASHYEKLKGSPEDNEQKQLFVEQHKHYLDEIIEQISEFSKRVILADANLDKVLSAYNKHRDKPIREQAENIIHLFTLTNLGAPAAFKYFDTTIDRKRYTSTKEVLDATLIHQSITGLYETRIDLSQLGGDGGGGGGSGGGGSGGGGSGGGGSGGTLGIEDEYRLHETSTEPDVSLGSTWLSDFPQAWAETGGMGLAVRQAPLIIPLKATSTPVSIQQYPMSHEARLGIKPHIQRLLDQGILVPCQSPWNTPLLPVKKPGTNDYRPVQDLREVNKRVEDIHPTVPNPYNLLSGLPPSHQWYTVLDLKDAFFCLRLHPTSQPLFAFEWRDPGMGISGQLTWTRLPQGFKNSPTLFNEALHRDLADFRIQHPDLILLQYVDDILLAATSELDCQQGTRALLQTLGDLGYRASAKKAQICQKQVKYLGYLLREGQRWLTEARKETVMGQPVPKTPRQLREFLGTAGFCRLWIPGFAEMAAPLYPLTKPGTLFSWGPDQQKAYQEIKQALLTAPALGLPDLTKPFELFVDEKQGYAKGVLTQKLGPWRRPVAYLSKKLDPVAAGWPPCLRMVAAIAVLTKDAGKLTMGQPLVILAPHAVEALVKQPPDRWLSNARMTHYQAMLLDTDRVQFGPVVALNPATLLPLPEEGAPHDCLEILAETHGTRPDLTDQPIPDADHTWYTDGSSFLQEGQRKAGAAVTTETEVIWAGALPAGTSAQRAELIALTQALKMAEGKRLNVYTDSRYAFATAHIHGEIYRRRGWLTSEGREIKNKSEILALLKALFLPKRLSIIHCLGHQKGDSAEARGNRLADQAAREAAIKTPPDTSTLLAGKRTADGSEFEKRTADGSEFESPKKKAKVE

SEQ ID NO: 2073 - protein, 2093 aa, synthetic construct
MPAAKRVKLDGGDKKYSIGLDIGTNSVGWAVITDEYKVPSKKFKVLGNTDRHSIKKNLIGALLFDSGETAEATRLKRTARRRYTRRKNRICYLQEIFSNEMAKVDDSFFHRLEESFLVEEDKKHERHPIFGNIVDEVAYHEKYPTIYHLRKKLVDSTDKADLRLIYLALAHMIKFRGHFLIEGDLNPDNSDVDKLFIQLVQTYNQLFEENPINASGVDAKAILSARLSKSRRLENLIAQLPGEKKNGLFGNLIALSLGLTPNFKSNFDLAEDAKLQLSKDTYDDDLDNLLAQIGDQYADLFLAAKNLSDAILLSDILRVNTEITKAPLSASMIKRYDEHHQDLTLLKALVRQQLPEKYKEIFFDQSKNGYAGYIDGGASQEEFYKFIKPILEKMDGTEELLVKLNREDLLRKQRTFDNGSIPHQIHLGELHAILRRQEDFYPFLKDNREKIEKILTFRIPYYVGPLARGNSRFAWMTRKSEETITPWNFEEVVDKGASAQSFIERMTNFDKNLPNEKVLPKHSLLYEYFTVYNELTKVKYVTEGMRKPAFLSGEQKKAIVDLLFKTNRKVTVKQLKEDYFKKIECFDSVEISGVEDRFNASLGTYHDLLKIIKDKDFLDNEENEDILEDIVLTLTLFEDREMIEERLKTYAHLFDDKVMKQLKRRRYTGWGRLSRKLINGIRDKQSGKTILDFLKSDGFANRNFMQLIHDDSLTFKEDIQKAQVSGQGDSLHEHIANLAGSPAIKKGILQTVKVVDELVKVMGRHKPENIVIEMARENQTTQKGQKNSRERMKRIEEGIKELGSQILKEHPVENTQLQNEKLYLYYLQNGRDMYVDQELDINRLSDYDVDHIVPQSFLKDDSIDNKVLTRSDKARGKSDNVPSEEVVKKMKNYWRQLLNAKLITQRKFDNLTKAERGGLSELDKAGFIKRQLVETRQITKHVAQILDSRMNTKYDENDKLIREVKVITLKSKLVSDFRKDFQFYKVREINNYHHAHDAYLNAVVGTALIKKYPKLESEFVYGDYKVYDVRKMIAKSEQEIGKATAKYFFYSNIMNFFKTEITLANGEIRKRPLIETNGETGEIVWDKGRDFATVRKVLSMPQVNIVKKTEVQTGGFSKESILPKRNSDKLIARKKDWDPKKYGGFDSPTVAYSVLVVAKVEKGKSKKLKSVKELLGITIMERSSFEKNPIDFLEAKGYKEVKKDLIIKLPKYSLFELENGRKRMLASAGELQKGNELALPSKYVNFLYLASHYEKLKGSPEDNEQKQLFVEQHKHYLDEIIEQISEFSKRVILADANLDKVLSAYNKHRDKPIREQAENIIHLFTLTNLGAPAAFKYFDTTIDRKRYTSTKEVLDATLIHQSITGLYETRIDLSQLGGDGGGSSEAAAKGGTLGIEDEYRLHETSTEPDVSLGSTWLSDFPQAWAETGGMGLAVRQAPLIIPLKATSTPVSIQQYPMSHEARLGIKPHIQRLLDQGILVPCQSPWNTPLLPVKKPGTNDYRPVQDLREVNKRVEDIHPTVPNPYNLLSGLPPSHQWYTVLDLKDAFFCLRLHPTSQPLFAFEWRDPGMGISGQLTWTRLPQGFKNSPTLFNEALHRDLADFRIQHPDLILLQYVDDILLAATSELDCQQGTRALLQTLGDLGYRASAKKAQICQKQVKYLGYLLREGQRWLTEARKETVMGQPVPKTPRQLREFLGTAGFCRLWIPGFAEMAAPLYPLTKPGTLFSWGPDQQKAYQEIKQALLTAPALGLPDLTKPFELFVDEKQGYAKGVLTQKLGPWRRPVAYLSKKLDPVAAGWPPCLRMVAAIAVLTKDAGKLTMGQPLVILAPHAVEALVKQPPDRWLSNARMTHYQAMLLDTDRVQFGPVVALNPATLLPLPEEGAPHDCLEILAETHGTRPDLTDQPIPDADHTWYTDGSSFLQEGQRKAGAAVTTETEVIWAGALPAGTSAQRAELIALTQALKMAEGKRLNVYTDSRYAFATAHIHGEIYRRRGWLTSEGREIKNKSEILALLKALFLPKRLSIIHCLGHQKGDSAEARGNRLADQAAREAAIKTPPDTSTLLAGKRTADGSEFEKRTADGSEFESPKKKAKVE

SEQ ID NO: 2074 - protein, 2096 aa, synthetic construct
MPAAKRVKLDGGDKKYSIGLDIGTNSVGWAVITDEYKVPSKKFKVLGNTDRHSIKKNLIGALLFDSGETAEATRLKRTARRRYTRRKNRICYLQEIFSNEMAKVDDSFFHRLEESFLVEEDKKHERHPIFGNIVDEVAYHEKYPTIYHLRKKLVDSTDKADLRLIYLALAHMIKFRGHFLIEGDLNPDNSDVDKLFIQLVQTYNQLFEENPINASGVDAKAILSARLSKSRRLENLIAQLPGEKKNGLFGNLIALSLGLTPNFKSNFDLAEDAKLQLSKDTYDDDLDNLLAQIGDQYADLFLAAKNLSDAILLSDILRVNTEITKAPLSASMIKRYDEHHQDLTLLKALVRQQLPEKYKEIFFDQSKNGYAGYIDGGASQEEFYKFIKPILEKMDGTEELLVKLNREDLLRKQRTFDNGSIPHQIHLGELHAILRRQEDFYPFLKDNREKIEKILTFRIPYYVGPLARGNSRFAWMTRKSEETITPWNFEEVVDKGASAQSFIERMTNFDKNLPNEKVLPKHSLLYEYFTVYNELTKVKYVTEGMRKPAFLSGEQKKAIVDLLFKTNRKVTVKQLKEDYFKKIECFDSVEISGVEDRFNASLGTYHDLLKIIKDKDFLDNEENEDILEDIVLTLTLFEDREMIEERLKTYAHLFDDKVMKQLKRRRYTGWGRLSRKLINGIRDKQSGKTILDFLKSDGFANRNFMQLIHDDSLTFKEDIQKAQVSGQGDSLHEHIANLAGSPAIKKGILQTVKVVDELVKVMGRHKPENIVIEMARENQTTQKGQKNSRERMKRIEEGIKELGSQILKEHPVENTQLQNEKLYLYYLQNGRDMYVDQELDINRLSDYDVDHIVPQSFLKDDSIDNKVLTRSDKARGKSDNVPSEEVVKKMKNYWRQLLNAKLITQRKFDNLTKAERGGLSELDKAGFIKRQLVETRQITKHVAQILDSRMNTKYDENDKLIREVKVITLKSKLVSDFRKDFQFYKVREINNYHHAHDAYLNAVVGTALIKKYPKLESEFVYGDYKVYDVRKMIAKSEQEIGKATAKYFFYSNIMNFFKTEITLANGEIRKRPLIETNGETGEIVWDKGRDFATVRKVLSMPQVNIVKKTEVQTGGFSKESILPKRNSDKLIARKKDWDPKKYGGFDSPTVAYSVLVVAKVEKGKSKKLKSVKELLGITIMERSSFEKNPIDFLEAKGYKEVKKDLIIKLPKYSLFELENGRKRMLASAGELQKGNELALPSKYVNFLYLASHYEKLKGSPEDNEQKQLFVEQHKHYLDEIIEQISEFSKRVILADANLDKVLSAYNKHRDKPIREQAENIIHLFTLTNLGAPAAFKYFDTTIDRKRYTSTKEVLDATLIHQSITGLYETRIDLSQLGGDGGGGSEAAAKGGGGGTLGIEDEYRLHETSTEPDVSLGSTWLSDFPQAWAETGGMGLAVRQAPLIIPLKATSTPVSIQQYPMSHEARLGIKPHIQRLLDQGILVPCQSPWNTPLLPVKKPGTNDYRPVQDLREVNKRVEDIHPTVPNPYNLLSGLPPSHQWYTVLDLKDAFFCLRLHPTSQPLFAFEWRDPGMGISGQLTWTRLPQGFKNSPTLFNEALHRDLADFRIQHPDLILLQYVDDILLAATSELDCQQGTRALLQTLGDLGYRASAKKAQICQKQVKYLGYLLREGQRWLTEARKETVMGQPVPKTPRQLREFLGTAGFCRLWIPGFAEMAAPLYPLTKPGTLFSWGPDQQKAYQEIKQALLTAPALGLPDLTKPFELFVDEKQGYAKGVLTQKLGPWRRPVAYLSKKLDPVAAGWPPCLRMVAAIAVLTKDAGKLTMGQPLVILAPHAVEALVKQPPDRWLSNARMTHYQAMLLDTDRVQFGPVVALNPATLLPLPEEGAPHDCLEILAETHGTRPDLTDQPIPDADHTWYTDGSSFLQEGQRKAGAAVTTETEVIWAGALPAGTSAQRAELIALTQALKMAEGKRLNVYTDSRYAFATAHIHGEIYRRRGWLTSEGREIKNKSEILALLKALFLPKRLSIIHCLGHQKGDSAEARGNRLADQAAREAAIKTPPDTSTLLAGKRTADGSEFEKRTADGSEFESPKKKAKVE

SEQ ID NO: 2075 - protein, 2096 aa, synthetic construct
MPAAKRVKLDGGDKKYSIGLDIGTNSVGWAVITDEYKVPSKKFKVLGNTDRHSIKKNLIGALLFDSGETAEATRLKRTARRRYTRRKNRICYLQEIFSNEMAKVDDSFFHRLEESFLVEEDKKHERHPIFGNIVDEVAYHEKYPTIYHLRKKLVDSTDKADLRLIYLALAHMIKFRGHFLIEGDLNPDNSDVDKLFIQLVQTYNQLFEENPINASGVDAKAILSARLSKSRRLENLIAQLPGEKKNGLFGNLIALSLGLTPNFKSNFDLAEDAKLQLSKDTYDDDLDNLLAQIGDQYADLFLAAKNLSDAILLSDILRVNTEITKAPLSASMIKRYDEHHQDLTLLKALVRQQLPEKYKEIFFDQSKNGYAGYIDGGASQEEFYKFIKPILEKMDGTEELLVKLNREDLLRKQRTFDNGSIPHQIHLGELHAILRRQEDFYPFLKDNREKIEKILTFRIPYYVGPLARGNSRFAWMTRKSEETITPWNFEEVVDKGASAQSFIERMTNFDKNLPNEKVLPKHSLLYEYFTVYNELTKVKYVTEGMRKPAFLSGEQKKAIVDLLFKTNRKVTVKQLKEDYFKKIECFDSVEISGVEDRFNASLGTYHDLLKIIKDKDFLDNEENEDILEDIVLTLTLFEDREMIEERLKTYAHLFDDKVMKQLKRRRYTGWGRLSRKLINGIRDKQSGKTILDFLKSDGFANRNFMQLIHDDSLTFKEDIQKAQVSGQGDSLHEHIANLAGSPAIKKGILQTVKVVDELVKVMGRHKPENIVIEMARENQTTQKGQKNSRERMKRIEEGIKELGSQILKEHPVENTQLQNEKLYLYYLQNGRDMYVDQELDINRLSDYDVDHIVPQSFLKDDSIDNKVLTRSDKARGKSDNVPSEEVVKKMKNYWRQLLNAKLITQRKFDNLTKAERGGLSELDKAGFIKRQLVETRQITKHVAQILDSRMNTKYDENDKLIREVKVITLKSKLVSDFRKDFQFYKVREINNYHHAHDAYLNAVVGTALIKKYPKLESEFVYGDYKVYDVRKMIAKSEQEIGKATAKYFFYSNIMNFFKTEITLANGEIRKRPLIETNGETGEIVWDKGRDFATVRKVLSMPQVNIVKKTEVQTGGFSKESILPKRNSDKLIARKKDWDPKKYGGFDSPTVAYSVLVVAKVEKGKSKKLKSVKELLGITIMERSSFEKNPIDFLEAKGYKEVKKDLIIKLPKYSLFELENGRKRMLASAGELQKGNELALPSKYVNFLYLASHYEKLKGSPEDNEQKQLFVEQHKHYLDEIIEQISEFSKRVILADANLDKVLSAYNKHRDKPIREQAENIIHLFTLTNLGAPAAFKYFDTTIDRKRYTSTKEVLDATLIHQSITGLYETRIDLSQLGGDGGGSSEAAAKGGGGGTLGIEDEYRLHETSTEPDVSLGSTWLSDFPQAWAETGGMGLAVRQAPLIIPLKATSTPVSIQQYPMSHEARLGIKPHIQRLLDQGILVPCQSPWNTPLLPVKKPGTNDYRPVQDLREVNKRVEDIHPTVPNPYNLLSGLPPSHQWYTVLDLKDAFFCLRLHPTSQPLFAFEWRDPGMGISGQLTWTRLPQGFKNSPTLFNEALHRDLADFRIQHPDLILLQYVDDILLAATSELDCQQGTRALLQTLGDLGYRASAKKAQICQKQVKYLGYLLREGQRWLTEARKETVMGQPVPKTPRQLREFLGTAGFCRLWIPGFAEMAAPLYPLTKPGTLFSWGPDQQKAYQEIKQALLTAPALGLPDLTKPFELFVDEKQGYAKGVLTQKLGPWRRPVAYLSKKLDPVAAGWPPCLRMVAAIAVLTKDAGKLTMGQPLVILAPHAVEALVKQPPDRWLSNARMTHYQAMLLDTDRVQFGPVVALNPATLLPLPEEGAPHDCLEILAETHGTRPDLTDQPIPDADHTWYTDGSSFLQEGQRKAGAAVTTETEVIWAGALPAGTSAQRAELIALTQALKMAEGKRLNVYTDSRYAFATAHIHGEIYRRRGWLTSEGREIKNKSEILALLKALFLPKRLSIIHCLGHQKGDSAEARGNRLADQAAREAAIKTPPDTSTLLAGKRTADGSEFEKRTADGSEFESPKKKAKVE

SEQ ID NO: 2076 - protein, 2096 aa, synthetic construct
MPAAKRVKLDGGDKKYSIGLDIGTNSVGWAVITDEYKVPSKKFKVLGNTDRHSIKKNLIGALLFDSGETAEATRLKRTARRRYTRRKNRICYLQEIFSNEMAKVDDSFFHRLEESFLVEEDKKHERHPIFGNIVDEVAYHEKYPTIYHLRKKLVDSTDKADLRLIYLALAHMIKFRGHFLIEGDLNPDNSDVDKLFIQLVQTYNQLFEENPINASGVDAKAILSARLSKSRRLENLIAQLPGEKKNGLFGNLIALSLGLTPNFKSNFDLAEDAKLQLSKDTYDDDLDNLLAQIGDQYADLFLAAKNLSDAILLSDILRVNTEITKAPLSASMIKRYDEHHQDLTLLKALVRQQLPEKYKEIFFDQSKNGYAGYIDGGASQEEFYKFIKPILEKMDGTEELLVKLNREDLLRKQRTFDNGSIPHQIHLGELHAILRRQEDFYPFLKDNREKIEKILTFRIPYYVGPLARGNSRFAWMTRKSEETITPWNFEEVVDKGASAQSFIERMTNFDKNLPNEKVLPKHSLLYEYFTVYNELTKVKYVTEGMRKPAFLSGEQKKAIVDLLFKTNRKVTVKQLKEDYFKKIECFDSVEISGVEDRFNASLGTYHDLLKIIKDKDFLDNEENEDILEDIVLTLTLFEDREMIEERLKTYAHLFDDKVMKQLKRRRYTGWGRLSRKLINGIRDKQSGKTILDFLKSDGFANRNFMQLIHDDSLTFKEDIQKAQVSGQGDSLHEHIANLAGSPAIKKGILQTVKVVDELVKVMGRHKPENIVIEMARENQTTQKGQKNSRERMKRIEEGIKELGSQILKEHPVENTQLQNEKLYLYYLQNGRDMYVDQELDINRLSDYDVDHIVPQSFLKDDSIDNKVLTRSDKARGKSDNVPSEEVVKKMKNYWRQLLNAKLITQRKFDNLTKAERGGLSELDKAGFIKRQLVETRQITKHVAQILDSRMNTKYDENDKLIREVKVITLKSKLVSDFRKDFQFYKVREINNYHHAHDAYLNAVVGTALIKKYPKLESEFVYGDYKVYDVRKMIAKSEQEIGKATAKYFFYSNIMNFFKTEITLANGEIRKRPLIETNGETGEIVWDKGRDFATVRKVLSMPQVNIVKKTEVQTGGFSKESILPKRNSDKLIARKKDWDPKKYGGFDSPTVAYSVLVVAKVEKGKSKKLKSVKELLGITIMERSSFEKNPIDFLEAKGYKEVKKDLIIKLPKYSLFELENGRKRMLASAGELQKGNELALPSKYVNFLYLASHYEKLKGSPEDNEQKQLFVEQHKHYLDEIIEQISEFSKRVILADANLDKVLSAYNKHRDKPIREQAENIIHLFTLTNLGAPAAFKYFDTTIDRKRYTSTKEVLDATLIHQSITGLYETRIDLSQLGGDGGGSSGGSEAAAKGGTLGIEDEYRLHETSTEPDVSLGSTWLSDFPQAWAETGGMGLAVRQAPLIIPLKATSTPVSIQQYPMSHEARLGIKPHIQRLLDQGILVPCQSPWNTPLLPVKKPGTNDYRPVQDLREVNKRVEDIHPTVPNPYNLLSGLPPSHQWYTVLDLKDAFFCLRLHPTSQPLFAFEWRDPGMGISGQLTWTRLPQGFKNSPTLFNEALHRDLADFRIQHPDLILLQYVDDILLAATSELDCQQGTRALLQTLGDLGYRASAKKAQICQKQVKYLGYLLREGQRWLTEARKETVMGQPVPKTPRQLREFLGTAGFCRLWIPGFAEMAAPLYPLTKPGTLFSWGPDQQKAYQEIKQALLTAPALGLPDLTKPFELFVDEKQGYAKGVLTQKLGPWRRPVAYLSKKLDPVAAGWPPCLRMVAAIAVLTKDAGKLTMGQPLVILAPHAVEALVKQPPDRWLSNARMTHYQAMLLDTDRVQFGPVVALNPATLLPLPEEGAPHDCLEILAETHGTRPDLTDQPIPDADHTWYTDGSSFLQEGQRKAGAAVTTETEVIWAGALPAGTSAQRAELIALTQALKMAEGKRLNVYTDSRYAFATAHIHGEIYRRRGWLTSEGREIKNKSEILALLKALFLPKRLSIIHCLGHQKGDSAEARGNRLADQAAREAAIKTPPDTSTLLAGKRTADGSEFEKRTADGSEFESPKKKAKVE

SEQ ID NO: 2077 - protein, 2090 aa, synthetic construct
MPAAKRVKLDGGDKKYSIGLDIGTNSVGWAVITDEYKVPSKKFKVLGNTDRHSIKKNLIGALLFDSGETAEATRLKRTARRRYTRRKNRICYLQEIFSNEMAKVDDSFFHRLEESFLVEEDKKHERHPIFGNIVDEVAYHEKYPTIYHLRKKLVDSTDKADLRLIYLALAHMIKFRGHFLIEGDLNPDNSDVDKLFIQLVQTYNQLFEENPINASGVDAKAILSARLSKSRRLENLIAQLPGEKKNGLFGNLIALSLGLTPNFKSNFDLAEDAKLQLSKDTYDDDLDNLLAQIGDQYADLFLAAKNLSDAILLSDILRVNTEITKAPLSASMIKRYDEHHQDLTLLKALVRQQLPEKYKEIFFDQSKNGYAGYIDGGASQEEFYKFIKPILEKMDGTEELLVKLNREDLLRKQRTFDNGSIPHQIHLGELHAILRRQEDFYPFLKDNREKIEKILTFRIPYYVGPLARGNSRFAWMTRKSEETITPWNFEEVVDKGASAQSFIERMTNFDKNLPNEKVLPKHSLLYEYFTVYNELTKVKYVTEGMRKPAFLSGEQKKAIVDLLFKTNRKVTVKQLKEDYFKKIECFDSVEISGVEDRFNASLGTYHDLLKIIKDKDFLDNEENEDILEDIVLTLTLFEDREMIEERLKTYAHLFDDKVMKQLKRRRYTGWGRLSRKLINGIRDKQSGKTILDFLKSDGFANRNFMQLIHDDSLTFKEDIQKAQVSGQGDSLHEHIANLAGSPAIKKGILQTVKVVDELVKVMGRHKPENIVIEMARENQTTQKGQKNSRERMKRIEEGIKELGSQILKEHPVENTQLQNEKLYLYYLQNGRDMYVDQELDINRLSDYDVDHIVPQSFLKDDSIDNKVLTRSDKARGKSDNVPSEEVVKKMKNYWRQLLNAKLITQRKFDNLTKAERGGLSELDKAGFIKRQLVETRQITKHVAQILDSRMNTKYDENDKLIREVKVITLKSKLVSDFRKDFQFYKVREINNYHHAHDAYLNAVVGTALIKKYPKLESEFVYGDYKVYDVRKMIAKSEQEIGKATAKYFFYSNIMNFFKTEITLANGEIRKRPLIETNGETGEIVWDKGRDFATVRKVLSMPQVNIVKKTEVQTGGFSKESILPKRNSDKLIARKKDWDPKKYGGFDSPTVAYSVLVVAKVEKGKSKKLKSVKELLGITIMERSSFEKNPIDFLEAKGYKEVKKDLIIKLPKYSLFELENGRKRMLASAGELQKGNELALPSKYVNFLYLASHYEKLKGSPEDNEQKQLFVEQHKHYLDEIIEQISEFSKRVILADANLDKVLSAYNKHRDKPIREQAENIIHLFTLTNLGAPAAFKYFDTTIDRKRYTSTKEVLDATLIHQSITGLYETRIDLSQLGGDGGPAPAPGGTLGIEDEYRLHETSTEPDVSLGSTWLSDFPQAWAETGGMGLAVRQAPLIIPLKATSTPVSIQQYPMSHEARLGIKPHIQRLLDQGILVPCQSPWNTPLLPVKKPGTNDYRPVQDLREVNKRVEDIHPTVPNPYNLLSGLPPSHQWYTVLDLKDAFFCLRLHPTSQPLFAFEWRDPGMGISGQLTWTRLPQGFKNSPTLFNEALHRDLADFRIQHPDLILLQYVDDILLAATSELDCQQGTRALLQTLGDLGYRASAKKAQICQKQVKYLGYLLREGQRWLTEARKETVMGQPVPKTPRQLREFLGTAGFCRLWIPGFAEMAAPLYPLTKPGTLFSWGPDQQKAYQEIKQALLTAPALGLPDLTKPFELFVDEKQGYAKGVLTQKLGPWRRPVAYLSKKLDPVAAGWPPCLRMVAAIAVLTKDAGKLTMGQPLVILAPHAVEALVKQPPDRWLSNARMTHYQAMLLDTDRVQFGPVVALNPATLLPLPEEGAPHDCLEILAETHGTRPDLTDQPIPDADHTWYTDGSSFLQEGQRKAGAAVTTETEVIWAGALPAGTSAQRAELIALTQALKMAEGKRLNVYTDSRYAFATAHIHGEIYRRRGWLTSEGREIKNKSEILALLKALFLPKRLSIIHCLGHQKGDSAEARGNRLADQAAREAAIKTPPDTSTLLAGKRTADGSEFEKRTADGSEFESPKKKAKVE

SEQ ID NO: 2078 - protein, 2091 aa, synthetic construct
MPAAKRVKLDGGDKKYSIGLDIGTNSVGWAVITDEYKVPSKKFKVLGNTDRHSIKKNLIGALLFDSGETAEATRLKRTARRRYTRRKNRICYLQEIFSNEMAKVDDSFFHRLEESFLVEEDKKHERHPIFGNIVDEVAYHEKYPTIYHLRKKLVDSTDKADLRLIYLALAHMIKFRGHFLIEGDLNPDNSDVDKLFIQLVQTYNQLFEENPINASGVDAKAILSARLSKSRRLENLIAQLPGEKKNGLFGNLIALSLGLTPNFKSNFDLAEDAKLQLSKDTYDDDLDNLLAQIGDQYADLFLAAKNLSDAILLSDILRVNTEITKAPLSASMIKRYDEHHQDLTLLKALVRQQLPEKYKEIFFDQSKNGYAGYIDGGASQEEFYKFIKPILEKMDGTEELLVKLNREDLLRKQRTFDNGSIPHQIHLGELHAILRRQEDFYPFLKDNREKIEKILTFRIPYYVGPLARGNSRFAWMTRKSEETITPWNFEEVVDKGASAQSFIERMTNFDKNLPNEKVLPKHSLLYEYFTVYNELTKVKYVTEGMRKPAFLSGEQKKAIVDLLFKTNRKVTVKQLKEDYFKKIECFDSVEISGVEDRFNASLGTYHDLLKIIKDKDFLDNEENEDILEDIVLTLTLFEDREMIEERLKTYAHLFDDKVMKQLKRRRYTGWGRLSRKLINGIRDKQSGKTILDFLKSDGFANRNFMQLIHDDSLTFKEDIQKAQVSGQGDSLHEHIANLAGSPAIKKGILQTVKVVDELVKVMGRHKPENIVIEMARENQTTQKGQKNSRERMKRIEEGIKELGSQILKEHPVENTQLQNEKLYLYYLQNGRDMYVDQELDINRLSDYDVDHIVPQSFLKDDSIDNKVLTRSDKARGKSDNVPSEEVVKKMKNYWRQLLNAKLITQRKFDNLTKAERGGLSELDKAGFIKRQLVETRQITKHVAQILDSRMNTKYDENDKLIREVKVITLKSKLVSDFRKDFQFYKVREINNYHHAHDAYLNAVVGTALIKKYPKLESEFVYGDYKVYDVRKMIAKSEQEIGKATAKYFFYSNIMNFFKTEITLANGEIRKRPLIETNGETGEIVWDKGRDFATVRKVLSMPQVNIVKKTEVQTGGFSKESILPKRNSDKLIARKKDWDPKKYGGFDSPTVAYSVLVVAKVEKGKSKKLKSVKELLGITIMERSSFEKNPIDFLEAKGYKEVKKDLIIKLPKYSLFELENGRKRMLASAGELQKGNELALPSKYVNFLYLASHYEKLKGSPEDNEQKQLFVEQHKHYLDEIIEQISEFSKRVILADANLDKVLSAYNKHRDKPIREQAENIIHLFTLTNLGAPAAFKYFDTTIDRKRYTSTKEVLDATLIHQSITGLYETRIDLSQLGGDGGPAPGGSGGTLGIEDEYRLHETSTEPDVSLGSTWLSDFPQAWAETGGMGLAVRQAPLIIPLKATSTPVSIQQYPMSHEARLGIKPHIQRLLDQGILVPCQSPWNTPLLPVKKPGTNDYRPVQDLREVNKRVEDIHPTVPNPYNLLSGLPPSHQWYTVLDLKDAFFCLRLHPTSQPLFAFEWRDPGMGISGQLTWTRLPQGFKNSPTLFNEALHRDLADFRIQHPDLILLQYVDDILLAATSELDCQQGTRALLQTLGDLGYRASAKKAQICQKQVKYLGYLLREGQRWLTEARKETVMGQPVPKTPRQLREFLGTAGFCRLWIPGFAEMAAPLYPLTKPGTLFSWGPDQQKAYQEIKQALLTAPALGLPDLTKPFELFVDEKQGYAKGVLTQKLGPWRRPVAYLSKKLDPVAAGWPPCLRMVAAIAVLTKDAGKLTMGQPLVILAPHAVEALVKQPPDRWLSNARMTHYQAMLLDTDRVQFGPVVALNPATLLPLPEEGAPHDCLEILAETHGTRPDLTDQPIPDADHTWYTDGSSFLQEGQRKAGAAVTTETEVIWAGALPAGTSAQRAELIALTQALKMAEGKRLNVYTDSRYAFATAHIHGEIYRRRGWLTSEGREIKNKSEILALLKALFLPKRLSIIHCLGHQKGDSAEARGNRLADQAAREAAIKTPPDTSTLLAGKRTADGSEFEKRTADGSEFESPKKKAKVE

SEQ ID NO: 2079 - protein, 2094 aa, synthetic construct
MPAAKRVKLDGGDKKYSIGLDIGTNSVGWAVITDEYKVPSKKFKVLGNTDRHSIKKNLIGALLFDSGETAEATRLKRTARRRYTRRKNRICYLQEIFSNEMAKVDDSFFHRLEESFLVEEDKKHERHPIFGNIVDEVAYHEKYPTIYHLRKKLVDSTDKADLRLIYLALAHMIKFRGHFLIEGDLNPDNSDVDKLFIQLVQTYNQLFEENPINASGVDAKAILSARLSKSRRLENLIAQLPGEKKNGLFGNLIALSLGLTPNFKSNFDLAEDAKLQLSKDTYDDDLDNLLAQIGDQYADLFLAAKNLSDAILLSDILRVNTEITKAPLSASMIKRYDEHHQDLTLLKALVRQQLPEKYKEIFFDQSKNGYAGYIDGGASQEEFYKFIKPILEKMDGTEELLVKLNREDLLRKQRTFDNGSIPHQIHLGELHAILRRQEDFYPFLKDNREKIEKILTFRIPYYVGPLARGNSRFAWMTRKSEETITPWNFEEVVDKGASAQSFIERMTNFDKNLPNEKVLPKHSLLYEYFTVYNELTKVKYVTEGMRKPAFLSGEQKKAIVDLLFKTNRKVTVKQLKEDYFKKIECFDSVEISGVEDRFNASLGTYHDLLKIIKDKDFLDNEENEDILEDIVLTLTLFEDREMIEERLKTYAHLFDDKVMKQLKRRRYTGWGRLSRKLINGIRDKQSGKTILDFLKSDGFANRNFMQLIHDDSLTFKEDIQKAQVSGQGDSLHEHIANLAGSPAIKKGILQTVKVVDELVKVMGRHKPENIVIEMARENQTTQKGQKNSRERMKRIEEGIKELGSQILKEHPVENTQLQNEKLYLYYLQNGRDMYVDQELDINRLSDYDVDHIVPQSFLKDDSIDNKVLTRSDKARGKSDNVPSEEVVKKMKNYWRQLLNAKLITQRKFDNLTKAERGGLSELDKAGFIKRQLVETRQITKHVAQILDSRMNTKYDENDKLIREVKVITLKSKLVSDFRKDFQFYKVREINNYHHAHDAYLNAVVGTALIKKYPKLESEFVYGDYKVYDVRKMIAKSEQEIGKATAKYFFYSNIMNFFKTEITLANGEIRKRPLIETNGETGEIVWDKGRDFATVRKVLSMPQVNIVKKTEVQTGGFSKESILPKRNSDKLIARKKDWDPKKYGGFDSPTVAYSVLVVAKVEKGKSKKLKSVKELLGITIMERSSFEKNPIDFLEAKGYKEVKKDLIIKLPKYSLFELENGRKRMLASAGELQKGNELALPSKYVNFLYLASHYEKLKGSPEDNEQKQLFVEQHKHYLDEIIEQISEFSKRVILADANLDKVLSAYNKHRDKPIREQAENIIHLFTLTNLGAPAAFKYFDTTIDRKRYTSTKEVLDATLIHQSITGLYETRIDLSQLGGDGGPAPGSSGGGGGTLGIEDEYRLHETSTEPDVSLGSTWLSDFPQAWAETGGMGLAVRQAPLIIPLKATSTPVSIQQYPMSHEARLGIKPHIQRLLDQGILVPCQSPWNTPLLPVKKPGTNDYRPVQDLREVNKRVEDIHPTVPNPYNLLSGLPPSHQWYTVLDLKDAFFCLRLHPTSQPLFAFEWRDPGMGISGQLTWTRLPQGFKNSPTLFNEALHRDLADFRIQHPDLILLQYVDDILLAATSELDCQQGTRALLQTLGDLGYRASAKKAQICQKQVKYLGYLLREGQRWLTEARKETVMGQPVPKTPRQLREFLGTAGFCRLWIPGFAEMAAPLYPLTKPGTLFSWGPDQQKAYQEIKQALLTAPALGLPDLTKPFELFVDEKQGYAKGVLTQKLGPWRRPVAYLSKKLDPVAAGWPPCLRMVAAIAVLTKDAGKLTMGQPLVILAPHAVEALVKQPPDRWLSNARMTHYQAMLLDTDRVQFGPVVALNPATLLPLPEEGAPHDCLEILAETHGTRPDLTDQPIPDADHTWYTDGSSFLQEGQRKAGAAVTTETEVIWAGALPAGTSAQRAELIALTQALKMAEGKRLNVYTDSRYAFATAHIHGEIYRRRGWLTSEGREIKNKSEILALLKALFLPKRLSIIHCLGHQKGDSAEARGNRLADQAAREAAIKTPPDTSTLLAGKRTADGSEFEKRTADGSEFESPKKKAKVE

SEQ ID NO: 2080 - protein, 2094 aa, synthetic construct
MPAAKRVKLDGGDKKYSIGLDIGTNSVGWAVITDEYKVPSKKFKVLGNTDRHSIKKNLIGALLFDSGETAEATRLKRTARRRYTRRKNRICYLQEIFSNEMAKVDDSFFHRLEESFLVEEDKKHERHPIFGNIVDEVAYHEKYPTIYHLRKKLVDSTDKADLRLIYLALAHMIKFRGHFLIEGDLNPDNSDVDKLFIQLVQTYNQLFEENPINASGVDAKAILSARLSKSRRLENLIAQLPGEKKNGLFGNLIALSLGLTPNFKSNFDLAEDAKLQLSKDTYDDDLDNLLAQIGDQYADLFLAAKNLSDAILLSDILRVNTEITKAPLSASMIKRYDEHHQDLTLLKALVRQQLPEKYKEIFFDQSKNGYAGYIDGGASQEEFYKFIKPILEKMDGTEELLVKLNREDLLRKQRTFDNGSIPHQIHLGELHAILRRQEDFYPFLKDNREKIEKILTFRIPYYVGPLARGNSRFAWMTRKSEETITPWNFEEVVDKGASAQSFIERMTNFDKNLPNEKVLPKHSLLYEYFTVYNELTKVKYVTEGMRKPAFLSGEQKKAIVDLLFKTNRKVTVKQLKEDYFKKIECFDSVEISGVEDRFNASLGTYHDLLKIIKDKDFLDNEENEDILEDIVLTLTLFEDREMIEERLKTYAHLFDDKVMKQLKRRRYTGWGRLSRKLINGIRDKQSGKTILDFLKSDGFANRNFMQLIHDDSLTFKEDIQKAQVSGQGDSLHEHIANLAGSPAIKKGILQTVKVVDELVKVMGRHKPENIVIEMARENQTTQKGQKNSRERMKRIEEGIKELGSQILKEHPVENTQLQNEKLYLYYLQNGRDMYVDQELDINRLSDYDVDHIVPQSFLKDDSIDNKVLTRSDKARGKSDNVPSEEVVKKMKNYWRQLLNAKLITQRKFDNLTKAERGGLSELDKAGFIKRQLVETRQITKHVAQILDSRMNTKYDENDKLIREVKVITLKSKLVSDFRKDFQFYKVREINNYHHAHDAYLNAVVGTALIKKYPKLESEFVYGDYKVYDVRKMIAKSEQEIGKATAKYFFYSNIMNFFKTEITLANGEIRKRPLIETNGETGEIVWDKGRDFATVRKVLSMPQVNIVKKTEVQTGGFSKESILPKRNSDKLIARKKDWDPKKYGGFDSPTVAYSVLVVAKVEKGKSKKLKSVKELLGITIMERSSFEKNPIDFLEAKGYKEVKKDLIIKLPKYSLFELENGRKRMLASAGELQKGNELALPSKYVNFLYLASHYEKLKGSPEDNEQKQLFVEQHKHYLDEIIEQISEFSKRVILADANLDKVLSAYNKHRDKPIREQAENIIHLFTLTNLGAPAAFKYFDTTIDRKRYTSTKEVLDATLIHQSITGLYETRIDLSQLGGDGGGSSPAPGGSGGTLGIEDEYRLHETSTEPDVSLGSTWLSDFPQAWAETGGMGLAVRQAPLIIPLKATSTPVSIQQYPMSHEARLGIKPHIQRLLDQGILVPCQSPWNTPLLPVKKPGTNDYRPVQDLREVNKRVEDIHPTVPNPYNLLSGLPPSHQWYTVLDLKDAFFCLRLHPTSQPLFAFEWRDPGMGISGQLTWTRLPQGFKNSPTLFNEALHRDLADFRIQHPDLILLQYVDDILLAATSELDCQQGTRALLQTLGDLGYRASAKKAQICQKQVKYLGYLLREGQRWLTEARKETVMGQPVPKTPRQLREFLGTAGFCRLWIPGFAEMAAPLYPLTKPGTLFSWGPDQQKAYQEIKQALLTAPALGLPDLTKPFELFVDEKQGYAKGVLTQKLGPWRRPVAYLSKKLDPVAAGWPPCLRMVAAIAVLTKDAGKLTMGQPLVILAPHAVEALVKQPPDRWLSNARMTHYQAMLLDTDRVQFGPVVALNPATLLPLPEEGAPHDCLEILAETHGTRPDLTDQPIPDADHTWYTDGSSFLQEGQRKAGAAVTTETEVIWAGALPAGTSAQRAELIALTQALKMAEGKRLNVYTDSRYAFATAHIHGEIYRRRGWLTSEGREIKNKSEILALLKALFLPKRLSIIHCLGHQKGDSAEARGNRLADQAAREAAIKTPPDTSTLLAGKRTADGSEFEKRTADGSEFESPKKKAKVE

SEQ ID NO: 2081 - protein, 2093 aa, synthetic construct
MPAAKRVKLDGGDKKYSIGLDIGTNSVGWAVITDEYKVPSKKFKVLGNTDRHSIKKNLIGALLFDSGETAEATRLKRTARRRYTRRKNRICYLQEIFSNEMAKVDDSFFHRLEESFLVEEDKKHERHPIFGNIVDEVAYHEKYPTIYHLRKKLVDSTDKADLRLIYLALAHMIKFRGHFLIEGDLNPDNSDVDKLFIQLVQTYNQLFEENPINASGVDAKAILSARLSKSRRLENLIAQLPGEKKNGLFGNLIALSLGLTPNFKSNFDLAEDAKLQLSKDTYDDDLDNLLAQIGDQYADLFLAAKNLSDAILLSDILRVNTEITKAPLSASMIKRYDEHHQDLTLLKALVRQQLPEKYKEIFFDQSKNGYAGYIDGGASQEEFYKFIKPILEKMDGTEELLVKLNREDLLRKQRTFDNGSIPHQIHLGELHAILRRQEDFYPFLKDNREKIEKILTFRIPYYVGPLARGNSRFAWMTRKSEETITPWNFEEVVDKGASAQSFIERMTNFDKNLPNEKVLPKHSLLYEYFTVYNELTKVKYVTEGMRKPAFLSGEQKKAIVDLLFKTNRKVTVKQLKEDYFKKIECFDSVEISGVEDRFNASLGTYHDLLKIIKDKDFLDNEENEDILEDIVLTLTLFEDREMIEERLKTYAHLFDDKVMKQLKRRRYTGWGRLSRKLINGIRDKQSGKTILDFLKSDGFANRNFMQLIHDDSLTFKEDIQKAQVSGQGDSLHEHIANLAGSPAIKKGILQTVKVVDELVKVMGRHKPENIVIEMARENQTTQKGQKNSRERMKRIEEGIKELGSQILKEHPVENTQLQNEKLYLYYLQNGRDMYVDQELDINRLSDYDVDHIVPQSFLKDDSIDNKVLTRSDKARGKSDNVPSEEVVKKMKNYWRQLLNAKLITQRKFDNLTKAERGGLSELDKAGFIKRQLVETRQITKHVAQILDSRMNTKYDENDKLIREVKVITLKSKLVSDFRKDFQFYKVREINNYHHAHDAYLNAVVGTALIKKYPKLESEFVYGDYKVYDVRKMIAKSEQEIGKATAKYFFYSNIMNFFKTEITLANGEIRKRPLIETNGETGEIVWDKGRDFATVRKVLSMPQVNIVKKTEVQTGGFSKESILPKRNSDKLIARKKDWDPKKYGGFDSPTVAYSVLVVAKVEKGKSKKLKSVKELLGITIMERSSFEKNPIDFLEAKGYKEVKKDLIIKLPKYSLFELENGRKRMLASAGELQKGNELALPSKYVNFLYLASHYEKLKGSPEDNEQKQLFVEQHKHYLDEIIEQISEFSKRVILADANLDKVLSAYNKHRDKPIREQAENIIHLFTLTNLGAPAAFKYFDTTIDRKRYTSTKEVLDATLIHQSITGLYETRIDLSQLGGDGGEAAAKGGGGGTLGIEDEYRLHETSTEPDVSLGSTWLSDFPQAWAETGGMGLAVRQAPLIIPLKATSTPVSIQQYPMSHEARLGIKPHIQRLLDQGILVPCQSPWNTPLLPVKKPGTNDYRPVQDLREVNKRVEDIHPTVPNPYNLLSGLPPSHQWYTVLDLKDAFFCLRLHPTSQPLFAFEWRDPGMGISGQLTWTRLPQGFKNSPTLFNEALHRDLADFRIQHPDLILLQYVDDILLAATSELDCQQGTRALLQTLGDLGYRASAKKAQICQKQVKYLGYLLREGQRWLTEARKETVMGQPVPKTPRQLREFLGTAGFCRLWIPGFAEMAAPLYPLTKPGTLFSWGPDQQKAYQEIKQALLTAPALGLPDLTKPFELFVDEKQGYAKGVLTQKLGPWRRPVAYLSKKLDPVAAGWPPCLRMVAAIAVLTKDAGKLTMGQPLVILAPHAVEALVKQPPDRWLSNARMTHYQAMLLDTDRVQFGPVVALNPATLLPLPEEGAPHDCLEILAETHGTRPDLTDQPIPDADHTWYTDGSSFLQEGQRKAGAAVTTETEVIWAGALPAGTSAQRAELIALTQALKMAEGKRLNVYTDSRYAFATAHIHGEIYRRRGWLTSEGREIKNKSEILALLKALFLPKRLSIIHCLGHQKGDSAEARGNRLADQAAREAAIKTPPDTSTLLAGKRTADGSEFEKRTADGSEFESPKKKAKVE

SEQ ID NO: 2082 - protein, 2096 aa, synthetic construct
MPAAKRVKLDGGDKKYSIGLDIGTNSVGWAVITDEYKVPSKKFKVLGNTDRHSIKKNLIGALLFDSGETAEATRLKRTARRRYTRRKNRICYLQEIFSNEMAKVDDSFFHRLEESFLVEEDKKHERHPIFGNIVDEVAYHEKYPTIYHLRKKLVDSTDKADLRLIYLALAHMIKFRGHFLIEGDLNPDNSDVDKLFIQLVQTYNQLFEENPINASGVDAKAILSARLSKSRRLENLIAQLPGEKKNGLFGNLIALSLGLTPNFKSNFDLAEDAKLQLSKDTYDDDLDNLLAQIGDQYADLFLAAKNLSDAILLSDILRVNTEITKAPLSASMIKRYDEHHQDLTLLKALVRQQLPEKYKEIFFDQSKNGYAGYIDGGASQEEFYKFIKPILEKMDGTEELLVKLNREDLLRKQRTFDNGSIPHQIHLGELHAILRRQEDFYPFLKDNREKIEKILTFRIPYYVGPLARGNSRFAWMTRKSEETITPWNFEEVVDKGASAQSFIERMTNFDKNLPNEKVLPKHSLLYEYFTVYNELTKVKYVTEGMRKPAFLSGEQKKAIVDLLFKTNRKVTVKQLKEDYFKKIECFDSVEISGVEDRFNASLGTYHDLLKIIKDKDFLDNEENEDILEDIVLTLTLFEDREMIEERLKTYAHLFDDKVMKQLKRRRYTGWGRLSRKLINGIRDKQSGKTILDFLKSDGFANRNFMQLIHDDSLTFKEDIQKAQVSGQGDSLHEHIANLAGSPAIKKGILQTVKVVDELVKVMGRHKPENIVIEMARENQTTQKGQKNSRERMKRIEEGIKELGSQILKEHPVENTQLQNEKLYLYYLQNGRDMYVDQELDINRLSDYDVDHIVPQSFLKDDSIDNKVLTRSDKARGKSDNVPSEEVVKKMKNYWRQLLNAKLITQRKFDNLTKAERGGLSELDKAGFIKRQLVETRQITKHVAQILDSRMNTKYDENDKLIREVKVITLKSKLVSDFRKDFQFYKVREINNYHHAHDAYLNAVVGTALIKKYPKLESEFVYGDYKVYDVRKMIAKSEQEIGKATAKYFFYSNIMNFFKTEITLANGEIRKRPLIETNGETGEIVWDKGRDFATVRKVLSMPQVNIVKKTEVQTGGFSKESILPKRNSDKLIARKKDWDPKKYGGFDSPTVAYSVLVVAKVEKGKSKKLKSVKELLGITIMERSSFEKNPIDFLEAKGYKEVKKDLIIKLPKYSLFELENGRKRMLASAGELQKGNELALPSKYVNFLYLASHYEKLKGSPEDNEQKQLFVEQHKHYLDEIIEQISEFSKRVILADANLDKVLSAYNKHRDKPIREQAENIIHLFTLTNLGAPAAFKYFDTTIDRKRYTSTKEVLDATLIHQSITGLYETRIDLSQLGGDGGGGGGGSEAAAKGGTLGIEDEYRLHETSTEPDVSLGSTWLSDFPQAWAETGGMGLAVRQAPLIIPLKATSTPVSIQQYPMSHEARLGIKPHIQRLLDQGILVPCQSPWNTPLLPVKKPGTNDYRPVQDLREVNKRVEDIHPTVPNPYNLLSGLPPSHQWYTVLDLKDAFFCLRLHPTSQPLFAFEWRDPGMGISGQLTWTRLPQGFKNSPTLFNEALHRDLADFRIQHPDLILLQYVDDILLAATSELDCQQGTRALLQTLGDLGYRASAKKAQICQKQVKYLGYLLREGQRWLTEARKETVMGQPVPKTPRQLREFLGTAGFCRLWIPGFAEMAAPLYPLTKPGTLFSWGPDQQKAYQEIKQALLTAPALGLPDLTKPFELFVDEKQGYAKGVLTQKLGPWRRPVAYLSKKLDPVAAGWPPCLRMVAAIAVLTKDAGKLTMGQPLVILAPHAVEALVKQPPDRWLSNARMTHYQAMLLDTDRVQFGPVVALNPATLLPLPEEGAPHDCLEILAETHGTRPDLTDQPIPDADHTWYTDGSSFLQEGQRKAGAAVTTETEVIWAGALPAGTSAQRAELIALTQALKMAEGKRLNVYTDSRYAFATAHIHGEIYRRRGWLTSEGREIKNKSEILALLKALFLPKRLSIIHCLGHQKGDSAEARGNRLADQAAREAAIKTPPDTSTLLAGKRTADGSEFEKRTADGSEFESPKKKAKVE

SEQ ID NO: 2083 - protein, 2091 aa, synthetic construct
MPAAKRVKLDGGDKKYSIGLDIGTNSVGWAVITDEYKVPSKKFKVLGNTDRHSIKKNLIGALLFDSGETAEATRLKRTARRRYTRRKNRICYLQEIFSNEMAKVDDSFFHRLEESFLVEEDKKHERHPIFGNIVDEVAYHEKYPTIYHLRKKLVDSTDKADLRLIYLALAHMIKFRGHFLIEGDLNPDNSDVDKLFIQLVQTYNQLFEENPINASGVDAKAILSARLSKSRRLENLIAQLPGEKKNGLFGNLIALSLGLTPNFKSNFDLAEDAKLQLSKDTYDDDLDNLLAQIGDQYADLFLAAKNLSDAILLSDILRVNTEITKAPLSASMIKRYDEHHQDLTLLKALVRQQLPEKYKEIFFDQSKNGYAGYIDGGASQEEFYKFIKPILEKMDGTEELLVKLNREDLLRKQRTFDNGSIPHQIHLGELHAILRRQEDFYPFLKDNREKIEKILTFRIPYYVGPLARGNSRFAWMTRKSEETITPWNFEEVVDKGASAQSFIERMTNFDKNLPNEKVLPKHSLLYEYFTVYNELTKVKYVTEGMRKPAFLSGEQKKAIVDLLFKTNRKVTVKQLKEDYFKKIECFDSVEISGVEDRFNASLGTYHDLLKIIKDKDFLDNEENEDILEDIVLTLTLFEDREMIEERLKTYAHLFDDKVMKQLKRRRYTGWGRLSRKLINGIRDKQSGKTILDFLKSDGFANRNFMQLIHDDSLTFKEDIQKAQVSGQGDSLHEHIANLAGSPAIKKGILQTVKVVDELVKVMGRHKPENIVIEMARENQTTQKGQKNSRERMKRIEEGIKELGSQILKEHPVENTQLQNEKLYLYYLQNGRDMYVDQELDINRLSDYDVDHIVPQSFLKDDSIDNKVLTRSDKARGKSDNVPSEEVVKKMKNYWRQLLNAKLITQRKFDNLTKAERGGLSELDKAGFIKRQLVETRQITKHVAQILDSRMNTKYDENDKLIREVKVITLKSKLVSDFRKDFQFYKVREINNYHHAHDAYLNAVVGTALIKKYPKLESEFVYGDYKVYDVRKMIAKSEQEIGKATAKYFFYSNIMNFFKTEITLANGEIRKRPLIETNGETGEIVWDKGRDFATVRKVLSMPQVNIVKKTEVQTGGFSKESILPKRNSDKLIARKKDWDPKKYGGFDSPTVAYSVLVVAKVEKGKSKKLKSVKELLGITIMERSSFEKNPIDFLEAKGYKEVKKDLIIKLPKYSLFELENGRKRMLASAGELQKGNELALPSKYVNFLYLASHYEKLKGSPEDNEQKQLFVEQHKHYLDEIIEQISEFSKRVILADANLDKVLSAYNKHRDKPIREQAENIIHLFTLTNLGAPAAFKYFDTTIDRKRYTSTKEVLDATLIHQSITGLYETRIDLSQLGGDGGGGSPAPGGTLGIEDEYRLHETSTEPDVSLGSTWLSDFPQAWAETGGMGLAVRQAPLIIPLKATSTPVSIQQYPMSHEARLGIKPHIQRLLDQGILVPCQSPWNTPLLPVKKPGTNDYRPVQDLREVNKRVEDIHPTVPNPYNLLSGLPPSHQWYTVLDLKDAFFCLRLHPTSQPLFAFEWRDPGMGISGQLTWTRLPQGFKNSPTLFNEALHRDLADFRIQHPDLILLQYVDDILLAATSELDCQQGTRALLQTLGDLGYRASAKKAQICQKQVKYLGYLLREGQRWLTEARKETVMGQPVPKTPRQLREFLGTAGFCRLWIPGFAEMAAPLYPLTKPGTLFSWGPDQQKAYQEIKQALLTAPALGLPDLTKPFELFVDEKQGYAKGVLTQKLGPWRRPVAYLSKKLDPVAAGWPPCLRMVAAIAVLTKDAGKLTMGQPLVILAPHAVEALVKQPPDRWLSNARMTHYQAMLLDTDRVQFGPVVALNPATLLPLPEEGAPHDCLEILAETHGTRPDLTDQPIPDADHTWYTDGSSFLQEGQRKAGAAVTTETEVIWAGALPAGTSAQRAELIALTQALKMAEGKRLNVYTDSRYAFATAHIHGEIYRRRGWLTSEGREIKNKSEILALLKALFLPKRLSIIHCLGHQKGDSAEARGNRLADQAAREAAIKTPPDTSTLLAGKRTADGSEFEKRTADGSEFESPKKKAKVE

SEQ ID NO: 2084 - protein, 2110 aa, synthetic construct
MPAAKRVKLDGGDKKYSIGLDIGTNSVGWAVITDEYKVPSKKFKVLGNTDRHSIKKNLIGALLFDSGETAEATRLKRTARRRYTRRKNRICYLQEIFSNEMAKVDDSFFHRLEESFLVEEDKKHERHPIFGNIVDEVAYHEKYPTIYHLRKKLVDSTDKADLRLIYLALAHMIKFRGHFLIEGDLNPDNSDVDKLFIQLVQTYNQLFEENPINASGVDAKAILSARLSKSRRLENLIAQLPGEKKNGLFGNLIALSLGLTPNFKSNFDLAEDAKLQLSKDTYDDDLDNLLAQIGDQYADLFLAAKNLSDAILLSDILRVNTEITKAPLSASMIKRYDEHHQDLTLLKALVRQQLPEKYKEIFFDQSKNGYAGYIDGGASQEEFYKFIKPILEKMDGTEELLVKLNREDLLRKQRTFDNGSIPHQIHLGELHAILRRQEDFYPFLKDNREKIEKILTFRIPYYVGPLARGNSRFAWMTRKSEETITPWNFEEVVDKGASAQSFIERMTNFDKNLPNEKVLPKHSLLYEYFTVYNELTKVKYVTEGMRKPAFLSGEQKKAIVDLLFKTNRKVTVKQLKEDYFKKIECFDSVEISGVEDRFNASLGTYHDLLKIIKDKDFLDNEENEDILEDIVLTLTLFEDREMIEERLKTYAHLFDDKVMKQLKRRRYTGWGRLSRKLINGIRDKQSGKTILDFLKSDGFANRNFMQLIHDDSLTFKEDIQKAQVSGQGDSLHEHIANLAGSPAIKKGILQTVKVVDELVKVMGRHKPENIVIEMARENQTTQKGQKNSRERMKRIEEGIKELGSQILKEHPVENTQLQNEKLYLYYLQNGRDMYVDQELDINRLSDYDVDHIVPQSFLKDDSIDNKVLTRSDKARGKSDNVPSEEVVKKMKNYWRQLLNAKLITQRKFDNLTKAERGGLSELDKAGFIKRQLVETRQITKHVAQILDSRMNTKYDENDKLIREVKVITLKSKLVSDFRKDFQFYKVREINNYHHAHDAYLNAVVGTALIKKYPKLESEFVYGDYKVYDVRKMIAKSEQEIGKATAKYFFYSNIMNFFKTEITLANGEIRKRPLIETNGETGEIVWDKGRDFATVRKVLSMPQVNIVKKTEVQTGGFSKESILPKRNSDKLIARKKDWDPKKYGGFDSPTVAYSVLVVAKVEKGKSKKLKSVKELLGITIMERSSFEKNPIDFLEAKGYKEVKKDLIIKLPKYSLFELENGRKRMLASAGELQKGNELALPSKYVNFLYLASHYEKLKGSPEDNEQKQLFVEQHKHYLDEIIEQISEFSKRVILADANLDKVLSAYNKHRDKPIREQAENIIHLFTLTNLGAPAAFKYFDTTIDRKRYTSTKEVLDATLIHQSITGLYETRIDLSQLGGDGGGGGGSGGGGSGGGGSGGGGSGGGGSGGLGIEDEYRLHETSTEPDVSLGSTWLSDFPQAWAETGGMGLAVRQAPLIIPLKATSTPVSIQQYPMSHEARLGIKPHIQRLLDQGILVPCQSPWNTPLLPVKKPGTNDYRPVQDLREVNKRVEDIHPTVPNPYNLLSGLPPSHQWYTVLDLKDAFFCLRLHPTSQPLFAFEWRDPGMGISGQLTWTRLPQGFKNSPTLFNEALHRDLADFRIQHPDLILLQYVDDILLAATSELDCQQGTRALLQTLGDLGYRASAKKAQICQKQVKYLGYLLREGQRWLTEARKETVMGQPVPKTPRQLREFLGKAGFCRLFIPGFAEMAAPLYPLTKPGTLFSWGPDQQKAYQEIKQALLTAPALGLPDLTKPFELFVDEKQGYAKGVLTQKLGPWRRPVAYLSKKLDPVAAGWPPCLRMVAAIAVLTKDAGKLTMGQPLVILAPHAVEALVKQPPDRWLSNARMTHYQAMLLDTDRVQFGPVVALNPATLLPLPEEGAPHDCLEILAETHGTRPDLTDQPIPDADHTWYTDGSSFLQEGQRKAGAAVTTETEVIWAGALPAGTSAQRAELIALTQALKMAEGKRLNVYTDSRYAFATAHIHGEIYRRRGWLTSEGREIKNKSEILALLKALFLPKRLSIIHCLGHQKGDSAEARGNRLADQAAREAAIKTPPDTSTLLIAGKRTADGSEFEKRTADGSEFESPKKKAKVE

SEQ ID NO: 2085 - protein, 2105 aa, synthetic construct
MPAAKRVKLDGGDKKYSIGLDIGTNSVGWAVITDEYKVPSKKFKVLGNTDRHSIKKNLIGALLFDSGETAEATRLKRTARRRYTRRKNRICYLQEIFSNEMAKVDDSFFHRLEESFLVEEDKKHERHPIFGNIVDEVAYHEKYPTIYHLRKKLVDSTDKADLRLIYLALAHMIKFRGHFLIEGDLNPDNSDVDKLFIQLVQTYNQLFEENPINASGVDAKAILSARLSKSRRLENLIAQLPGEKKNGLFGNLIALSLGLTPNFKSNFDLAEDAKLQLSKDTYDDDLDNLLAQIGDQYADLFLAAKNLSDAILLSDILRVNTEITKAPLSASMIKRYDEHHQDLTLLKALVRQQLPEKYKEIFFDQSKNGYAGYIDGGASQEEFYKFIKPILEKMDGTEELLVKLNREDLLRKQRTFDNGSIPHQIHLGELHAILRRQEDFYPFLKDNREKIEKILTFRIPYYVGPLARGNSRFAWMTRKSEETITPWNFEEVVDKGASAQSFIERMTNFDKNLPNEKVLPKHSLLYEYFTVYNELTKVKYVTEGMRKPAFLSGEQKKAIVDLLFKTNRKVTVKQLKEDYFKKIECFDSVEISGVEDRFNASLGTYHDLLKIIKDKDFLDNEENEDILEDIVLTLTLFEDREMIEERLKTYAHLFDDKVMKQLKRRRYTGWGRLSRKLINGIRDKQSGKTILDFLKSDGFANRNFMQLIHDDSLTFKEDIQKAQVSGQGDSLHEHIANLAGSPAIKKGILQTVKVVDELVKVMGRHKPENIVIEMARENQTTQKGQKNSRERMKRIEEGIKELGSQILKEHPVENTQLQNEKLYLYYLQNGRDMYVDQELDINRLSDYDVDHIVPQSFLKDDSIDNKVLTRSDKARGKSDNVPSEEVVKKMKNYWRQLLNAKLITQRKFDNLTKAERGGLSELDKAGFIKRQLVETRQITKHVAQILDSRMNTKYDENDKLIREVKVITLKSKLVSDFRKDFQFYKVREINNYHHAHDAYLNAVVGTALIKKYPKLESEFVYGDYKVYDVRKMIAKSEQEIGKATAKYFFYSNIMNFFKTEITLANGEIRKRPLIETNGETGEIVWDKGRDFATVRKVLSMPQVNIVKKTEVQTGGFSKESILPKRNSDKLIARKKDWDPKKYGGFDSPTVAYSVLVVAKVEKGKSKKLKSVKELLGITIMERSSFEKNPIDFLEAKGYKEVKKDLIIKLPKYSLFELENGRKRMLASAGELQKGNELALPSKYVNFLYLASHYEKLKGSPEDNEQKQLFVEQHKHYLDEIIEQISEFSKRVILADANLDKVLSAYNKHRDKPIREQAENIIHLFTLTNLGAPAAFKYFDTTIDRKRYTSTKEVLDATLIHQSITGLYETRIDLSQLGGDGGGGGGSGGGGSGGGGSGGGGSGGLGIEDEYRLHETSTEPDVSLGSTWLSDFPQAWAETGGMGLAVRQAPLIIPLKATSTPVSIQQYPMSHEARLGIKPHIQRLLDQGILVPCQSPWNTPLLPVKKPGTNDYRPVQDLREVNKRVEDIHPTVPNPYNLLSGLPPSHQWYTVLDLKDAFFCLRLHPTSQPLFAFEWRDPGMGISGQLTWTRLPQGFKNSPTLFNEALHRDLADFRIQHPDLILLQYVDDILLAATSELDCQQGTRALLQTLGDLGYRASAKKAQICQKQVKYLGYLLREGQRWLTEARKETVMGQPVPKTPRQLREFLGKAGFCRLFIPGFAEMAAPLYPLTKPGTLFSWGPDQQKAYQEIKQALLTAPALGLPDLTKPFELFVDEKQGYAKGVLTQKLGPWRRPVAYLSKKLDPVAAGWPPCLRMVAAIAVLTKDAGKLTMGQPLVILAPHAVEALVKQPPDRWLSNARMTHYQAMLLDTDRVQFGPVVALNPATLLPLPEEGAPHDCLEILAETHGTRPDLTDQPIPDADHTWYTDGSSFLQEGQRKAGAAVTTETEVIWAGALPAGTSAQRAELIALTQALKMAEGKRLNVYTDSRYAFATAHIHGEIYRRRGWLTSEGREIKNKSEILALLKALFLPKRLSIIHCLGHQKGDSAEARGNRLADQAAREAAIKTPPDTSTLLIAGKRTADGSEFEKRTADGSEFESPKKKAKVE

SEQ ID NO: 2086 - protein, 2110 aa, synthetic construct
MPAAKRVKLDGGDKKYSIGLDIGTNSVGWAVITDEYKVPSKKFKVLGNTDRHSIKKNLIGALLFDSGETAEATRLKRTARRRYTRRKNRICYLQEIFSNEMAKVDDSFFHRLEESFLVEEDKKHERHPIFGNIVDEVAYHEKYPTIYHLRKKLVDSTDKADLRLIYLALAHMIKFRGHFLIEGDLNPDNSDVDKLFIQLVQTYNQLFEENPINASGVDAKAILSARLSKSRRLENLIAQLPGEKKNGLFGNLIALSLGLTPNFKSNFDLAEDAKLQLSKDTYDDDLDNLLAQIGDQYADLFLAAKNLSDAILLSDILRVNTEITKAPLSASMIKRYDEHHQDLTLLKALVRQQLPEKYKEIFFDQSKNGYAGYIDGGASQEEFYKFIKPILEKMDGTEELLVKLNREDLLRKQRTFDNGSIPHQIHLGELHAILRRQEDFYPFLKDNREKIEKILTFRIPYYVGPLARGNSRFAWMTRKSEETITPWNFEEVVDKGASAQSFIERMTNFDKNLPNEKVLPKHSLLYEYFTVYNELTKVKYVTEGMRKPAFLSGEQKKAIVDLLFKTNRKVTVKQLKEDYFKKIECFDSVEISGVEDRFNASLGTYHDLLKIIKDKDFLDNEENEDILEDIVLTLTLFEDREMIEERLKTYAHLFDDKVMKQLKRRRYTGWGRLSRKLINGIRDKQSGKTILDFLKSDGFANRNFMQLIHDDSLTFKEDIQKAQVSGQGDSLHEHIANLAGSPAIKKGILQTVKVVDELVKVMGRHKPENIVIEMARENQTTQKGQKNSRERMKRIEEGIKELGSQILKEHPVENTQLQNEKLYLYYLQNGRDMYVDQELDINRLSDYDVDHIVPQSFLKDDSIDNKVLTRSDKARGKSDNVPSEEVVKKMKNYWRQLLNAKLITQRKFDNLTKAERGGLSELDKAGFIKRQLVETRQITKHVAQILDSRMNTKYDENDKLIREVKVITLKSKLVSDFRKDFQFYKVREINNYHHAHDAYLNAVVGTALIKKYPKLESEFVYGDYKVYDVRKMIAKSEQEIGKATAKYFFYSNIMNFFKTEITLANGEIRKRPLIETNGETGEIVWDKGRDFATVRKVLSMPQVNIVKKTEVQTGGFSKESILPKRNSDKLIARKKDWDPKKYGGFDSPTVAYSVLVVAKVEKGKSKKLKSVKELLGITIMERSSFEKNPIDFLEAKGYKEVKKDLIIKLPKYSLFELENGRKRMLASAGELQKGNELALPSKYVNFLYLASHYEKLKGSPEDNEQKQLFVEQHKHYLDEIIEQISEFSKRVILADANLDKVLSAYNKHRDKPIREQAENIIHLFTLTNLGAPAAFKYFDTTIDRKRYTSTKEVLDATLIHQSITGLYETRIDLSQLGGDGGEAAAKEAAAKEAAAKEAAAKEAAAKGGLGIEDEYRLHETSTEPDVSLGSTWLSDFPQAWAETGGMGLAVRQAPLIIPLKATSTPVSIQQYPMSHEARLGIKPHIQRLLDQGILVPCQSPWNTPLLPVKKPGTNDYRPVQDLREVNKRVEDIHPTVPNPYNLLSGLPPSHQWYTVLDLKDAFFCLRLHPTSQPLFAFEWRDPGMGISGQLTWTRLPQGFKNSPTLFNEALHRDLADFRIQHPDLILLQYVDDILLAATSELDCQQGTRALLQTLGDLGYRASAKKAQICQKQVKYLGYLLREGQRWLTEARKETVMGQPVPKTPRQLREFLGKAGFCRLFIPGFAEMAAPLYPLTKPGTLFSWGPDQQKAYQEIKQALLTAPALGLPDLTKPFELFVDEKQGYAKGVLTQKLGPWRRPVAYLSKKLDPVAAGWPPCLRMVAAIAVLTKDAGKLTMGQPLVILAPHAVEALVKQPPDRWLSNARMTHYQAMLLDTDRVQFGPVVALNPATLLPLPEEGAPHDCLEILAETHGTRPDLTDQPIPDADHTWYTDGSSFLQEGQRKAGAAVTTETEVIWAGALPAGTSAQRAELIALTQALKMAEGKRLNVYTDSRYAFATAHIHGEIYRRRGWLTSEGREIKNKSEILALLKALFLPKRLSIIHCLGHQKGDSAEARGNRLADQAAREAAIKTPPDTSTLLIAGKRTADGSEFEKRTADGSEFESPKKKAKVE

SEQ ID NO: 2087 - protein, 2098 aa, synthetic construct
MPAAKRVKLDGGDKKYSIGLDIGTNSVGWAVITDEYKVPSKKFKVLGNTDRHSIKKNLIGALLFDSGETAEATRLKRTARRRYTRRKNRICYLQEIFSNEMAKVDDSFFHRLEESFLVEEDKKHERHPIFGNIVDEVAYHEKYPTIYHLRKKLVDSTDKADLRLIYLALAHMIKFRGHFLIEGDLNPDNSDVDKLFIQLVQTYNQLFEENPINASGVDAKAILSARLSKSRRLENLIAQLPGEKKNGLFGNLIALSLGLTPNFKSNFDLAEDAKLQLSKDTYDDDLDNLLAQIGDQYADLFLAAKNLSDAILLSDILRVNTEITKAPLSASMIKRYDEHHQDLTLLKALVRQQLPEKYKEIFFDQSKNGYAGYIDGGASQEEFYKFIKPILEKMDGTEELLVKLNREDLLRKQRTFDNGSIPHQIHLGELHAILRRQEDFYPFLKDNREKIEKILTFRIPYYVGPLARGNSRFAWMTRKSEETITPWNFEEVVDKGASAQSFIERMTNFDKNLPNEKVLPKHSLLYEYFTVYNELTKVKYVTEGMRKPAFLSGEQKKAIVDLLFKTNRKVTVKQLKEDYFKKIECFDSVEISGVEDRFNASLGTYHDLLKIIKDKDFLDNEENEDILEDIVLTLTLFEDREMIEERLKTYAHLFDDKVMKQLKRRRYTGWGRLSRKLINGIRDKQSGKTILDFLKSDGFANRNFMQLIHDDSLTFKEDIQKAQVSGQGDSLHEHIANLAGSPAIKKGILQTVKVVDELVKVMGRHKPENIVIEMARENQTTQKGQKNSRERMKRIEEGIKELGSQILKEHPVENTQLQNEKLYLYYLQNGRDMYVDQELDINRLSDYDVDHIVPQSFLKDDSIDNKVLTRSDKARGKSDNVPSEEVVKKMKNYWRQLLNAKLITQRKFDNLTKAERGGLSELDKAGFIKRQLVETRQITKHVAQILDSRMNTKYDENDKLIREVKVITLKSKLVSDFRKDFQFYKVREINNYHHAHDAYLNAVVGTALIKKYPKLESEFVYGDYKVYDVRKMIAKSEQEIGKATAKYFFYSNIMNFFKTEITLANGEIRKRPLIETNGETGEIVWDKGRDFATVRKVLSMPQVNIVKKTEVQTGGFSKESILPKRNSDKLIARKKDWDPKKYGGFDSPTVAYSVLVVAKVEKGKSKKLKSVKELLGITIMERSSFEKNPIDFLEAKGYKEVKKDLIIKLPKYSLFELENGRKRMLASAGELQKGNELALPSKYVNFLYLASHYEKLKGSPEDNEQKQLFVEQHKHYLDEIIEQISEFSKRVILADANLDKVLSAYNKHRDKPIREQAENIIHLFTLTNLGAPAAFKYFDTTIDRKRYTSTKEVLDATLIHQSITGLYETRIDLSQLGGDGGPAPAPAPAPAPAPGGLGIEDEYRLHETSTEPDVSLGSTWLSDFPQAWAETGGMGLAVRQAPLIIPLKATSTPVSIQQYPMSHEARLGIKPHIQRLLDQGILVPCQSPWNTPLLPVKKPGTNDYRPVQDLREVNKRVEDIHPTVPNPYNLLSGLPPSHQWYTVLDLKDAFFCLRLHPTSQPLFAFEWRDPGMGISGQLTWTRLPQGFKNSPTLFNEALHRDLADFRIQHPDLILLQYVDDILLAATSELDCQQGTRALLQTLGDLGYRASAKKAQICQKQVKYLGYLLREGQRWLTEARKETVMGQPVPKTPRQLREFLGKAGFCRLFIPGFAEMAAPLYPLTKPGTLFSWGPDQQKAYQEIKQALLTAPALGLPDLTKPFELFVDEKQGYAKGVLTQKLGPWRRPVAYLSKKLDPVAAGWPPCLRMVAAIAVLTKDAGKLTMGQPLVILAPHAVEALVKQPPDRWLSNARMTHYQAMLLDTDRVQFGPVVALNPATLLPLPEEGAPHDCLEILAETHGTRPDLTDQPIPDADHTWYTDGSSFLQEGQRKAGAAVTTETEVIWAGALPAGTSAQRAELIALTQALKMAEGKRLNVYTDSRYAFATAHIHGEIYRRRGWLTSEGREIKNKSEILALLKALFLPKRLSIIHCLGHQKGDSAEARGNRLADQAAREAAIKTPPDTSTLLIAGKRTADGSEFEKRTADGSEFESPKKKAKVE

SEQ ID NO: 2088 - protein, 2131 aa, synthetic construct
MPAAKRVKLDGGDKKYSIGLDIGTNSVGWAVITDEYKVPSKKFKVLGNTDRHSIKKNLIGALLFDSGETAEATRLKRTARRRYTRRKNRICYLQEIFSNEMAKVDDSFFHRLEESFLVEEDKKHERHPIFGNIVDEVAYHEKYPTIYHLRKKLVDSTDKADLRLIYLALAHMIKFRGHFLIEGDLNPDNSDVDKLFIQLVQTYNQLFEENPINASGVDAKAILSARLSKSRRLENLIAQLPGEKKNGLFGNLIALSLGLTPNFKSNFDLAEDAKLQLSKDTYDDDLDNLLAQIGDQYADLFLAAKNLSDAILLSDILRVNTEITKAPLSASMIKRYDEHHQDLTLLKALVRQQLPEKYKEIFFDQSKNGYAGYIDGGASQEEFYKFIKPILEKMDGTEELLVKLNREDLLRKQRTFDNGSIPHQIHLGELHAILRRQEDFYPFLKDNREKIEKILTFRIPYYVGPLARGNSRFAWMTRKSEETITPWNFEEVVDKGASAQSFIERMTNFDKNLPNEKVLPKHSLLYEYFTVYNELTKVKYVTEGMRKPAFLSGEQKKAIVDLLFKTNRKVTVKQLKEDYFKKIECFDSVEISGVEDRFNASLGTYHDLLKIIKDKDFLDNEENEDILEDIVLTLTLFEDREMIEERLKTYAHLFDDKVMKQLKRRRYTGWGRLSRKLINGIRDKQSGKTILDFLKSDGFANRNFMQLIHDDSLTFKEDIQKAQVSGQGDSLHEHIANLAGSPAIKKGILQTVKVVDELVKVMGRHKPENIVIEMARENQTTQKGQKNSRERMKRIEEGIKELGSQILKEHPVENTQLQNEKLYLYYLQNGRDMYVDQELDINRLSDYDVDHIVPQSFLKDDSIDNKVLTRSDKARGKSDNVPSEEVVKKMKNYWRQLLNAKLITQRKFDNLTKAERGGLSELDKAGFIKRQLVETRQITKHVAQILDSRMNTKYDENDKLIREVKVITLKSKLVSDFRKDFQFYKVREINNYHHAHDAYLNAVVGTALIKKYPKLESEFVYGDYKVYDVRKMIAKSEQEIGKATAKYFFYSNIMNFFKTEITLANGEIRKRPLIETNGETGEIVWDKGRDFATVRKVLSMPQVNIVKKTEVQTGGFSKESILPKRNSDKLIARKKDWDPKKYGGFDSPTVAYSVLVVAKVEKGKSKKLKSVKELLGITIMERSSFEKNPIDFLEAKGYKEVKKDLIIKLPKYSLFELENGRKRMLASAGELQKGNELALPSKYVNFLYLASHYEKLKGSPEDNEQKQLFVEQHKHYLDEIIEQISEFSKRVILADANLDKVLSAYNKHRDKPIREQAENIIHLFTLTNLGAPAAFKYFDTTIDRKRYTSTKEVLDATLIHQSITGLYETRIDLSQLGGDGGAEAAAKEAAAKEAAAKEAAAKALEAEAAAKEAAAKEAAAKEAAAKAGGLGIEDEYRLHETSTEPDVSLGSTWLSDFPQAWAETGGMGLAVRQAPLIIPLKATSTPVSIQQYPMSHEARLGIKPHIQRLLDQGILVPCQSPWNTPLLPVKKPGTNDYRPVQDLREVNKRVEDIHPTVPNPYNLLSGLPPSHQWYTVLDLKDAFFCLRLHPTSQPLFAFEWRDPGMGISGQLTWTRLPQGFKNSPTLFNEALHRDLADFRIQHPDLILLQYVDDILLAATSELDCQQGTRALLQTLGDLGYRASAKKAQICQKQVKYLGYLLREGQRWLTEARKETVMGQPVPKTPRQLREFLGKAGFCRLFIPGFAEMAAPLYPLTKPGTLFSWGPDQQKAYQEIKQALLTAPALGLPDLTKPFELFVDEKQGYAKGVLTQKLGPWRRPVAYLSKKLDPVAAGWPPCLRMVAAIAVLTKDAGKLTMGQPLVILAPHAVEALVKQPPDRWLSNARMTHYQAMLLDTDRVQFGPVVALNPATLLPLPEEGAPHDCLEILAETHGTRPDLTDQPIPDADHTWYTDGSSFLQEGQRKAGAAVTTETEVIWAGALPAGTSAQRAELIALTQALKMAEGKRLNVYTDSRYAFATAHIHGEIYRRRGWLTSEGREIKNKSEILALLKALFLPKRLSIIHCLGHQKGDSAEARGNRLADQAAREAAIKTPPDTSTLLIAGKRTADGSEFEKRTADGSEFESPKKKAKVE

SEQ ID NO: 2089 - protein, 2096 aa, synthetic construct; identical to SEQ ID NO: 2050

SEQ ID NO: 2090 - protein, 2100 aa, synthetic construct; identical to SEQ ID NO: 2049

SEQ ID NO: 2091 - protein, 2094 aa, synthetic construct
MPAAKRVKLDGGDKKYSIGLDIGTNSVGWAVITDEYKVPSKKFKVLGNTDRHSIKKNLIGALLFDSGETAEATRLKRTARRRYTRRKNRICYLQEIFSNEMAKVDDSFFHRLEESFLVEEDKKHERHPIFGNIVDEVAYHEKYPTIYHLRKKLVDSTDKADLRLIYLALAHMIKFRGHFLIEGDLNPDNSDVDKLFIQLVQTYNQLFEENPINASGVDAKAILSARLSKSRRLENLIAQLPGEKKNGLFGNLIALSLGLTPNFKSNFDLAEDAKLQLSKDTYDDDLDNLLAQIGDQYADLFLAAKNLSDAILLSDILRVNTEITKAPLSASMIKRYDEHHQDLTLLKALVRQQLPEKYKEIFFDQSKNGYAGYIDGGASQEEFYKFIKPILEKMDGTEELLVKLNREDLLRKQRTFDNGSIPHQIHLGELHAILRRQEDFYPFLKDNREKIEKILTFRIPYYVGPLARGNSRFAWMTRKSEETITPWNFEEVVDKGASAQSFIERMTNFDKNLPNEKVLPKHSLLYEYFTVYNELTKVKYVTEGMRKPAFLSGEQKKAIVDLLFKTNRKVTVKQLKEDYFKKIECFDSVEISGVEDRFNASLGTYHDLLKIIKDKDFLDNEENEDILEDIVLTLTLFEDREMIEERLKTYAHLFDDKVMKQLKRRRYTGWGRLSRKLINGIRDKQSGKTILDFLKSDGFANRNFMQLIHDDSLTFKEDIQKAQVSGQGDSLHEHIANLAGSPAIKKGILQTVKVVDELVKVMGRHKPENIVIEMARENQTTQKGQKNSRERMKRIEEGIKELGSQILKEHPVENTQLQNEKLYLYYLQNGRDMYVDQELDINRLSDYDVDHIVPQSFLKDDSIDNKVLTRSDKARGKSDNVPSEEVVKKMKNYWRQLLNAKLITQRKFDNLTKAERGGLSELDKAGFIKRQLVETRQITKHVAQILDSRMNTKYDENDKLIREVKVITLKSKLVSDFRKDFQFYKVREINNYHHAHDAYLNAVVGTALIKKYPKLESEFVYGDYKVYDVRKMIAKSEQEIGKATAKYFFYSNIMNFFKTEITLANGEIRKRPLIETNGETGEIVWDKGRDFATVRKVLSMPQVNIVKKTEVQTGGFSKESILPKRNSDKLIARKKDWDPKKYGGFDSPTVAYSVLVVAKVEKGKSKKLKSVKELLGITIMERSSFEKNPIDFLEAKGYKEVKKDLIIKLPKYSLFELENGRKRMLASAGELQKGNELALPSKYVNFLYLASHYEKLKGSPEDNEQKQLFVEQHKHYLDEIIEQISEFSKRVILADANLDKVLSAYNKHRDKPIREQAENIIHLFTLTNLGAPAAFKYFDTTIDRKRYTSTKEVLDATLIHQSITGLYETRIDLSQLGGDGGPAPGSSGGGGGLGIEDEYRLHETSTEPDVSLGSTWLSDFPQAWAETGGMGLAVRQAPLIIPLKATSTPVSIQQYPMSHEARLGIKPHIQRLLDQGILVPCQSPWNTPLLPVKKPGTNDYRPVQDLREVNKRVEDIHPTVPNPYNLLSGLPPSHQWYTVLDLKDAFFCLRLHPTSQPLFAFEWRDPGMGISGQLTWTRLPQGFKNSPTLFNEALHRDLADFRIQHPDLILLQYVDDILLAATSELDCQQGTRALLQTLGDLGYRASAKKAQICQKQVKYLGYLLREGQRWLTEARKETVMGQPVPKTPRQLREFLGKAGFCRLFIPGFAEMAAPLYPLTKPGTLFSWGPDQQKAYQEIKQALLTAPALGLPDLTKPFELFVDEKQGYAKGVLTQKLGPWRRPVAYLSKKLDPVAAGWPPCLRMVAAIAVLTKDAGKLTMGQPLVILAPHAVEALVKQPPDRWLSNARMTHYQAMLLDTDRVQFGPVVALNPATLLPLPEEGAPHDCLEILAETHGTRPDLTDQPIPDADHTWYTDGSSFLQEGQRKAGAAVTTETEVIWAGALPAGTSAQRAELIALTQALKMAEGKRLNVYTDSRYAFATAHIHGEIYRRRGWLTSEGREIKNKSEILALLKALFLPKRLSIIHCLGHQKGDSAEARGNRLADQAAREAAIKTPPDTSTLLIAGKRTADGSEFEKRTADGSEFESPKKKAKVE

SEQ ID NO: 2092 - protein, 2105 aa, synthetic construct
MPAAKRVKLDGGDKKYSIGLDIGTNSVGWAVITDEYKVPSKKFKVLGNTDRHSIKKNLIGALLFDSGETAEATRLKRTARRRYTRRKNRICYLQEIFSNEMAKVDDSFFHRLEESFLVEEDKKHERHPIFGNIVDEVAYHEKYPTIYHLRKKLVDSTDKADLRLIYLALAHMIKFRGHFLIEGDLNPDNSDVDKLFIQLVQTYNQLFEENPINASGVDAKAILSARLSKSRRLENLIAQLPGEKKNGLFGNLIALSLGLTPNFKSNFDLAEDAKLQLSKDTYDDDLDNLLAQIGDQYADLFLAAKNLSDAILLSDILRVNTEITKAPLSASMIKRYDEHHQDLTLLKALVRQQLPEKYKEIFFDQSKNGYAGYIDGGASQEEFYKFIKPILEKMDGTEELLVKLNREDLLRKQRTFDNGSIPHQIHLGELHAILRRQEDFYPFLKDNREKIEKILTFRIPYYVGPLARGNSRFAWMTRKSEETITPWNFEEVVDKGASAQSFIERMTNFDKNLPNEKVLPKHSLLYEYFTVYNELTKVKYVTEGMRKPAFLSGEQKKAIVDLLFKTNRKVTVKQLKEDYFKKIECFDSVEISGVEDRFNASLGTYHDLLKIIKDKDFLDNEENEDILEDIVLTLTLFEDREMIEERLKTYAHLFDDKVMKQLKRRRYTGWGRLSRKLINGIRDKQSGKTILDFLKSDGFANRNFMQLIHDDSLTFKEDIQKAQVSGQGDSLHEHIANLAGSPAIKKGILQTVKVVDELVKVMGRHKPENIVIEMARENQTTQKGQKNSRERMKRIEEGIKELGSQILKEHPVENTQLQNEKLYLYYLQNGRDMYVDQELDINRLSDYDVDHIVPQSFLKDDSIDNKVLTRSDKARGKSDNVPSEEVVKKMKNYWRQLLNAKLITQRKFDNLTKAERGGLSELDKAGFIKRQLVETRQITKHVAQILDSRMNTKYDENDKLIREVKVITLKSKLVSDFRKDFQFYKVREINNYHHAHDAYLNAVVGTALIKKYPKLESEFVYGDYKVYDVRKMIAKSEQEIGKATAKYFFYSNIMNFFKTEITLANGEIRKRPLIETNGETGEIVWDKGRDFATVRKVLSMPQVNIVKKTEVQTGGFSKESILPKRNSDKLIARKKDWDPKKYGGFDSPTVAYSVLVVAKVEKGKSKKLKSVKELLGITIMERSSFEKNPIDFLEAKGYKEVKKDLIIKLPKYSLFELENGRKRMLASAGELQKGNELALPSKYVNFLYLASHYEKLKGSPEDNEQKQLFVEQHKHYLDEIIEQISEFSKRVILADANLDKVLSAYNKHRDKPIREQAENIIHLFTLTNLGAPAAFKYFDTTIDRKRYTSTKEVLDATLIHQSITGLYETRIDLSQLGGDGGEAAAKEAAAKEAAAKEAAAKGGLGIEDEYRLHETSTEPDVSLGSTWLSDFPQAWAETGGMGLAVRQAPLIIPLKATSTPVSIQQYPMSHEARLGIKPHIQRLLDQGILVPCQSPWNTPLLPVKKPGTNDYRPVQDLREVNKRVEDIHPTVPNPYNLLSGLPPSHQWYTVLDLKDAFFCLRLHPTSQPLFAFEWRDPGMGISGQLTWTRLPQGFKNSPTLFNEALHRDLADFRIQHPDLILLQYVDDILLAATSELDCQQGTRALLQTLGDLGYRASAKKAQICQKQVKYLGYLLREGQRWLTEARKETVMGQPVPKTPRQLREFLGKAGFCRLFIPGFAEMAAPLYPLTKPGTLFSWGPDQQKAYQEIKQALLTAPALGLPDLTKPFELFVDEKQGYAKGVLTQKLGPWRRPVAYLSKKLDPVAAGWPPCLRMVAAIAVLTKDAGKLTMGQPLVILAPHAVEALVKQPPDRWLSNARMTHYQAMLLDTDRVQFGPVVALNPATLLPLPEEGAPHDCLEILAETHGTRPDLTDQPIPDADHTWYTDGSSFLQEGQRKAGAAVTTETEVIWAGALPAGTSAQRAELIALTQALKMAEGKRLNVYTDSRYAFATAHIHGEIYRRRGWLTSEGREIKNKSEILALLKALFLPKRLSIIHCLGHQKGDSAEARGNRLADQAAREAAIKTPPDTSTLLIAGKRTADGSEFEKRTADGSEFESPKKKAKVE

SEQ ID NO: 2093 - protein, 2096 aa, synthetic construct; identical to SEQ ID NO: 2048

SEQ ID NO: 2094 - protein, 2115 aa, synthetic construct
MPAAKRVKLDGGDKKYSIGLDIGTNSVGWAVITDEYKVPSKKFKVLGNTDRHSIKKNLIGALLFDSGETAEATRLKRTARRRYTRRKNRICYLQEIFSNEMAKVDDSFFHRLEESFLVEEDKKHERHPIFGNIVDEVAYHEKYPTIYHLRKKLVDSTDKADLRLIYLALAHMIKFRGHFLIEGDLNPDNSDVDKLFIQLVQTYNQLFEENPINASGVDAKAILSARLSKSRRLENLIAQLPGEKKNGLFGNLIALSLGLTPNFKSNFDLAEDAKLQLSKDTYDDDLDNLLAQIGDQYADLFLAAKNLSDAILLSDILRVNTEITKAPLSASMIKRYDEHHQDLTLLKALVRQQLPEKYKEIFFDQSKNGYAGYIDGGASQEEFYKFIKPILEKMDGTEELLVKLNREDLLRKQRTFDNGSIPHQIHLGELHAILRRQEDFYPFLKDNREKIEKILTFRIPYYVGPLARGNSRFAWMTRKSEETITPWNFEEVVDKGASAQSFIERMTNFDKNLPNEKVLPKHSLLYEYFTVYNELTKVKYVTEGMRKPAFLSGEQKKAIVDLLFKTNRKVTVKQLKEDYFKKIECFDSVEISGVEDRFNASLGTYHDLLKIIKDKDFLDNEENEDILEDIVLTLTLFEDREMIEERLKTYAHLFDDKVMKQLKRRRYTGWGRLSRKLINGIRDKQSGKTILDFLKSDGFANRNFMQLIHDDSLTFKEDIQKAQVSGQGDSLHEHIANLAGSPAIKKGILQTVKVVDELVKVMGRHKPENIVIEMARENQTTQKGQKNSRERMKRIEEGIKELGSQILKEHPVENTQLQNEKLYLYYLQNGRDMYVDQELDINRLSDYDVDHIVPQSFLKDDSIDNKVLTRSDKARGKSDNVPSEEVVKKMKNYWRQLLNAKLITQRKFDNLTKAERGGLSELDKAGFIKRQLVETRQITKHVAQILDSRMNTKYDENDKLIREVKVITLKSKLVSDFRKDFQFYKVREINNYHHAHDAYLNAVVGTALIKKYPKLESEFVYGDYKVYDVRKMIAKSEQEIGKATAKYFFYSNIMNFFKTEITLANGEIRKRPLIETNGETGEIVWDKGRDFATVRKVLSMPQVNIVKKTEVQTGGFSKESILPKRNSDKLIARKKDWDPKKYGGFDSPTVAYSVLVVAKVEKGKSKKLKSVKELLGITIMERSSFEKNPIDFLEAKGYKEVKKDLIIKLPKYSLFELENGRKRMLASAGELQKGNELALPSKYVNFLYLASHYEKLKGSPEDNEQKQLFVEQHKHYLDEIIEQISEFSKRVILADANLDKVLSAYNKHRDKPIREQAENIIHLFTLTNLGAPAAFKYFDTTIDRKRYTSTKEVLDATLIHQSITGLYETRIDLSQLGGDGGGGGGSGGGGSGGGGSGGGGSGGGGSGGGGSGGLGIEDEYRLHETSTEPDVSLGSTWLSDFPQAWAETGGMGLAVRQAPLIIPLKATSTPVSIQQYPMSHEARLGIKPHIQRLLDQGILVPCQSPWNTPLLPVKKPGTNDYRPVQDLREVNKRVEDIHPTVPNPYNLLSGLPPSHQWYTVLDLKDAFFCLRLHPTSQPLFAFEWRDPGMGISGQLTWTRLPQGFKNSPTLFNEALHRDLADFRIQHPDLILLQYVDDILLAATSELDCQQGTRALLQTLGDLGYRASAKKAQICQKQVKYLGYLLREGQRWLTEARKETVMGQPVPKTPRQLREFLGKAGFCRLFIPGFAEMAAPLYPLTKPGTLFSWGPDQQKAYQEIKQALLTAPALGLPDLTKPFELFVDEKQGYAKGVLTQKLGPWRRPVAYLSKKLDPVAAGWPPCLRMVAAIAVLTKDAGKLTMGQPLVILAPHAVEALVKQPPDRWLSNARMTHYQAMLLDTDRVQFGPVVALNPATLLPLPEEGAPHDCLEILAETHGTRPDLTDQPIPDADHTWYTDGSSFLQEGQRKAGAAVTTETEVIWAGALPAGTSAQRAELIALTQALKMAEGKRLNVYTDSRYAFATAHIHGEIYRRRGWLTSEGREIKNKSEILALLKALFLPKRLSIIHCLGHQKGDSAEARGNRLADQAAREAAIKTPPDTSTLLIAGKRTADGSEFEKRTADGSEFESPKKKAKVE

SEQ ID NO: 2095 - protein, 2096 aa, synthetic construct
MPAAKRVKLDGGDKKYSIGLDIGTNSVGWAVITDEYKVPSKKFKVLGNTDRHSIKKNLIGALLFDSGETAEATRLKRTARRRYTRRKNRICYLQEIFSNEMAKVDDSFFHRLEESFLVEEDKKHERHPIFGNIVDEVAYHEKYPTIYHLRKKLVDSTDKADLRLIYLALAHMIKFRGHFLIEGDLNPDNSDVDKLFIQLVQTYNQLFEENPINASGVDAKAILSARLSKSRRLENLIAQLPGEKKNGLFGNLIALSLGLTPNFKSNFDLAEDAKLQLSKDTYDDDLDNLLAQIGDQYADLFLAAKNLSDAILLSDILRVNTEITKAPLSASMIKRYDEHHQDLTLLKALVRQQLPEKYKEIFFDQSKNGYAGYIDGGASQEEFYKFIKPILEKMDGTEELLVKLNREDLLRKQRTFDNGSIPHQIHLGELHAILRRQEDFYPFLKDNREKIEKILTFRIPYYVGPLARGNSRFAWMTRKSEETITPWNFEEVVDKGASAQSFIERMTNFDKNLPNEKVLPKHSLLYEYFTVYNELTKVKYVTEGMRKPAFLSGEQKKAIVDLLFKTNRKVTVKQLKEDYFKKIECFDSVEISGVEDRFNASLGTYHDLLKIIKDKDFLDNEENEDILEDIVLTLTLFEDREMIEERLKTYAHLFDDKVMKQLKRRRYTGWGRLSRKLINGIRDKQSGKTILDFLKSDGFANRNFMQLIHDDSLTFKEDIQKAQVSGQGDSLHEHIANLAGSPAIKKGILQTVKVVDELVKVMGRHKPENIVIEMARENQTTQKGQKNSRERMKRIEEGIKELGSQILKEHPVENTQLQNEKLYLYYLQNGRDMYVDQELDINRLSDYDVDHIVPQSFLKDDSIDNKVLTRSDKARGKSDNVPSEEVVKKMKNYWRQLLNAKLITQRKFDNLTKAERGGLSELDKAGFIKRQLVETRQITKHVAQILDSRMNTKYDENDKLIREVKVITLKSKLVSDFRKDFQFYKVREINNYHHAHDAYLNAVVGTALIKKYPKLESEFVYGDYKVYDVRKMIAKSEQEIGKATAKYFFYSNIMNFFKTEITLANGEIRKRPLIETNGETGEIVWDKGRDFATVRKVLSMPQVNIVKKTEVQTGGFSKESILPKRNSDKLIARKKDWDPKKYGGFDSPTVAYSVLVVAKVEKGKSKKLKSVKELLGITIMERSSFEKNPIDFLEAKGYKEVKKDLIIKLPKYSLFELENGRKRMLASAGELQKGNELALPSKYVNFLYLASHYEKLKGSPEDNEQKQLFVEQHKHYLDEIIEQISEFSKRVILADANLDKVLSAYNKHRDKPIREQAENIIHLFTLTNLGAPAAFKYFDTTIDRKRYTSTKEVLDATLIHQSITGLYETRIDLSQLGGDGGPAPEAAAKGSSGGLGIEDEYRLHETSTEPDVSLGSTWLSDFPQAWAETGGMGLAVRQAPLIIPLKATSTPVSIQQYPMSHEARLGIKPHIQRLLDQGILVPCQSPWNTPLLPVKKPGTNDYRPVQDLREVNKRVEDIHPTVPNPYNLLSGLPPSHQWYTVLDLKDAFFCLRLHPTSQPLFAFEWRDPGMGISGQLTWTRLPQGFKNSPTLFNEALHRDLADFRIQHPDLILLQYVDDILLAATSELDCQQGTRALLQTLGDLGYRASAKKAQICQKQVKYLGYLLREGQRWLTEARKETVMGQPVPKTPRQLREFLGKAGFCRLFIPGFAEMAAPLYPLTKPGTLFSWGPDQQKAYQEIKQALLTAPALGLPDLTKPFELFVDEKQGYAKGVLTQKLGPWRRPVAYLSKKLDPVAAGWPPCLRMVAAIAVLTKDAGKLTMGQPLVILAPHAVEALVKQPPDRWLSNARMTHYQAMLLDTDRVQFGPVVALNPATLLPLPEEGAPHDCLEILAETHGTRPDLTDQPIPDADHTWYTDGSSFLQEGQRKAGAAVTTETEVIWAGALPAGTSAQRAELIALTQALKMAEGKRLNVYTDSRYAFATAHIHGEIYRRRGWLTSEGREIKNKSEILALLKALFLPKRLSIIHCLGHQKGDSAEARGNRLADQAAREAAIKTPPDTSTLLIAGKRTADGSEFEKRTADGSEFESPKKKAKVE

SEQ ID NO: 2096 - protein, 2090 aa, synthetic construct
MPAAKRVKLDGGDKKYSIGLDIGTNSVGWAVITDEYKVPSKKFKVLGNTDRHSIKKNLIGALLFDSGETAEATRLKRTARRRYTRRKNRICYLQEIFSNEMAKVDDSFFHRLEESFLVEEDKKHERHPIFGNIVDEVAYHEKYPTIYHLRKKLVDSTDKADLRLIYLALAHMIKFRGHFLIEGDLNPDNSDVDKLFIQLVQTYNQLFEENPINASGVDAKAILSARLSKSRRLENLIAQLPGEKKNGLFGNLIALSLGLTPNFKSNFDLAEDAKLQLSKDTYDDDLDNLLAQIGDQYADLFLAAKNLSDAILLSDILRVNTEITKAPLSASMIKRYDEHHQDLTLLKALVRQQLPEKYKEIFFDQSKNGYAGYIDGGASQEEFYKFIKPILEKMDGTEELLVKLNREDLLRKQRTFDNGSIPHQIHLGELHAILRRQEDFYPFLKDNREKIEKILTFRIPYYVGPLARGNSRFAWMTRKSEETITPWNFEEVVDKGASAQSFIERMTNFDKNLPNEKVLPKHSLLYEYFTVYNELTKVKYVTEGMRKPAFLSGEQKKAIVDLLFKTNRKVTVKQLKEDYFKKIECFDSVEISGVEDRFNASLGTYHDLLKIIKDKDFLDNEENEDILEDIVLTLTLFEDREMIEERLKTYAHLFDDKVMKQLKRRRYTGWGRLSRKLINGIRDKQSGKTILDFLKSDGFANRNFMQLIHDDSLTFKEDIQKAQVSGQGDSLHEHIANLAGSPAIKKGILQTVKVVDELVKVMGRHKPENIVIEMARENQTTQKGQKNSRERMKRIEEGIKELGSQILKEHPVENTQLQNEKLYLYYLQNGRDMYVDQELDINRLSDYDVDHIVPQSFLKDDSIDNKVLTRSDKARGKSDNVPSEEVVKKMKNYWRQLLNAKLITQRKFDNLTKAERGGLSELDKAGFIKRQLVETRQITKHVAQILDSRMNTKYDENDKLIREVKVITLKSKLVSDFRKDFQFYKVREINNYHHAHDAYLNAVVGTALIKKYPKLESEFVYGDYKVYDVRKMIAKSEQEIGKATAKYFFYSNIMNFFKTEITLANGEIRKRPLIETNGETGEIVWDKGRDFATVRKVLSMPQVNIVKKTEVQTGGFSKESILPKRNSDKLIARKKDWDPKKYGGFDSPTVAYSVLVVAKVEKGKSKKLKSVKELLGITIMERSSFEKNPIDFLEAKGYKEVKKDLIIKLPKYSLFELENGRKRMLASAGELQKGNELALPSKYVNFLYLASHYEKLKGSPEDNEQKQLFVEQHKHYLDEIIEQISEFSKRVILADANLDKVLSAYNKHRDKPIREQAENIIHLFTLTNLGAPAAFKYFDTTIDRKRYTSTKEVLDATLIHQSITGLYETRIDLSQLGGDGGEAAAKGGLGIEDEYRLHETSTEPDVSLGSTWLSDFPQAWAETGGMGLAVRQAPLIIPLKATSTPVSIQQYPMSHEARLGIKPHIQRLLDQGILVPCQSPWNTPLLPVKKPGTNDYRPVQDLREVNKRVEDIHPTVPNPYNLLSGLPPSHQWYTVLDLKDAFFCLRLHPTSQPLFAFEWRDPGMGISGQLTWTRLPQGFKNSPTLFNEALHRDLADFRIQHPDLILLQYVDDILLAATSELDCQQGTRALLQTLGDLGYRASAKKAQICQKQVKYLGYLLREGQRWLTEARKETVMGQPVPKTPRQLREFLGKAGFCRLFIPGFAEMAAPLYPLTKPGTLFSWGPDQQKAYQEIKQALLTAPALGLPDLTKPFELFVDEKQGYAKGVLTQKLGPWRRPVAYLSKKLDPVAAGWPPCLRMVAAIAVLTKDAGKLTMGQPLVILAPHAVEALVKQPPDRWLSNARMTHYQAMLLDTDRVQFGPVVALNPATLLPLPEEGAPHDCLEILAETHGTRPDLTDQPIPDADHTWYTDGSSFLQEGQRKAGAAVTTETEVIWAGALPAGTSAQRAELIALTQALKMAEGKRLNVYTDSRYAFATAHIHGEIYRRRGWLTSEGREIKNKSEILALLKALFLPKRLSIIHCLGHQKGDSAEARGNRLADQAAREAAIKTPPDTSTLLIAGKRTADGSEFEKRTADGSEFESPKKKAKVE

SEQ ID NO: 2097 - protein, 2096 aa, synthetic construct
MPAAKRVKLDGGDKKYSIGLDIGTNSVGWAVITDEYKVPSKKFKVLGNTDRHSIKKNLIGALLFDSGETAEATRLKRTARRRYTRRKNRICYLQEIFSNEMAKVDDSFFHRLEESFLVEEDKKHERHPIFGNIVDEVAYHEKYPTIYHLRKKLVDSTDKADLRLIYLALAHMIKFRGHFLIEGDLNPDNSDVDKLFIQLVQTYNQLFEENPINASGVDAKAILSARLSKSRRLENLIAQLPGEKKNGLFGNLIALSLGLTPNFKSNFDLAEDAKLQLSKDTYDDDLDNLLAQIGDQYADLFLAAKNLSDAILLSDILRVNTEITKAPLSASMIKRYDEHHQDLTLLKALVRQQLPEKYKEIFFDQSKNGYAGYIDGGASQEEFYKFIKPILEKMDGTEELLVKLNREDLLRKQRTFDNGSIPHQIHLGELHAILRRQEDFYPFLKDNREKIEKILTFRIPYYVGPLARGNSRFAWMTRKSEETITPWNFEEVVDKGASAQSFIERMTNFDKNLPNEKVLPKHSLLYEYFTVYNELTKVKYVTEGMRKPAFLSGEQKKAIVDLLFKTNRKVTVKQLKEDYFKKIECFDSVEISGVEDRFNASLGTYHDLLKIIKDKDFLDNEENEDILEDIVLTLTLFEDREMIEERLKTYAHLFDDKVMKQLKRRRYTGWGRLSRKLINGIRDKQSGKTILDFLKSDGFANRNFMQLIHDDSLTFKEDIQKAQVSGQGDSLHEHIANLAGSPAIKKGILQTVKVVDELVKVMGRHKPENIVIEMARENQTTQKGQKNSRERMKRIEEGIKELGSQILKEHPVENTQLQNEKLYLYYLQNGRDMYVDQELDINRLSDYDVDHIVPQSFLKDDSIDNKVLTRSDKARGKSDNVPSEEVVKKMKNYWRQLLNAKLITQRKFDNLTKAERGGLSELDKAGFIKRQLVETRQITKHVAQILDSRMNTKYDENDKLIREVKVITLKSKLVSDFRKDFQFYKVREINNYHHAHDAYLNAVVGTALIKKYPKLESEFVYGDYKVYDVRKMIAKSEQEIGKATAKYFFYSNIMNFFKTEITLANGEIRKRPLIETNGETGEIVWDKGRDFATVRKVLSMPQVNIVKKTEVQTGGFSKESILPKRNSDKLIARKKDWDPKKYGGFDSPTVAYSVLVVAKVEKGKSKKLKSVKELLGITIMERSSFEKNPIDFLEAKGYKEVKKDLIIKLPKYSLFELENGRKRMLASAGELQKGNELALPSKYVNFLYLASHYEKLKGSPEDNEQKQLFVEQHKHYLDEIIEQISEFSKRVILADANLDKVLSAYNKHRDKPIREQAENIIHLFTLTNLGAPAAFKYFDTTIDRKRYTSTKEVLDATLIHQSITGLYETRIDLSQLGGDGGPAPEAAAKGGSGGLGIEDEYRLHETSTEPDVSLGSTWLSDFPQAWAETGGMGLAVRQAPLIIPLKATSTPVSIQQYPMSHEARLGIKPHIQRLLDQGILVPCQSPWNTPLLPVKKPGTNDYRPVQDLREVNKRVEDIHPTVPNPYNLLSGLPPSHQWYTVLDLKDAFFCLRLHPTSQPLFAFEWRDPGMGISGQLTWTRLPQGFKNSPTLFNEALHRDLADFRIQHPDLILLQYVDDILLAATSELDCQQGTRALLQTLGDLGYRASAKKAQICQKQVKYLGYLLREGQRWLTEARKETVMGQPVPKTPRQLREFLGKAGFCRLFIPGFAEMAAPLYPLTKPGTLFSWGPDQQKAYQEIKQALLTAPALGLPDLTKPFELFVDEKQGYAKGVLTQKLGPWRRPVAYLSKKLDPVAAGWPPCLRMVAAIAVLTKDAGKLTMGQPLVILAPHAVEALVKQPPDRWLSNARMTHYQAMLLDTDRVQFGPVVALNPATLLPLPEEGAPHDCLEILAETHGTRPDLTDQPIPDADHTWYTDGSSFLQEGQRKAGAAVTTETEVIWAGALPAGTSAQRAELIALTQALKMAEGKRLNVYTDSRYAFATAHIHGEIYRRRGWLTSEGREIKNKSEILALLKALFLPKRLSIIHCLGHQKGDSAEARGNRLADQAAREAAIKTPPDTSTLLIAGKRTADGSEFEKRTADGSEFESPKKKAKVE

SEQ ID NO: 2098 - protein, 2115 aa, synthetic construct
MPAAKRVKLDGGDKKYSIGLDIGTNSVGWAVITDEYKVPSKKFKVLGNTDRHSIKKNLIGALLFDSGETAEATRLKRTARRRYTRRKNRICYLQEIFSNEMAKVDDSFFHRLEESFLVEEDKKHERHPIFGNIVDEVAYHEKYPTIYHLRKKLVDSTDKADLRLIYLALAHMIKFRGHFLIEGDLNPDNSDVDKLFIQLVQTYNQLFEENPINASGVDAKAILSARLSKSRRLENLIAQLPGEKKNGLFGNLIALSLGLTPNFKSNFDLAEDAKLQLSKDTYDDDLDNLLAQIGDQYADLFLAAKNLSDAILLSDILRVNTEITKAPLSASMIKRYDEHHQDLTLLKALVRQQLPEKYKEIFFDQSKNGYAGYIDGGASQEEFYKFIKPILEKMDGTEELLVKLNREDLLRKQRTFDNGSIPHQIHLGELHAILRRQEDFYPFLKDNREKIEKILTFRIPYYVGPLARGNSRFAWMTRKSEETITPWNFEEVVDKGASAQSFIERMTNFDKNLPNEKVLPKHSLLYEYFTVYNELTKVKYVTEGMRKPAFLSGEQKKAIVDLLFKTNRKVTVKQLKEDYFKKIECFDSVEISGVEDRFNASLGTYHDLLKIIKDKDFLDNEENEDILEDIVLTLTLFEDREMIEERLKTYAHLFDDKVMKQLKRRRYTGWGRLSRKLINGIRDKQSGKTILDFLKSDGFANRNFMQLIHDDSLTFKEDIQKAQVSGQGDSLHEHIANLAGSPAIKKGILQTVKVVDELVKVMGRHKPENIVIEMARENQTTQKGQKNSRERMKRIEEGIKELGSQILKEHPVENTQLQNEKLYLYYLQNGRDMYVDQELDINRLSDYDVDHIVPQSFLKDDSIDNKVLTRSDKARGKSDNVPSEEVVKKMKNYWRQLLNAKLITQRKFDNLTKAERGGLSELDKAGFIKRQLVETRQITKHVAQILDSRMNTKYDENDKLIREVKVITLKSKLVSDFRKDFQFYKVREINNYHHAHDAYLNAVVGTALIKKYPKLESEFVYGDYKVYDVRKMIAKSEQEIGKATAKYFFYSNIMNFFKTEITLANGEIRKRPLIETNGETGEIVWDKGRDFATVRKVLSMPQVNIVKKTEVQTGGFSKESILPKRNSDKLIARKKDWDPKKYGGFDSPTVAYSVLVVAKVEKGKSKKLKSVKELLGITIMERSSFEKNPIDFLEAKGYKEVKKDLIIKLPKYSLFELENGRKRMLASAGELQKGNELALPSKYVNFLYLASHYEKLKGSPEDNEQKQLFVEQHKHYLDEIIEQISEFSKRVILADANLDKVLSAYNKHRDKPIREQAENIIHLFTLTNLGAPAAFKYFDTTIDRKRYTSTKEVLDATLIHQSITGLYETRIDLSQLGGDGGEAAAKEAAAKEAAAKEAAAKEAAAKEAAAKGGLGIEDEYRLHETSTEPDVSLGSTWLSDFPQAWAETGGMGLAVRQAPLIIPLKATSTPVSIQQYPMSHEARLGIKPHIQRLLDQGILVPCQSPWNTPLLPVKKPGTNDYRPVQDLREVNKRVEDIHPTVPNPYNLLSGLPPSHQWYTVLDLKDAFFCLRLHPTSQPLFAFEWRDPGMGISGQLTWTRLPQGFKNSPTLFNEALHRDLADFRIQHPDLILLQYVDDILLAATSELDCQQGTRALLQTLGDLGYRASAKKAQICQKQVKYLGYLLREGQRWLTEARKETVMGQPVPKTPRQLREFLGKAGFCRLFIPGFAEMAAPLYPLTKPGTLFSWGPDQQKAYQEIKQALLTAPALGLPDLTKPFELFVDEKQGYAKGVLTQKLGPWRRPVAYLSKKLDPVAAGWPPCLRMVAAIAVLTKDAGKLTMGQPLVILAPHAVEALVKQPPDRWLSNARMTHYQAMLLDTDRVQFGPVVALNPATLLPLPEEGAPHDCLEILAETHGTRPDLTDQPIPDADHTWYTDGSSFLQEGQRKAGAAVTTETEVIWAGALPAGTSAQRAELIALTQALKMAEGKRLNVYTDSRYAFATAHIHGEIYRRRGWLTSEGREIKNKSEILALLKALFLPKRLSIIHCLGHQKGDSAEARGNRLADQAAREAAIKTPPDTSTLLIAGKRTADGSEFEKRTADGSEFESPKKKAKVE

SEQ ID NO: 2099 - protein, 2096 aa, synthetic construct
MPAAKRVKLDGGDKKYSIGLDIGTNSVGWAVITDEYKVPSKKFKVLGNTDRHSIKKNLIGALLFDSGETAEATRLKRTARRRYTRRKNRICYLQEIFSNEMAKVDDSFFHRLEESFLVEEDKKHERHPIFGNIVDEVAYHEKYPTIYHLRKKLVDSTDKADLRLIYLALAHMIKFRGHFLIEGDLNPDNSDVDKLFIQLVQTYNQLFEENPINASGVDAKAILSARLSKSRRLENLIAQLPGEKKNGLFGNLIALSLGLTPNFKSNFDLAEDAKLQLSKDTYDDDLDNLLAQIGDQYADLFLAAKNLSDAILLSDILRVNTEITKAPLSASMIKRYDEHHQDLTLLKALVRQQLPEKYKEIFFDQSKNGYAGYIDGGASQEEFYKFIKPILEKMDGTEELLVKLNREDLLRKQRTFDNGSIPHQIHLGELHAILRRQEDFYPFLKDNREKIEKILTFRIPYYVGPLARGNSRFAWMTRKSEETITPWNFEEVVDKGASAQSFIERMTNFDKNLPNEKVLPKHSLLYEYFTVYNELTKVKYVTEGMRKPAFLSGEQKKAIVDLLFKTNRKVTVKQLKEDYFKKIECFDSVEISGVEDRFNASLGTYHDLLKIIKDKDFLDNEENEDILEDIVLTLTLFEDREMIEERLKTYAHLFDDKVMKQLKRRRYTGWGRLSRKLINGIRDKQSGKTILDFLKSDGFANRNFMQLIHDDSLTFKEDIQKAQVSGQGDSLHEHIANLAGSPAIKKGILQTVKVVDELVKVMGRHKPENIVIEMARENQTTQKGQKNSRERMKRIEEGIKELGSQILKEHPVENTQLQNEKLYLYYLQNGRDMYVDQELDINRLSDYDVDHIVPQSFLKDDSIDNKVLTRSDKARGKSDNVPSEEVVKKMKNYWRQLLNAKLITQRKFDNLTKAERGGLSELDKAGFIKRQLVETRQITKHVAQILDSRMNTKYDENDKLIREVKVITLKSKLVSDFRKDFQFYKVREINNYHHAHDAYLNAVVGTALIKKYPKLESEFVYGDYKVYDVRKMIAKSEQEIGKATAKYFFYSNIMNFFKTEITLANGEIRKRPLIETNGETGEIVWDKGRDFATVRKVLSMPQVNIVKKTEVQTGGFSKESILPKRNSDKLIARKKDWDPKKYGGFDSPTVAYSVLVVAKVEKGKSKKLKSVKELLGITIMERSSFEKNPIDFLEAKGYKEVKKDLIIKLPKYSLFELENGRKRMLASAGELQKGNELALPSKYVNFLYLASHYEKLKGSPEDNEQKQLFVEQHKHYLDEIIEQISEFSKRVILADANLDKVLSAYNKHRDKPIREQAENIIHLFTLTNLGAPAAFKYFDTTIDRKRYTSTKEVLDATLIHQSITGLYETRIDLSQLGGDGGEAAAKPAPGGSGGLGIEDEYRLHETSTEPDVSLGSTWLSDFPQAWAETGGMGLAVRQAPLIIPLKATSTPVSIQQYPMSHEARLGIKPHIQRLLDQGILVPCQSPWNTPLLPVKKPGTNDYRPVQDLREVNKRVEDIHPTVPNPYNLLSGLPPSHQWYTVLDLKDAFFCLRLHPTSQPLFAFEWRDPGMGISGQLTWTRLPQGFKNSPTLFNEALHRDLADFRIQHPDLILLQYVDDILLAATSELDCQQGTRALLQTLGDLGYRASAKKAQICQKQVKYLGYLLREGQRWLTEARKETVMGQPVPKTPRQLREFLGKAGFCRLFIPGFAEMAAPLYPLTKPGTLFSWGPDQQKAYQEIKQALLTAPALGLPDLTKPFELFVDEKQGYAKGVLTQKLGPWRRPVAYLSKKLDPVAAGWPPCLRMVAAIAVLTKDAGKLTMGQPLVILAPHAVEALVKQPPDRWLSNARMTHYQAMLLDTDRVQFGPVVALNPATLLPLPEEGAPHDCLEILAETHGTRPDLTDQPIPDADHTWYTDGSSFLQEGQRKAGAAVTTETEVIWAGALPAGTSAQRAELIALTQALKMAEGKRLNVYTDSRYAFATAHIHGEIYRRRGWLTSEGREIKNKSEILALLKALFLPKRLSIIHCLGHQKGDSAEARGNRLADQAAREAAIKTPPDTSTLLIAGKRTADGSEFEKRTADGSEFESPKKKAKVE

SEQ ID NO: 2100 - protein, 2096 aa, synthetic construct
MPAAKRVKLDGGDKKYSIGLDIGTNSVGWAVITDEYKVPSKKFKVLGNTDRHSIKKNLIGALLFDSGETAEATRLKRTARRRYTRRKNRICYLQEIFSNEMAKVDDSFFHRLEESFLVEEDKKHERHPIFGNIVDEVAYHEKYPTIYHLRKKLVDSTDKADLRLIYLALAHMIKFRGHFLIEGDLNPDNSDVDKLFIQLVQTYNQLFEENPINASGVDAKAILSARLSKSRRLENLIAQLPGEKKNGLFGNLIALSLGLTPNFKSNFDLAEDAKLQLSKDTYDDDLDNLLAQIGDQYADLFLAAKNLSDAILLSDILRVNTEITKAPLSASMIKRYDEHHQDLTLLKALVRQQLPEKYKEIFFDQSKNGYAGYIDGGASQEEFYKFIKPILEKMDGTEELLVKLNREDLLRKQRTFDNGSIPHQIHLGELHAILRRQEDFYPFLKDNREKIEKILTFRIPYYVGPLARGNSRFAWMTRKSEETITPWNFEEVVDKGASAQSFIERMTNFDKNLPNEKVLPKHSLLYEYFTVYNELTKVKYVTEGMRKPAFLSGEQKKAIVDLLFKTNRKVTVKQLKEDYFKKIECFDSVEISGVEDRFNASLGTYHDLLKIIKDKDFLDNEENEDILEDIVLTLTLFEDREMIEERLKTYAHLFDDKVMKQLKRRRYTGWGRLSRKLINGIRDKQSGKTILDFLKSDGFANRNFMQLIHDDSLTFKEDIQKAQVSGQGDSLHEHIANLAGSPAIKKGILQTVKVVDELVKVMGRHKPENIVIEMARENQTTQKGQKNSRERMKRIEEGIKELGSQILKEHPVENTQLQNEKLYLYYLQNGRDMYVDQELDINRLSDYDVDHIVPQSFLKDDSIDNKVLTRSDKARGKSDNVPSEEVVKKMKNYWRQLLNAKLITQRKFDNLTKAERGGLSELDKAGFIKRQLVETRQITKHVAQILDSRMNTKYDENDKLIREVKVITLKSKLVSDFRKDFQFYKVREINNYHHAHDAYLNAVVGTALIKKYPKLESEFVYGDYKVYDVRKMIAKSEQEIGKATAKYFFYSNIMNFFKTEITLANGEIRKRPLIETNGETGEIVWDKGRDFATVRKVLSMPQVNIVKKTEVQTGGFSKESILPKRNSDKLIARKKDWDPKKYGGFDSPTVAYSVLVVAKVEKGKSKKLKSVKELLGITIMERSSFEKNPIDFLEAKGYKEVKKDLIIKLPKYSLFELENGRKRMLASAGELQKGNELALPSKYVNFLYLASHYEKLKGSPEDNEQKQLFVEQHKHYLDEIIEQISEFSKRVILADANLDKVLSAYNKHRDKPIREQAENIIHLFTLTNLGAPAAFKYFDTTIDRKRYTSTKEVLDATLIHQSITGLYETRIDLSQLGGDGGGGSGSSEAAAKGGLGIEDEYRLHETSTEPDVSLGSTWLSDFPQAWAETGGMGLAVRQAPLIIPLKATSTPVSIQQYPMSHEARLGIKPHIQRLLDQGILVPCQSPWNTPLLPVKKPGTNDYRPVQDLREVNKRVEDIHPTVPNPYNLLSGLPPSHQWYTVLDLKDAFFCLRLHPTSQPLFAFEWRDPGMGISGQLTWTRLPQGFKNSPTLFNEALHRDLADFRIQHPDLILLQYVDDILLAATSELDCQQGTRALLQTLGDLGYRASAKKAQICQKQVKYLGYLLREGQRWLTEARKETVMGQPVPKTPRQLREFLGKAGFCRLFIPGFAEMAAPLYPLTKPGTLFSWGPDQQKAYQEIKQALLTAPALGLPDLTKPFELFVDEKQGYAKGVLTQKLGPWRRPVAYLSKKLDPVAAGWPPCLRMVAAIAVLTKDAGKLTMGQPLVILAPHAVEALVKQPPDRWLSNARMTHYQAMLLDTDRVQFGPVVALNPATLLPLPEEGAPHDCLEILAETHGTRPDLTDQPIPDADHTWYTDGSSFLQEGQRKAGAAVTTETEVIWAGALPAGTSAQRAELIALTQALKMAEGKRLNVYTDSRYAFATAHIHGEIYRRRGWLTSEGREIKNKSEILALLKALFLPKRLSIIHCLGHQKGDSAEARGNRLADQAAREAAIKTPPDTSTLLIAGKRTADGSEFEKRTADGSEFESPKKKAKVE

SEQ ID NO: 2101 - protein, 2094 aa, synthetic construct
MPAAKRVKLDGGDKKYSIGLDIGTNSVGWAVITDEYKVPSKKFKVLGNTDRHSIKKNLIGALLFDSGETAEATRLKRTARRRYTRRKNRICYLQEIFSNEMAKVDDSFFHRLEESFLVEEDKKHERHPIFGNIVDEVAYHEKYPTIYHLRKKLVDSTDKADLRLIYLALAHMIKFRGHFLIEGDLNPDNSDVDKLFIQLVQTYNQLFEENPINASGVDAKAILSARLSKSRRLENLIAQLPGEKKNGLFGNLIALSLGLTPNFKSNFDLAEDAKLQLSKDTYDDDLDNLLAQIGDQYADLFLAAKNLSDAILLSDILRVNTEITKAPLSASMIKRYDEHHQDLTLLKALVRQQLPEKYKEIFFDQSKNGYAGYIDGGASQEEFYKFIKPILEKMDGTEELLVKLNREDLLRKQRTFDNGSIPHQIHLGELHAILRRQEDFYPFLKDNREKIEKILTFRIPYYVGPLARGNSRFAWMTRKSEETITPWNFEEVVDKGASAQSFIERMTNFDKNLPNEKVLPKHSLLYEYFTVYNELTKVKYVTEGMRKPAFLSGEQKKAIVDLLFKTNRKVTVKQLKEDYFKKIECFDSVEISGVEDRFNASLGTYHDLLKIIKDKDFLDNEENEDILEDIVLTLTLFEDREMIEERLKTYAHLFDDKVMKQLKRRRYTGWGRLSRKLINGIRDKQSGKTILDFLKSDGFANRNFMQLIHDDSLTFKEDIQKAQVSGQGDSLHEHIANLAGSPAIKKGILQTVKVVDELVKVMGRHKPENIVIEMARENQTTQKGQKNSRERMKRIEEGIKELGSQILKEHPVENTQLQNEKLYLYYLQNGRDMYVDQELDINRLSDYDVDHIVPQSFLKDDSIDNKVLTRSDKARGKSDNVPSEEVVKKMKNYWRQLLNAKLITQRKFDNLTKAERGGLSELDKAGFIKRQLVETRQITKHVAQILDSRMNTKYDENDKLIREVKVITLKSKLVSDFRKDFQFYKVREINNYHHAHDAYLNAVVGTALIKKYPKLESEFVYGDYKVYDVRKMIAKSEQEIGKATAKYFFYSNIMNFFKTEITLANGEIRKRPLIETNGETGEIVWDKGRDFATVRKVLSMPQVNIVKKTEVQTGGFSKESILPKRNSDKLIARKKDWDPKKYGGFDSPTVAYSVLVVAKVEKGKSKKLKSVKELLGITIMERSSFEKNPIDFLEAKGYKEVKKDLIIKLPKYSLFELENGRKRMLASAGELQKGNELALPSKYVNFLYLASHYEKLKGSPEDNEQKQLFVEQHKHYLDEIIEQISEFSKRVILADANLDKVLSAYNKHRDKPIREQAENIIHLFTLTNLGAPAAFKYFDTTIDRKRYTSTKEVLDATLIHQSITGLYETRIDLSQLGGDGGPAPGGGGSSGGLGIEDEYRLHETSTEPDVSLGSTWLSDFPQAWAETGGMGLAVRQAPLIIPLKATSTPVSIQQYPMSHEARLGIKPHIQRLLDQGILVPCQSPWNTPLLPVKKPGTNDYRPVQDLREVNKRVEDIHPTVPNPYNLLSGLPPSHQWYTVLDLKDAFFCLRLHPTSQPLFAFEWRDPGMGISGQLTWTRLPQGFKNSPTLFNEALHRDLADFRIQHPDLILLQYVDDILLAATSELDCQQGTRALLQTLGDLGYRASAKKAQICQKQVKYLGYLLREGQRWLTEARKETVMGQPVPKTPRQLREFLGKAGFCRLFIPGFAEMAAPLYPLTKPGTLFSWGPDQQKAYQEIKQALLTAPALGLPDLTKPFELFVDEKQGYAKGVLTQKLGPWRRPVAYLSKKLDPVAAGWPPCLRMVAAIAVLTKDAGKLTMGQPLVILAPHAVEALVKQPPDRWLSNARMTHYQAMLLDTDRVQFGPVVALNPATLLPLPEEGAPHDCLEILAETHGTRPDLTDQPIPDADHTWYTDGSSFLQEGQRKAGAAVTTETEVIWAGALPAGTSAQRAELIALTQALKMAEGKRLNVYTDSRYAFATAHIHGEIYRRRGWLTSEGREIKNKSEILALLKALFLPKRLSIIHCLGHQKGDSAEARGNRLADQAAREAAIKTPPDTSTLLIAGKRTADGSEFEKRTADGSEFESPKKKAKVE

SEQ ID NO: 2102 - protein, 2096 aa, synthetic construct
MPAAKRVKLDGGDKKYSIGLDIGTNSVGWAVITDEYKVPSKKFKVLGNTDRHSIKKNLIGALLFDSGETAEATRLKRTARRRYTRRKNRICYLQEIFSNEMAKVDDSFFHRLEESFLVEEDKKHERHPIFGNIVDEVAYHEKYPTIYHLRKKLVDSTDKADLRLIYLALAHMIKFRGHFLIEGDLNPDNSDVDKLFIQLVQTYNQLFEENPINASGVDAKAILSARLSKSRRLENLIAQLPGEKKNGLFGNLIALSLGLTPNFKSNFDLAEDAKLQLSKDTYDDDLDNLLAQIGDQYADLFLAAKNLSDAILLSDILRVNTEITKAPLSASMIKRYDEHHQDLTLLKALVRQQLPEKYKEIFFDQSKNGYAGYIDGGASQEEFYKFIKPILEKMDGTEELLVKLNREDLLRKQRTFDNGSIPHQIHLGELHAILRRQEDFYPFLKDNREKIEKILTFRIPYYVGPLARGNSRFAWMTRKSEETITPWNFEEVVDKGASAQSFIERMTNFDKNLPNEKVLPKHSLLYEYFTVYNELTKVKYVTEGMRKPAFLSGEQKKAIVDLLFKTNRKVTVKQLKEDYFKKIECFDSVEISGVEDRFNASLGTYHDLLKIIKDKDFLDNEENEDILEDIVLTLTLFEDREMIEERLKTYAHLFDDKVMKQLKRRRYTGWGRLSRKLINGIRDKQSGKTILDFLKSDGFANRNFMQLIHDDSLTFKEDIQKAQVSGQGDSLHEHIANLAGSPAIKKGILQTVKVVDELVKVMGRHKPENIVIEMARENQTTQKGQKNSRERMKRIEEGIKELGSQILKEHPVENTQLQNEKLYLYYLQNGRDMYVDQELDINRLSDYDVDHIVPQSFLKDDSIDNKVLTRSDKARGKSDNVPSEEVVKKMKNYWRQLLNAKLITQRKFDNLTKAERGGLSELDKAGFIKRQLVETRQITKHVAQILDSRMNTKYDENDKLIREVKVITLKSKLVSDFRKDFQFYKVREINNYHHAHDAYLNAVVGTALIKKYPKLESEFVYGDYKVYDVRKMIAKSEQEIGKATAKYFFYSNIMNFFKTEITLANGEIRKRPLIETNGETGEIVWDKGRDFATVRKVLSMPQVNIVKKTEVQTGGFSKESILPKRNSDKLIARKKDWDPKKYGGFDSPTVAYSVLVVAKVEKGKSKKLKSVKELLGITIMERSSFEKNPIDFLEAKGYKEVKKDLIIKLPKYSLFELENGRKRMLASAGELQKGNELALPSKYVNFLYLASHYEKLKGSPEDNEQKQLFVEQHKHYLDEIIEQISEFSKRVILADANLDKVLSAYNKHRDKPIREQAENIIHLFTLTNLGAPAAFKYFDTTIDRKRYTSTKEVLDATLIHQSITGLYETRIDLSQLGGDGGGGSEAAAKGGGGGLGIEDEYRLHETSTEPDVSLGSTWLSDFPQAWAETGGMGLAVRQAPLIIPLKATSTPVSIQQYPMSHEARLGIKPHIQRLLDQGILVPCQSPWNTPLLPVKKPGTNDYRPVQDLREVNKRVEDIHPTVPNPYNLLSGLPPSHQWYTVLDLKDAFFCLRLHPTSQPLFAFEWRDPGMGISGQLTWTRLPQGFKNSPTLFNEALHRDLADFRIQHPDLILLQYVDDILLAATSELDCQQGTRALLQTLGDLGYRASAKKAQICQKQVKYLGYLLREGQRWLTEARKETVMGQPVPKTPRQLREFLGKAGFCRLFIPGFAEMAAPLYPLTKPGTLFSWGPDQQKAYQEIKQALLTAPALGLPDLTKPFELFVDEKQGYAKGVLTQKLGPWRRPVAYLSKKLDPVAAGWPPCLRMVAAIAVLTKDAGKLTMGQPLVILAPHAVEALVKQPPDRWLSNARMTHYQAMLLDTDRVQFGPVVALNPATLLPLPEEGAPHDCLEILAETHGTRPDLTDQPIPDADHTWYTDGSSFLQEGQRKAGAAVTTETEVIWAGALPAGTSAQRAELIALTQALKMAEGKRLNVYTDSRYAFATAHIHGEIYRRRGWLTSEGREIKNKSEILALLKALFLPKRLSIIHCLGHQKGDSAEARGNRLADQAAREAAIKTPPDTSTLLIAGKRTADGSEFEKRTADGSEFESPKKKAKVE

SEQ ID NO: 2103 - protein, 2088 aa, synthetic construct
MPAAKRVKLDGGDKKYSIGLDIGTNSVGWAVITDEYKVPSKKFKVLGNTDRHSIKKNLIGALLFDSGETAEATRLKRTARRRYTRRKNRICYLQEIFSNEMAKVDDSFFHRLEESFLVEEDKKHERHPIFGNIVDEVAYHEKYPTIYHLRKKLVDSTDKADLRLIYLALAHMIKFRGHFLIEGDLNPDNSDVDKLFIQLVQTYNQLFEENPINASGVDAKAILSARLSKSRRLENLIAQLPGEKKNGLFGNLIALSLGLTPNFKSNFDLAEDAKLQLSKDTYDDDLDNLLAQIGDQYADLFLAAKNLSDAILLSDILRVNTEITKAPLSASMIKRYDEHHQDLTLLKALVRQQLPEKYKEIFFDQSKNGYAGYIDGGASQEEFYKFIKPILEKMDGTEELLVKLNREDLLRKQRTFDNGSIPHQIHLGELHAILRRQEDFYPFLKDNREKIEKILTFRIPYYVGPLARGNSRFAWMTRKSEETITPWNFEEVVDKGASAQSFIERMTNFDKNLPNEKVLPKHSLLYEYFTVYNELTKVKYVTEGMRKPAFLSGEQKKAIVDLLFKTNRKVTVKQLKEDYFKKIECFDSVEISGVEDRFNASLGTYHDLLKIIKDKDFLDNEENEDILEDIVLTLTLFEDREMIEERLKTYAHLFDDKVMKQLKRRRYTGWGRLSRKLINGIRDKQSGKTILDFLKSDGFANRNFMQLIHDDSLTFKEDIQKAQVSGQGDSLHEHIANLAGSPAIKKGILQTVKVVDELVKVMGRHKPENIVIEMARENQTTQKGQKNSRERMKRIEEGIKELGSQILKEHPVENTQLQNEKLYLYYLQNGRDMYVDQELDINRLSDYDVDHIVPQSFLKDDSIDNKVLTRSDKARGKSDNVPSEEVVKKMKNYWRQLLNAKLITQRKFDNLTKAERGGLSELDKAGFIKRQLVETRQITKHVAQILDSRMNTKYDENDKLIREVKVITLKSKLVSDFRKDFQFYKVREINNYHHAHDAYLNAVVGTALIKKYPKLESEFVYGDYKVYDVRKMIAKSEQEIGKATAKYFFYSNIMNFFKTEITLANGEIRKRPLIETNGETGEIVWDKGRDFATVRKVLSMPQVNIVKKTEVQTGGFSKESILPKRNSDKLIARKKDWDPKKYGGFDSPTVAYSVLVVAKVEKGKSKKLKSVKELLGITIMERSSFEKNPIDFLEAKGYKEVKKDLIIKLPKYSLFELENGRKRMLASAGELQKGNELALPSKYVNFLYLASHYEKLKGSPEDNEQKQLFVEQHKHYLDEIIEQISEFSKRVILADANLDKVLSAYNKHRDKPIREQAENIIHLFTLTNLGAPAAFKYFDTTIDRKRYTSTKEVLDATLIHQSITGLYETRIDLSQLGGDGGPAPGGLGIEDEYRLHETSTEPDVSLGSTWLSDFPQAWAETGGMGLAVRQAPLIIPLKATSTPVSIQQYPMSHEARLGIKPHIQRLLDQGILVPCQSPWNTPLLPVKKPGTNDYRPVQDLREVNKRVEDIHPTVPNPYNLLSGLPPSHQWYTVLDLKDAFFCLRLHPTSQPLFAFEWRDPGMGISGQLTWTRLPQGFKNSPTLFNEALHRDLADFRIQHPDLILLQYVDDILLAATSELDCQQGTRALLQTLGDLGYRASAKKAQICQKQVKYLGYLLREGQRWLTEARKETVMGQPVPKTPRQLREFLGKAGFCRLFIPGFAEMAAPLYPLTKPGTLFSWGPDQQKAYQEIKQALLTAPALGLPDLTKPFELFVDEKQGYAKGVLTQKLGPWRRPVAYLSKKLDPVAAGWPPCLRMVAAIAVLTKDAGKLTMGQPLVILAPHAVEALVKQPPDRWLSNARMTHYQAMLLDTDRVQFGPVVALNPATLLPLPEEGAPHDCLEILAETHGTRPDLTDQPIPDADHTWYTDGSSFLQEGQRKAGAAVTTETEVIWAGALPAGTSAQRAELIALTQALKMAEGKRLNVYTDSRYAFATAHIHGEIYRRRGWLTSEGREIKNKSEILALLKALFLPKRLSIIHCLGHQKGDSAEARGNRLADQAAREAAIKTPPDTSTLLIAGKRTADGSEFEKRTADGSEFESPKKKAKVE

SEQ ID NO: 2104 - protein, 2093 aa, synthetic construct
MPAAKRVKLDGGDKKYSIGLDIGTNSVGWAVITDEYKVPSKKFKVLGNTDRHSIKKNLIGALLFDSGETAEATRLKRTARRRYTRRKNRICYLQEIFSNEMAKVDDSFFHRLEESFLVEEDKKHERHPIFGNIVDEVAYHEKYPTIYHLRKKLVDSTDKADLRLIYLALAHMIKFRGHFLIEGDLNPDNSDVDKLFIQLVQTYNQLFEENPINASGVDAKAILSARLSKSRRLENLIAQLPGEKKNGLFGNLIALSLGLTPNFKSNFDLAEDAKLQLSKDTYDDDLDNLLAQIGDQYADLFLAAKNLSDAILLSDILRVNTEITKAPLSASMIKRYDEHHQDLTLLKALVRQQLPEKYKEIFFDQSKNGYAGYIDGGASQEEFYKFIKPILEKMDGTEELLVKLNREDLLRKQRTFDNGSIPHQIHLGELHAILRRQEDFYPFLKDNREKIEKILTFRIPYYVGPLARGNSRFAWMTRKSEETITPWNFEEVVDKGASAQSFIERMTNFDKNLPNEKVLPKHSLLYEYFTVYNELTKVKYVTEGMRKPAFLSGEQKKAIVDLLFKTNRKVTVKQLKEDYFKKIECFDSVEISGVEDRFNASLGTYHDLLKIIKDKDFLDNEENEDILEDIVLTLTLFEDREMIEERLKTYAHLFDDKVMKQLKRRRYTGWGRLSRKLINGIRDKQSGKTILDFLKSDGFANRNFMQLIHDDSLTFKEDIQKAQVSGQGDSLHEHIANLAGSPAIKKGILQTVKVVDELVKVMGRHKPENIVIEMARENQTTQKGQKNSRERMKRIEEGIKELGSQILKEHPVENTQLQNEKLYLYYLQNGRDMYVDQELDINRLSDYDVDHIVPQSFLKDDSIDNKVLTRSDKARGKSDNVPSEEVVKKMKNYWRQLLNAKLITQRKFDNLTKAERGGLSELDKAGFIKRQLVETRQITKHVAQILDSRMNTKYDENDKLIREVKVITLKSKLVSDFRKDFQFYKVREINNYHHAHDAYLNAVVGTALIKKYPKLESEFVYGDYKVYDVRKMIAKSEQEIGKATAKYFFYSNIMNFFKTEITLANGEIRKRPLIETNGETGEIVWDKGRDFATVRKVLSMPQVNIVKKTEVQTGGFSKESILPKRNSDKLIARKKDWDPKKYGGFDSPTVAYSVLVVAKVEKGKSKKLKSVKELLGITIMERSSFEKNPIDFLEAKGYKEVKKDLIIKLPKYSLFELENGRKRMLASAGELQKGNELALPSKYVNFLYLASHYEKLKGSPEDNEQKQLFVEQHKHYLDEIIEQISEFSKRVILADANLDKVLSAYNKHRDKPIREQAENIIHLFTLTNLGAPAAFKYFDTTIDRKRYTSTKEVLDATLIHQSITGLYETRIDLSQLGGDGGEAAAKGGSGGLGIEDEYRLHETSTEPDVSLGSTWLSDFPQAWAETGGMGLAVRQAPLIIPLKATSTPVSIQQYPMSHEARLGIKPHIQRLLDQGILVPCQSPWNTPLLPVKKPGTNDYRPVQDLREVNKRVEDIHPTVPNPYNLLSGLPPSHQWYTVLDLKDAFFCLRLHPTSQPLFAFEWRDPGMGISGQLTWTRLPQGFKNSPTLFNEALHRDLADFRIQHPDLILLQYVDDILLAATSELDCQQGTRALLQTLGDLGYRASAKKAQICQKQVKYLGYLLREGQRWLTEARKETVMGQPVPKTPRQLREFLGKAGFCRLFIPGFAEMAAPLYPLTKPGTLFSWGPDQQKAYQEIKQALLTAPALGLPDLTKPFELFVDEKQGYAKGVLTQKLGPWRRPVAYLSKKLDPVAAGWPPCLRMVAAIAVLTKDAGKLTMGQPLVILAPHAVEALVKQPPDRWLSNARMTHYQAMLLDTDRVQFGPVVALNPATLLPLPEEGAPHDCLEILAETHGTRPDLTDQPIPDADHTWYTDGSSFLQEGQRKAGAAVTTETEVIWAGALPAGTSAQRAELIALTQALKMAEGKRLNVYTDSRYAFATAHIHGEIYRRRGWLTSEGREIKNKSEILALLKALFLPKRLSIIHCLGHQKGDSAEARGNRLADQAAREAAIKTPPDTSTLLIAGKRTADGSEFEKRTADGSEFESPKKKAKVE

SEQ ID NO: 2105 - protein, 2093 aa, synthetic construct
MPAAKRVKLDGGDKKYSIGLDIGTNSVGWAVITDEYKVPSKKFKVLGNTDRHSIKKNLIGALLFDSGETAEATRLKRTARRRYTRRKNRICYLQEIFSNEMAKVDDSFFHRLEESFLVEEDKKHERHPIFGNIVDEVAYHEKYPTIYHLRKKLVDSTDKADLRLIYLALAHMIKFRGHFLIEGDLNPDNSDVDKLFIQLVQTYNQLFEENPINASGVDAKAILSARLSKSRRLENLIAQLPGEKKNGLFGNLIALSLGLTPNFKSNFDLAEDAKLQLSKDTYDDDLDNLLAQIGDQYADLFLAAKNLSDAILLSDILRVNTEITKAPLSASMIKRYDEHHQDLTLLKALVRQQLPEKYKEIFFDQSKNGYAGYIDGGASQEEFYKFIKPILEKMDGTEELLVKLNREDLLRKQRTFDNGSIPHQIHLGELHAILRRQEDFYPFLKDNREKIEKILTFRIPYYVGPLARGNSRFAWMTRKSEETITPWNFEEVVDKGASAQSFIERMTNFDKNLPNEKVLPKHSLLYEYFTVYNELTKVKYVTEGMRKPAFLSGEQKKAIVDLLFKTNRKVTVKQLKEDYFKKIECFDSVEISGVEDRFNASLGTYHDLLKIIKDKDFLDNEENEDILEDIVLTLTLFEDREMIEERLKTYAHLFDDKVMKQLKRRRYTGWGRLSRKLINGIRDKQSGKTILDFLKSDGFANRNFMQLIHDDSLTFKEDIQKAQVSGQGDSLHEHIANLAGSPAIKKGILQTVKVVDELVKVMGRHKPENIVIEMARENQTTQKGQKNSRERMKRIEEGIKELGSQILKEHPVENTQLQNEKLYLYYLQNGRDMYVDQELDINRLSDYDVDHIVPQSFLKDDSIDNKVLTRSDKARGKSDNVPSEEVVKKMKNYWRQLLNAKLITQRKFDNLTKAERGGLSELDKAGFIKRQLVETRQITKHVAQILDSRMNTKYDENDKLIREVKVITLKSKLVSDFRKDFQFYKVREINNYHHAHDAYLNAVVGTALIKKYPKLESEFVYGDYKVYDVRKMIAKSEQEIGKATAKYFFYSNIMNFFKTEITLANGEIRKRPLIETNGETGEIVWDKGRDFATVRKVLSMPQVNIVKKTEVQTGGFSKESILPKRNSDKLIARKKDWDPKKYGGFDSPTVAYSVLVVAKVEKGKSKKLKSVKELLGITIMERSSFEKNPIDFLEAKGYKEVKKDLIIKLPKYSLFELENGRKRMLASAGELQKGNELALPSKYVNFLYLASHYEKLKGSPEDNEQKQLFVEQHKHYLDEIIEQISEFSKRVILADANLDKVLSAYNKHRDKPIREQAENIIHLFTLTNLGAPAAFKYFDTTIDRKRYTSTKEVLDATLIHQSITGLYETRIDLSQLGGDGGGGSEAAAKGGLGIEDEYRLHETSTEPDVSLGSTWLSDFPQAWAETGGMGLAVRQAPLIIPLKATSTPVSIQQYPMSHEARLGIKPHIQRLLDQGILVPCQSPWNTPLLPVKKPGTNDYRPVQDLREVNKRVEDIHPTVPNPYNLLSGLPPSHQWYTVLDLKDAFFCLRLHPTSQPLFAFEWRDPGMGISGQLTWTRLPQGFKNSPTLFNEALHRDLADFRIQHPDLILLQYVDDILLAATSELDCQQGTRALLQTLGDLGYRASAKKAQICQKQVKYLGYLLREGQRWLTEARKETVMGQPVPKTPRQLREFLGKAGFCRLFIPGFAEMAAPLYPLTKPGTLFSWGPDQQKAYQEIKQALLTAPALGLPDLTKPFELFVDEKQGYAKGVLTQKLGPWRRPVAYLSKKLDPVAAGWPPCLRMVAAIAVLTKDAGKLTMGQPLVILAPHAVEALVKQPPDRWLSNARMTHYQAMLLDTDRVQFGPVVALNPATLLPLPEEGAPHDCLEILAETHGTRPDLTDQPIPDADHTWYTDGSSFLQEGQRKAGAAVTTETEVIWAGALPAGTSAQRAELIALTQALKMAEGKRLNVYTDSRYAFATAHIHGEIYRRRGWLTSEGREIKNKSEILALLKALFLPKRLSIIHCLGHQKGDSAEARGNRLADQAAREAAIKTPPDTSTLLIAGKRTADGSEFEKRTADGSEFESPKKKAKVE

SEQ ID NO: 2106 - protein, 2100 aa, synthetic construct
MPAAKRVKLDGGDKKYSIGLDIGTNSVGWAVITDEYKVPSKKFKVLGNTDRHSIKKNLIGALLFDSGETAEATRLKRTARRRYTRRKNRICYLQEIFSNEMAKVDDSFFHRLEESFLVEEDKKHERHPIFGNIVDEVAYHEKYPTIYHLRKKLVDSTDKADLRLIYLALAHMIKFRGHFLIEGDLNPDNSDVDKLFIQLVQTYNQLFEENPINASGVDAKAILSARLSKSRRLENLIAQLPGEKKNGLFGNLIALSLGLTPNFKSNFDLAEDAKLQLSKDTYDDDLDNLLAQIGDQYADLFLAAKNLSDAILLSDILRVNTEITKAPLSASMIKRYDEHHQDLTLLKALVRQQLPEKYKEIFFDQSKNGYAGYIDGGASQEEFYKFIKPILEKMDGTEELLVKLNREDLLRKQRTFDNGSIPHQIHLGELHAILRRQEDFYPFLKDNREKIEKILTFRIPYYVGPLARGNSRFAWMTRKSEETITPWNFEEVVDKGASAQSFIERMTNFDKNLPNEKVLPKHSLLYEYFTVYNELTKVKYVTEGMRKPAFLSGEQKKAIVDLLFKTNRKVTVKQLKEDYFKKIECFDSVEISGVEDRFNASLGTYHDLLKIIKDKDFLDNEENEDILEDIVLTLTLFEDREMIEERLKTYAHLFDDKVMKQLKRRRYTGWGRLSRKLINGIRDKQSGKTILDFLKSDGFANRNFMQLIHDDSLTFKEDIQKAQVSGQGDSLHEHIANLAGSPAIKKGILQTVKVVDELVKVMGRHKPENIVIEMARENQTTQKGQKNSRERMKRIEEGIKELGSQILKEHPVENTQLQNEKLYLYYLQNGRDMYVDQELDINRLSDYDVDHIVPQSFLKDDSIDNKVLTRSDKARGKSDNVPSEEVVKKMKNYWRQLLNAKLITQRKFDNLTKAERGGLSELDKAGFIKRQLVETRQITKHVAQILDSRMNTKYDENDKLIREVKVITLKSKLVSDFRKDFQFYKVREINNYHHAHDAYLNAVVGTALIKKYPKLESEFVYGDYKVYDVRKMIAKSEQEIGKATAKYFFYSNIMNFFKTEITLANGEIRKRPLIETNGETGEIVWDKGRDFATVRKVLSMPQVNIVKKTEVQTGGFSKESILPKRNSDKLIARKKDWDPKKYGGFDSPTVAYSVLVVAKVEKGKSKKLKSVKELLGITIMERSSFEKNPIDFLEAKGYKEVKKDLIIKLPKYSLFELENGRKRMLASAGELQKGNELALPSKYVNFLYLASHYEKLKGSPEDNEQKQLFVEQHKHYLDEIIEQISEFSKRVILADANLDKVLSAYNKHRDKPIREQAENIIHLFTLTNLGAPAAFKYFDTTIDRKRYTSTKEVLDATLIHQSITGLYETRIDLSQLGGDGGGGGGSEAAAKGGGGSGGLGIEDEYRLHETSTEPDVSLGSTWLSDFPQAWAETGGMGLAVRQAPLIIPLKATSTPVSIQQYPMSHEARLGIKPHIQRLLDQGILVPCQSPWNTPLLPVKKPGTNDYRPVQDLREVNKRVEDIHPTVPNPYNLLSGLPPSHQWYTVLDLKDAFFCLRLHPTSQPLFAFEWRDPGMGISGQLTWTRLPQGFKNSPTLFNEALHRDLADFRIQHPDLILLQYVDDILLAATSELDCQQGTRALLQTLGDLGYRASAKKAQICQKQVKYLGYLLREGQRWLTEARKETVMGQPVPKTPRQLREFLGKAGFCRLFIPGFAEMAAPLYPLTKPGTLFSWGPDQQKAYQEIKQALLTAPALGLPDLTKPFELFVDEKQGYAKGVLTQKLGPWRRPVAYLSKKLDPVAAGWPPCLRMVAAIAVLTKDAGKLTMGQPLVILAPHAVEALVKQPPDRWLSNARMTHYQAMLLDTDRVQFGPVVALNPATLLPLPEEGAPHDCLEILAETHGTRPDLTDQPIPDADHTWYTDGSSFLQEGQRKAGAAVTTETEVIWAGALPAGTSAQRAELIALTQALKMAEGKRLNVYTDSRYAFATAHIHGEIYRRRGWLTSEGREIKNKSEILALLKALFLPKRLSIIHCLGHQKGDSAEARGNRLADQAAREAAIKTPPDTSTLLIAGKRTADGSEFEKRTADGSEFESPKKKAKVE

SEQ ID NO: 2107 - protein, 2094 aa, synthetic construct
MPAAKRVKLDGGDKKYSIGLDIGTNSVGWAVITDEYKVPSKKFKVLGNTDRHSIKKNLIGALLFDSGETAEATRLKRTARRRYTRRKNRICYLQEIFSNEMAKVDDSFFHRLEESFLVEEDKKHERHPIFGNIVDEVAYHEKYPTIYHLRKKLVDSTDKADLRLIYLALAHMIKFRGHFLIEGDLNPDNSDVDKLFIQLVQTYNQLFEENPINASGVDAKAILSARLSKSRRLENLIAQLPGEKKNGLFGNLIALSLGLTPNFKSNFDLAEDAKLQLSKDTYDDDLDNLLAQIGDQYADLFLAAKNLSDAILLSDILRVNTEITKAPLSASMIKRYDEHHQDLTLLKALVRQQLPEKYKEIFFDQSKNGYAGYIDGGASQEEFYKFIKPILEKMDGTEELLVKLNREDLLRKQRTFDNGSIPHQIHLGELHAILRRQEDFYPFLKDNREKIEKILTFRIPYYVGPLARGNSRFAWMTRKSEETITPWNFEEVVDKGASAQSFIERMTNFDKNLPNEKVLPKHSLLYEYFTVYNELTKVKYVTEGMRKPAFLSGEQKKAIVDLLFKTNRKVTVKQLKEDYFKKIECFDSVEISGVEDRFNASLGTYHDLLKIIKDKDFLDNEENEDILEDIVLTLTLFEDREMIEERLKTYAHLFDDKVMKQLKRRRYTGWGRLSRKLINGIRDKQSGKTILDFLKSDGFANRNFMQLIHDDSLTFKEDIQKAQVSGQGDSLHEHIANLAGSPAIKKGILQTVKVVDELVKVMGRHKPENIVIEMARENQTTQKGQKNSRERMKRIEEGIKELGSQILKEHPVENTQLQNEKLYLYYLQNGRDMYVDQELDINRLSDYDVDHIVPQSFLKDDSIDNKVLTRSDKARGKSDNVPSEEVVKKMKNYWRQLLNAKLITQRKFDNLTKAERGGLSELDKAGFIKRQLVETRQITKHVAQILDSRMNTKYDENDKLIREVKVITLKSKLVSDFRKDFQFYKVREINNYHHAHDAYLNAVVGTALIKKYPKLESEFVYGDYKVYDVRKMIAKSEQEIGKATAKYFFYSNIMNFFKTEITLANGEIRKRPLIETNGETGEIVWDKGRDFATVRKVLSMPQVNIVKKTEVQTGGFSKESILPKRNSDKLIARKKDWDPKKYGGFDSPTVAYSVLVVAKVEKGKSKKLKSVKELLGITIMERSSFEKNPIDFLEAKGYKEVKKDLIIKLPKYSLFELENGRKRMLASAGELQKGNELALPSKYVNFLYLASHYEKLKGSPEDNEQKQLFVEQHKHYLDEIIEQISEFSKRVILADANLDKVLSAYNKHRDKPIREQAENIIHLFTLTNLGAPAAFKYFDTTIDRKRYTSTKEVLDATLIHQSITGLYETRIDLSQLGGDGGGGGGSSGGSGGLGIEDEYRLHETSTEPDVSLGSTWLSDFPQAWAETGGMGLAVRQAPLIIPLKATSTPVSIQQYPMSHEARLGIKPHIQRLLDQGILVPCQSPWNTPLLPVKKPGTNDYRPVQDLREVNKRVEDIHPTVPNPYNLLSGLPPSHQWYTVLDLKDAFFCLRLHPTSQPLFAFEWRDPGMGISGQLTWTRLPQGFKNSPTLFNEALHRDLADFRIQHPDLILLQYVDDILLAATSELDCQQGTRALLQTLGDLGYRASAKKAQICQKQVKYLGYLLREGQRWLTEARKETVMGQPVPKTPRQLREFLGKAGFCRLFIPGFAEMAAPLYPLTKPGTLFSWGPDQQKAYQEIKQALLTAPALGLPDLTKPFELFVDEKQGYAKGVLTQKLGPWRRPVAYLSKKLDPVAAGWPPCLRMVAAIAVLTKDAGKLTMGQPLVILAPHAVEALVKQPPDRWLSNARMTHYQAMLLDTDRVQFGPVVALNPATLLPLPEEGAPHDCLEILAETHGTRPDLTDQPIPDADHTWYTDGSSFLQEGQRKAGAAVTTETEVIWAGALPAGTSAQRAELIALTQALKMAEGKRLNVYTDSRYAFATAHIHGEIYRRRGWLTSEGREIKNKSEILALLKALFLPKRLSIIHCLGHQKGDSAEARGNRLADQAAREAAIKTPPDTSTLLIAGKRTADGSEFEKRTADGSEFESPKKKAKVE

SEQ ID NO: 2108 - protein, 2096 aa, synthetic construct
MPAAKRVKLDGGDKKYSIGLDIGTNSVGWAVITDEYKVPSKKFKVLGNTDRHSIKKNLIGALLFDSGETAEATRLKRTARRRYTRRKNRICYLQEIFSNEMAKVDDSFFHRLEESFLVEEDKKHERHPIFGNIVDEVAYHEKYPTIYHLRKKLVDSTDKADLRLIYLALAHMIKFRGHFLIEGDLNPDNSDVDKLFIQLVQTYNQLFEENPINASGVDAKAILSARLSKSRRLENLIAQLPGEKKNGLFGNLIALSLGLTPNFKSNFDLAEDAKLQLSKDTYDDDLDNLLAQIGDQYADLFLAAKNLSDAILLSDILRVNTEITKAPLSASMIKRYDEHHQDLTLLKALVRQQLPEKYKEIFFDQSKNGYAGYIDGGASQEEFYKFIKPILEKMDGTEELLVKLNREDLLRKQRTFDNGSIPHQIHLGELHAILRRQEDFYPFLKDNREKIEKILTFRIPYYVGPLARGNSRFAWMTRKSEETITPWNFEEVVDKGASAQSFIERMTNFDKNLPNEKVLPKHSLLYEYFTVYNELTKVKYVTEGMRKPAFLSGEQKKAIVDLLFKTNRKVTVKQLKEDYFKKIECFDSVEISGVEDRFNASLGTYHDLLKIIKDKDFLDNEENEDILEDIVLTLTLFEDREMIEERLKTYAHLFDDKVMKQLKRRRYTGWGRLSRKLINGIRDKQSGKTILDFLKSDGFANRNFMQLIHDDSLTFKEDIQKAQVSGQGDSLHEHIANLAGSPAIKKGILQTVKVVDELVKVMGRHKPENIVIEMARENQTTQKGQKNSRERMKRIEEGIKELGSQILKEHPVENTQLQNEKLYLYYLQNGRDMYVDQELDINRLSDYDVDHIVPQSFLKDDSIDNKVLTRSDKARGKSDNVPSEEVVKKMKNYWRQLLNAKLITQRKFDNLTKAERGGLSELDKAGFIKRQLVETRQITKHVAQILDSRMNTKYDENDKLIREVKVITLKSKLVSDFRKDFQFYKVREINNYHHAHDAYLNAVVGTALIKKYPKLESEFVYGDYKVYDVRKMIAKSEQEIGKATAKYFFYSNIMNFFKTEITLANGEIRKRPLIETNGETGEIVWDKGRDFATVRKVLSMPQVNIVKKTEVQTGGFSKESILPKRNSDKLIARKKDWDPKKYGGFDSPTVAYSVLVVAKVEKGKSKKLKSVKELLGITIMERSSFEKNPIDFLEAKGYKEVKKDLIIKLPKYSLFELENGRKRMLASAGELQKGNELALPSKYVNFLYLASHYEKLKGSPEDNEQKQLFVEQHKHYLDEIIEQISEFSKRVILADANLDKVLSAYNKHRDKPIREQAENIIHLFTLTNLGAPAAFKYFDTTIDRKRYTSTKEVLDATLIHQSITGLYETRIDLSQLGGDGGGSSGGGEAAAKGGLGIEDEYRLHETSTEPDVSLGSTWLSDFPQAWAETGGMGLAVRQAPLIIPLKATSTPVSIQQYPMSHEARLGIKPHIQRLLDQGILVPCQSPWNTPLLPVKKPGTNDYRPVQDLREVNKRVEDIHPTVPNPYNLLSGLPPSHQWYTVLDLKDAFFCLRLHPTSQPLFAFEWRDPGMGISGQLTWTRLPQGFKNSPTLFNEALHRDLADFRIQHPDLILLQYVDDILLAATSELDCQQGTRALLQTLGDLGYRASAKKAQICQKQVKYLGYLLREGQRWLTEARKETVMGQPVPKTPRQLREFLGKAGFCRLFIPGFAEMAAPLYPLTKPGTLFSWGPDQQKAYQEIKQALLTAPALGLPDLTKPFELFVDEKQGYAKGVLTQKLGPWRRPVAYLSKKLDPVAAGWPPCLRMVAAIAVLTKDAGKLTMGQPLVILAPHAVEALVKQPPDRWLSNARMTHYQAMLLDTDRVQFGPVVALNPATLLPLPEEGAPHDCLEILAETHGTRPDLTDQPIPDADHTWYTDGSSFLQEGQRKAGAAVTTETEVIWAGALPAGTSAQRAELIALTQALKMAEGKRLNVYTDSRYAFATAHIHGEIYRRRGWLTSEGREIKNKSEILALLKALFLPKRLSIIHCLGHQKGDSAEARGNRLADQAAREAAIKTPPDTSTLLIAGKRTADGSEFEKRTADGSEFESPKKKAKVE

SEQ ID NO: 2109 - protein, 2096 aa, synthetic construct
MPAAKRVKLDGGDKKYSIGLDIGTNSVGWAVITDEYKVPSKKFKVLGNTDRHSIKKNLIGALLFDSGETAEATRLKRTARRRYTRRKNRICYLQEIFSNEMAKVDDSFFHRLEESFLVEEDKKHERHPIFGNIVDEVAYHEKYPTIYHLRKKLVDSTDKADLRLIYLALAHMIKFRGHFLIEGDLNPDNSDVDKLFIQLVQTYNQLFEENPINASGVDAKAILSARLSKSRRLENLIAQLPGEKKNGLFGNLIALSLGLTPNFKSNFDLAEDAKLQLSKDTYDDDLDNLLAQIGDQYADLFLAAKNLSDAILLSDILRVNTEITKAPLSASMIKRYDEHHQDLTLLKALVRQQLPEKYKEIFFDQSKNGYAGYIDGGASQEEFYKFIKPILEKMDGTEELLVKLNREDLLRKQRTFDNGSIPHQIHLGELHAILRRQEDFYPFLKDNREKIEKILTFRIPYYVGPLARGNSRFAWMTRKSEETITPWNFEEVVDKGASAQSFIERMTNFDKNLPNEKVLPKHSLLYEYFTVYNELTKVKYVTEGMRKPAFLSGEQKKAIVDLLFKTNRKVTVKQLKEDYFKKIECFDSVEISGVEDRFNASLGTYHDLLKIIKDKDFLDNEENEDILEDIVLTLTLFEDREMIEERLKTYAHLFDDKVMKQLKRRRYTGWGRLSRKLINGIRDKQSGKTILDFLKSDGFANRNFMQLIHDDSLTFKEDIQKAQVSGQGDSLHEHIANLAGSPAIKKGILQTVKVVDELVKVMGRHKPENIVIEMARENQTTQKGQKNSRERMKRIEEGIKELGSQILKEHPVENTQLQNEKLYLYYLQNGRDMYVDQELDINRLSDYDVDHIVPQSFLKDDSIDNKVLTRSDKARGKSDNVPSEEVVKKMKNYWRQLLNAKLITQRKFDNLTKAERGGLSELDKAGFIKRQLVETRQITKHVAQILDSRMNTKYDENDKLIREVKVITLKSKLVSDFRKDFQFYKVREINNYHHAHDAYLNAVVGTALIKKYPKLESEFVYGDYKVYDVRKMIAKSEQEIGKATAKYFFYSNIMNFFKTEITLANGEIRKRPLIETNGETGEIVWDKGRDFATVRKVLSMPQVNIVKKTEVQTGGFSKESILPKRNSDKLIARKKDWDPKKYGGFDSPTVAYSVLVVAKVEKGKSKKLKSVKELLGITIMERSSFEKNPIDFLEAKGYKEVKKDLIIKLPKYSLFELENGRKRMLASAGELQKGNELALPSKYVNFLYLASHYEKLKGSPEDNEQKQLFVEQHKHYLDEIIEQISEFSKRVILADANLDKVLSAYNKHRDKPIREQAENIIHLFTLTNLGAPAAFKYFDTTIDRKRYTSTKEVLDATLIHQSITGLYETRIDLSQLGGDGGGSSEAAAKPAPGGLGIEDEYRLHETSTEPDVSLGSTWLSDFPQAWAETGGMGLAVRQAPLIIPLKATSTPVSIQQYPMSHEARLGIKPHIQRLLDQGILVPCQSPWNTPLLPVKKPGTNDYRPVQDLREVNKRVEDIHPTVPNPYNLLSGLPPSHQWYTVLDLKDAFFCLRLHPTSQPLFAFEWRDPGMGISGQLTWTRLPQGFKNSPTLFNEALHRDLADFRIQHPDLILLQYVDDILLAATSELDCQQGTRALLQTLGDLGYRASAKKAQICQKQVKYLGYLLREGQRWLTEARKETVMGQPVPKTPRQLREFLGKAGFCRLFIPGFAEMAAPLYPLTKPGTLFSWGPDQQKAYQEIKQALLTAPALGLPDLTKPFELFVDEKQGYAKGVLTQKLGPWRRPVAYLSKKLDPVAAGWPPCLRMVAAIAVLTKDAGKLTMGQPLVILAPHAVEALVKQPPDRWLSNARMTHYQAMLLDTDRVQFGPVVALNPATLLPLPEEGAPHDCLEILAETHGTRPDLTDQPIPDADHTWYTDGSSFLQEGQRKAGAAVTTETEVIWAGALPAGTSAQRAELIALTQALKMAEGKRLNVYTDSRYAFATAHIHGEIYRRRGWLTSEGREIKNKSEILALLKALFLPKRLSIIHCLGHQKGDSAEARGNRLADQAAREAAIKTPPDTSTLLIAGKRTADGSEFEKRTADGSEFESPKKKAKVE

SEQ ID NO: 2110 - protein, 2092 aa, synthetic construct
MPAAKRVKLDGGDKKYSIGLDIGTNSVGWAVITDEYKVPSKKFKVLGNTDRHSIKKNLIGALLFDSGETAEATRLKRTARRRYTRRKNRICYLQEIFSNEMAKVDDSFFHRLEESFLVEEDKKHERHPIFGNIVDEVAYHEKYPTIYHLRKKLVDSTDKADLRLIYLALAHMIKFRGHFLIEGDLNPDNSDVDKLFIQLVQTYNQLFEENPINASGVDAKAILSARLSKSRRLENLIAQLPGEKKNGLFGNLIALSLGLTPNFKSNFDLAEDAKLQLSKDTYDDDLDNLLAQIGDQYADLFLAAKNLSDAILLSDILRVNTEITKAPLSASMIKRYDEHHQDLTLLKALVRQQLPEKYKEIFFDQSKNGYAGYIDGGASQEEFYKFIKPILEKMDGTEELLVKLNREDLLRKQRTFDNGSIPHQIHLGELHAILRRQEDFYPFLKDNREKIEKILTFRIPYYVGPLARGNSRFAWMTRKSEETITPWNFEEVVDKGASAQSFIERMTNFDKNLPNEKVLPKHSLLYEYFTVYNELTKVKYVTEGMRKPAFLSGEQKKAIVDLLFKTNRKVTVKQLKEDYFKKIECFDSVEISGVEDRFNASLGTYHDLLKIIKDKDFLDNEENEDILEDIVLTLTLFEDREMIEERLKTYAHLFDDKVMKQLKRRRYTGWGRLSRKLINGIRDKQSGKTILDFLKSDGFANRNFMQLIHDDSLTFKEDIQKAQVSGQGDSLHEHIANLAGSPAIKKGILQTVKVVDELVKVMGRHKPENIVIEMARENQTTQKGQKNSRERMKRIEEGIKELGSQILKEHPVENTQLQNEKLYLYYLQNGRDMYVDQELDINRLSDYDVDHIVPQSFLKDDSIDNKVLTRSDKARGKSDNVPSEEVVKKMKNYWRQLLNAKLITQRKFDNLTKAERGGLSELDKAGFIKRQLVETRQITKHVAQILDSRMNTKYDENDKLIREVKVITLKSKLVSDFRKDFQFYKVREINNYHHAHDAYLNAVVGTALIKKYPKLESEFVYGDYKVYDVRKMIAKSEQEIGKATAKYFFYSNIMNFFKTEITLANGEIRKRPLIETNGETGEIVWDKGRDFATVRKVLSMPQVNIVKKTEVQTGGFSKESILPKRNSDKLIARKKDWDPKKYGGFDSPTVAYSVLVVAKVEKGKSKKLKSVKELLGITIMERSSFEKNPIDFLEAKGYKEVKKDLIIKLPKYSLFELENGRKRMLASAGELQKGNELALPSKYVNFLYLASHYEKLKGSPEDNEQKQLFVEQHKHYLDEIIEQISEFSKRVILADANLDKVLSAYNKHRDKPIREQAENIIHLFTLTNLGAPAAFKYFDTTIDRKRYTSTKEVLDATLIHQSITGLYETRIDLSQLGGDGGGGGGGGGGGLGIEDEYRLHETSTEPDVSLGSTWLSDFPQAWAETGGMGLAVRQAPLIIPLKATSTPVSIQQYPMSHEARLGIKPHIQRLLDQGILVPCQSPWNTPLLPVKKPGTNDYRPVQDLREVNKRVEDIHPTVPNPYNLLSGLPPSHQWYTVLDLKDAFFCLRLHPTSQPLFAFEWRDPGMGISGQLTWTRLPQGFKNSPTLFNEALHRDLADFRIQHPDLILLQYVDDILLAATSELDCQQGTRALLQTLGDLGYRASAKKAQICQKQVKYLGYLLREGQRWLTEARKETVMGQPVPKTPRQLREFLGKAGFCRLFIPGFAEMAAPLYPLTKPGTLFSWGPDQQKAYQEIKQALLTAPALGLPDLTKPFELFVDEKQGYAKGVLTQKLGPWRRPVAYLSKKLDPVAAGWPPCLRMVAAIAVLTKDAGKLTMGQPLVILAPHAVEALVKQPPDRWLSNARMTHYQAMLLDTDRVQFGPVVALNPATLLPLPEEGAPHDCLEILAETHGTRPDLTDQPIPDADHTWYTDGSSFLQEGQRKAGAAVTTETEVIWAGALPAGTSAQRAELIALTQALKMAEGKRLNVYTDSRYAFATAHIHGEIYRRRGWLTSEGREIKNKSEILALLKALFLPKRLSIIHCLGHQKGDSAEARGNRLADQAAREAAIKTPPDTSTLLIAGKRTADGSEFEKRTADGSEFESPKKKAKVE

SEQ ID NO: 2111 - protein, 2091 aa, synthetic construct
MPAAKRVKLDGGDKKYSIGLDIGTNSVGWAVITDEYKVPSKKFKVLGNTDRHSIKKNLIGALLFDSGETAEATRLKRTARRRYTRRKNRICYLQEIFSNEMAKVDDSFFHRLEESFLVEEDKKHERHPIFGNIVDEVAYHEKYPTIYHLRKKLVDSTDKADLRLIYLALAHMIKFRGHFLIEGDLNPDNSDVDKLFIQLVQTYNQLFEENPINASGVDAKAILSARLSKSRRLENLIAQLPGEKKNGLFGNLIALSLGLTPNFKSNFDLAEDAKLQLSKDTYDDDLDNLLAQIGDQYADLFLAAKNLSDAILLSDILRVNTEITKAPLSASMIKRYDEHHQDLTLLKALVRQQLPEKYKEIFFDQSKNGYAGYIDGGASQEEFYKFIKPILEKMDGTEELLVKLNREDLLRKQRTFDNGSIPHQIHLGELHAILRRQEDFYPFLKDNREKIEKILTFRIPYYVGPLARGNSRFAWMTRKSEETITPWNFEEVVDKGASAQSFIERMTNFDKNLPNEKVLPKHSLLYEYFTVYNELTKVKYVTEGMRKPAFLSGEQKKAIVDLLFKTNRKVTVKQLKEDYFKKIECFDSVEISGVEDRFNASLGTYHDLLKIIKDKDFLDNEENEDILEDIVLTLTLFEDREMIEERLKTYAHLFDDKVMKQLKRRRYTGWGRLSRKLINGIRDKQSGKTILDFLKSDGFANRNFMQLIHDDSLTFKEDIQKAQVSGQGDSLHEHIANLAGSPAIKKGILQTVKVVDELVKVMGRHKPENIVIEMARENQTTQKGQKNSRERMKRIEEGIKELGSQILKEHPVENTQLQNEKLYLYYLQNGRDMYVDQELDINRLSDYDVDHIVPQSFLKDDSIDNKVLTRSDKARGKSDNVPSEEVVKKMKNYWRQLLNAKLITQRKFDNLTKAERGGLSELDKAGFIKRQLVETRQITKHVAQILDSRMNTKYDENDKLIREVKVITLKSKLVSDFRKDFQFYKVREINNYHHAHDAYLNAVVGTALIKKYPKLESEFVYGDYKVYDVRKMIAKSEQEIGKATAKYFFYSNIMNFFKTEITLANGEIRKRPLIETNGETGEIVWDKGRDFATVRKVLSMPQVNIVKKTEVQTGGFSKESILPKRNSDKLIARKKDWDPKKYGGFDSPTVAYSVLVVAKVEKGKSKKLKSVKELLGITIMERSSFEKNPIDFLEAKGYKEVKKDLIIKLPKYSLFELENGRKRMLASAGELQKGNELALPSKYVNFLYLASHYEKLKGSPEDNEQKQLFVEQHKHYLDEIIEQISEFSKRVILADANLDKVLSAYNKHRDKPIREQAENIIHLFTLTNLGAPAAFKYFDTTIDRKRYTSTKEVLDATLIHQSITGLYETRIDLSQLGGDGGGGGGGGGGLGIEDEYRLHETSTEPDVSLGSTWLSDFPQAWAETGGMGLAVRQAPLIIPLKATSTPVSIQQYPMSHEARLGIKPHIQRLLDQGILVPCQSPWNTPLLPVKKPGTNDYRPVQDLREVNKRVEDIHPTVPNPYNLLSGLPPSHQWYTVLDLKDAFFCLRLHPTSQPLFAFEWRDPGMGISGQLTWTRLPQGFKNSPTLFNEALHRDLADFRIQHPDLILLQYVDDILLAATSELDCQQGTRALLQTLGDLGYRASAKKAQICQKQVKYLGYLLREGQRWLTEARKETVMGQPVPKTPRQLREFLGKAGFCRLFIPGFAEMAAPLYPLTKPGTLFSWGPDQQKAYQEIKQALLTAPALGLPDLTKPFELFVDEKQGYAKGVLTQKLGPWRRPVAYLSKKLDPVAAGWPPCLRMVAAIAVLTKDAGKLTMGQPLVILAPHAVEALVKQPPDRWLSNARMTHYQAMLLDTDRVQFGPVVALNPATLLPLPEEGAPHDCLEILAETHGTRPDLTDQPIPDADHTWYTDGSSFLQEGQRKAGAAVTTETEVIWAGALPAGTSAQRAELIALTQALKMAEGKRLNVYTDSRYAFATAHIHGEIYRRRGWLTSEGREIKNKSEILALLKALFLPKRLSIIHCLGHQKGDSAEARGNRLADQAAREAAIKTPPDTSTLLIAGKRTADGSEFEKRTADGSEFESPKKKAKVE

SEQ ID NO: 2112 - protein, 2096 aa, synthetic construct
MPAAKRVKLDGGDKKYSIGLDIGTNSVGWAVITDEYKVPSKKFKVLGNTDRHSIKKNLIGALLFDSGETAEATRLKRTARRRYTRRKNRICYLQEIFSNEMAKVDDSFFHRLEESFLVEEDKKHERHPIFGNIVDEVAYHEKYPTIYHLRKKLVDSTDKADLRLIYLALAHMIKFRGHFLIEGDLNPDNSDVDKLFIQLVQTYNQLFEENPINASGVDAKAILSARLSKSRRLENLIAQLPGEKKNGLFGNLIALSLGLTPNFKSNFDLAEDAKLQLSKDTYDDDLDNLLAQIGDQYADLFLAAKNLSDAILLSDILRVNTEITKAPLSASMIKRYDEHHQDLTLLKALVRQQLPEKYKEIFFDQSKNGYAGYIDGGASQEEFYKFIKPILEKMDGTEELLVKLNREDLLRKQRTFDNGSIPHQIHLGELHAILRRQEDFYPFLKDNREKIEKILTFRIPYYVGPLARGNSRFAWMTRKSEETITPWNFEEVVDKGASAQSFIERMTNFDKNLPNEKVLPKHSLLYEYFTVYNELTKVKYVTEGMRKPAFLSGEQKKAIVDLLFKTNRKVTVKQLKEDYFKKIECFDSVEISGVEDRFNASLGTYHDLLKIIKDKDFLDNEENEDILEDIVLTLTLFEDREMIEERLKTYAHLFDDKVMKQLKRRRYTGWGRLSRKLINGIRDKQSGKTILDFLKSDGFANRNFMQLIHDDSLTFKEDIQKAQVSGQGDSLHEHIANLAGSPAIKKGILQTVKVVDELVKVMGRHKPENIVIEMARENQTTQKGQKNSRERMKRIEEGIKELGSQILKEHPVENTQLQNEKLYLYYLQNGRDMYVDQELDINRLSDYDVDHIVPQSFLKDDSIDNKVLTRSDKARGKSDNVPSEEVVKKMKNYWRQLLNAKLITQRKFDNLTKAERGGLSELDKAGFIKRQLVETRQITKHVAQILDSRMNTKYDENDKLIREVKVITLKSKLVSDFRKDFQFYKVREINNYHHAHDAYLNAVVGTALIKKYPKLESEFVYGDYKVYDVRKMIAKSEQEIGKATAKYFFYSNIMNFFKTEITLANGEIRKRPLIETNGETGEIVWDKGRDFATVRKVLSMPQVNIVKKTEVQTGGFSKESILPKRNSDKLIARKKDWDPKKYGGFDSPTVAYSVLVVAKVEKGKSKKLKSVKELLGITIMERSSFEKNPIDFLEAKGYKEVKKDLIIKLPKYSLFELENGRKRMLASAGELQKGNELALPSKYVNFLYLASHYEKLKGSPEDNEQKQLFVEQHKHYLDEIIEQISEFSKRVILADANLDKVLSAYNKHRDKPIREQAENIIHLFTLTNLGAPAAFKYFDTTIDRKRYTSTKEVLDATLIHQSITGLYETRIDLSQLGGDGGEAAAKGGSPAPGGLGIEDEYRLHETSTEPDVSLGSTWLSDFPQAWAETGGMGLAVRQAPLIIPLKATSTPVSIQQYPMSHEARLGIKPHIQRLLDQGILVPCQSPWNTPLLPVKKPGTNDYRPVQDLREVNKRVEDIHPTVPNPYNLLSGLPPSHQWYTVLDLKDAFFCLRLHPTSQPLFAFEWRDPGMGISGQLTWTRLPQGFKNSPTLFNEALHRDLADFRIQHPDLILLQYVDDILLAATSELDCQQGTRALLQTLGDLGYRASAKKAQICQKQVKYLGYLLREGQRWLTEARKETVMGQPVPKTPRQLREFLGKAGFCRLFIPGFAEMAAPLYPLTKPGTLFSWGPDQQKAYQEIKQALLTAPALGLPDLTKPFELFVDEKQGYAKGVLTQKLGPWRRPVAYLSKKLDPVAAGWPPCLRMVAAIAVLTKDAGKLTMGQPLVILAPHAVEALVKQPPDRWLSNARMTHYQAMLLDTDRVQFGPVVALNPATLLPLPEEGAPHDCLEILAETHGTRPDLTDQPIPDADHTWYTDGSSFLQEGQRKAGAAVTTETEVIWAGALPAGTSAQRAELIALTQALKMAEGKRLNVYTDSRYAFATAHIHGEIYRRRGWLTSEGREIKNKSEILALLKALFLPKRLSIIHCLGHQKGDSAEARGNRLADQAAREAAIKTPPDTSTLLIAGKRTADGSEFEKRTADGSEFESPKKKAKVE

SEQ ID NO: 2113 - protein, 2088 aa, synthetic construct; identical to SEQ ID NO: 2053

SEQ ID NO: 2114 - protein, 2094 aa, synthetic construct; identical to SEQ ID NO: 2060

SEQ ID NO: 2115 - protein, 2093 aa, synthetic construct
MPAAKRVKLDGGDKKYSIGLDIGTNSVGWAVITDEYKVPSKKFKVLGNTDRHSIKKNLIGALLFDSGETAEATRLKRTARRRYTRRKNRICYLQEIFSNEMAKVDDSFFHRLEESFLVEEDKKHERHPIFGNIVDEVAYHEKYPTIYHLRKKLVDSTDKADLRLIYLALAHMIKFRGHFLIEGDLNPDNSDVDKLFIQLVQTYNQLFEENPINASGVDAKAILSARLSKSRRLENLIAQLPGEKKNGLFGNLIALSLGLTPNFKSNFDLAEDAKLQLSKDTYDDDLDNLLAQIGDQYADLFLAAKNLSDAILLSDILRVNTEITKAPLSASMIKRYDEHHQDLTLLKALVRQQLPEKYKEIFFDQSKNGYAGYIDGGASQEEFYKFIKPILEKMDGTEELLVKLNREDLLRKQRTFDNGSIPHQIHLGELHAILRRQEDFYPFLKDNREKIEKILTFRIPYYVGPLARGNSRFAWMTRKSEETITPWNFEEVVDKGASAQSFIERMTNFDKNLPNEKVLPKHSLLYEYFTVYNELTKVKYVTEGMRKPAFLSGEQKKAIVDLLFKTNRKVTVKQLKEDYFKKIECFDSVEISGVEDRFNASLGTYHDLLKIIKDKDFLDNEENEDILEDIVLTLTLFEDREMIEERLKTYAHLFDDKVMKQLKRRRYTGWGRLSRKLINGIRDKQSGKTILDFLKSDGFANRNFMQLIHDDSLTFKEDIQKAQVSGQGDSLHEHIANLAGSPAIKKGILQTVKVVDELVKVMGRHKPENIVIEMARENQTTQKGQKNSRERMKRIEEGIKELGSQILKEHPVENTQLQNEKLYLYYLQNGRDMYVDQELDINRLSDYDVDHIVPQSFLKDDSIDNKVLTRSDKARGKSDNVPSEEVVKKMKNYWRQLLNAKLITQRKFDNLTKAERGGLSELDKAGFIKRQLVETRQITKHVAQILDSRMNTKYDENDKLIREVKVITLKSKLVSDFRKDFQFYKVREINNYHHAHDAYLNAVVGTALIKKYPKLESEFVYGDYKVYDVRKMIAKSEQEIGKATAKYFFYSNIMNFFKTEITLANGEIRKRPLIETNGETGEIVWDKGRDFATVRKVLSMPQVNIVKKTEVQTGGFSKESILPKRNSDKLIARKKDWDPKKYGGFDSPTVAYSVLVVAKVEKGKSKKLKSVKELLGITIMERSSFEKNPIDFLEAKGYKEVKKDLIIKLPKYSLFELENGRKRMLASAGELQKGNELALPSKYVNFLYLASHYEKLKGSPEDNEQKQLFVEQHKHYLDEIIEQISEFSKRVILADANLDKVLSAYNKHRDKPIREQAENIIHLFTLTNLGAPAAFKYFDTTIDRKRYTSTKEVLDATLIHQSITGLYETRIDLSQLGGDGGGSSEAAAKGGLGIEDEYRLHETSTEPDVSLGSTWLSDFPQAWAETGGMGLAVRQAPLIIPLKATSTPVSIQQYPMSHEARLGIKPHIQRLLDQGILVPCQSPWNTPLLPVKKPGTNDYRPVQDLREVNKRVEDIHPTVPNPYNLLSGLPPSHQWYTVLDLKDAFFCLRLHPTSQPLFAFEWRDPGMGISGQLTWTRLPQGFKNSPTLFNEALHRDLADFRIQHPDLILLQYVDDILLAATSELDCQQGTRALLQTLGDLGYRASAKKAQICQKQVKYLGYLLREGQRWLTEARKETVMGQPVPKTPRQLREFLGKAGFCRLFIPGFAEMAAPLYPLTKPGTLFSWGPDQQKAYQEIKQALLTAPALGLPDLTKPFELFVDEKQGYAKGVLTQKLGPWRRPVAYLSKKLDPVAAGWPPCLRMVAAIAVLTKDAGKLTMGQPLVILAPHAVEALVKQPPDRWLSNARMTHYQAMLLDTDRVQFGPVVALNPATLLPLPEEGAPHDCLEILAETHGTRPDLTDQPIPDADHTWYTDGSSFLQEGQRKAGAAVTTETEVIWAGALPAGTSAQRAELIALTQALKMAEGKRLNVYTDSRYAFATAHIHGEIYRRRGWLTSEGREIKNKSEILALLKALFLPKRLSIIHCLGHQKGDSAEARGNRLADQAAREAAIKTPPDTSTLLIAGKRTADGSEFEKRTADGSEFESPKKKAKVE

SEQ ID NO: 2116 - protein, 2100 aa, synthetic construct
MPAAKRVKLDGGDKKYSIGLDIGTNSVGWAVITDEYKVPSKKFKVLGNTDRHSIKKNLIGALLFDSGETAEATRLKRTARRRYTRRKNRICYLQEIFSNEMAKVDDSFFHRLEESFLVEEDKKHERHPIFGNIVDEVAYHEKYPTIYHLRKKLVDSTDKADLRLIYLALAHMIKFRGHFLIEGDLNPDNSDVDKLFIQLVQTYNQLFEENPINASGVDAKAILSARLSKSRRLENLIAQLPGEKKNGLFGNLIALSLGLTPNFKSNFDLAEDAKLQLSKDTYDDDLDNLLAQIGDQYADLFLAAKNLSDAILLSDILRVNTEITKAPLSASMIKRYDEHHQDLTLLKALVRQQLPEKYKEIFFDQSKNGYAGYIDGGASQEEFYKFIKPILEKMDGTEELLVKLNREDLLRKQRTFDNGSIPHQIHLGELHAILRRQEDFYPFLKDNREKIEKILTFRIPYYVGPLARGNSRFAWMTRKSEETITPWNFEEVVDKGASAQSFIERMTNFDKNLPNEKVLPKHSLLYEYFTVYNELTKVKYVTEGMRKPAFLSGEQKKAIVDLLFKTNRKVTVKQLKEDYFKKIECFDSVEISGVEDRFNASLGTYHDLLKIIKDKDFLDNEENEDILEDIVLTLTLFEDREMIEERLKTYAHLFDDKVMKQLKRRRYTGWGRLSRKLINGIRDKQSGKTILDFLKSDGFANRNFMQLIHDDSLTFKEDIQKAQVSGQGDSLHEHIANLAGSPAIKKGILQTVKVVDELVKVMGRHKPENIVIEMARENQTTQKGQKNSRERMKRIEEGIKELGSQILKEHPVENTQLQNEKLYLYYLQNGRDMYVDQELDINRLSDYDVDHIVPQSFLKDDSIDNKVLTRSDKARGKSDNVPSEEVVKKMKNYWRQLLNAKLITQRKFDNLTKAERGGLSELDKAGFIKRQLVETRQITKHVAQILDSRMNTKYDENDKLIREVKVITLKSKLVSDFRKDFQFYKVREINNYHHAHDAYLNAVVGTALIKKYPKLESEFVYGDYKVYDVRKMIAKSEQEIGKATAKYFFYSNIMNFFKTEITLANGEIRKRPLIETNGETGEIVWDKGRDFATVRKVLSMPQVNIVKKTEVQTGGFSKESILPKRNSDKLIARKKDWDPKKYGGFDSPTVAYSVLVVAKVEKGKSKKLKSVKELLGITIMERSSFEKNPIDFLEAKGYKEVKKDLIIKLPKYSLFELENGRKRMLASAGELQKGNELALPSKYVNFLYLASHYEKLKGSPEDNEQKQLFVEQHKHYLDEIIEQISEFSKRVILADANLDKVLSAYNKHRDKPIREQAENIIHLFTLTNLGAPAAFKYFDTTIDRKRYTSTKEVLDATLIHQSITGLYETRIDLSQLGGDGGGGGGSGGGGSGGGGSGGLGIEDEYRLHETSTEPDVSLGSTWLSDFPQAWAETGGMGLAVRQAPLIIPLKATSTPVSIQQYPMSHEARLGIKPHIQRLLDQGILVPCQSPWNTPLLPVKKPGTNDYRPVQDLREVNKRVEDIHPTVPNPYNLLSGLPPSHQWYTVLDLKDAFFCLRLHPTSQPLFAFEWRDPGMGISGQLTWTRLPQGFKNSPTLFNEALHRDLADFRIQHPDLILLQYVDDILLAATSELDCQQGTRALLQTLGDLGYRASAKKAQICQKQVKYLGYLLREGQRWLTEARKETVMGQPVPKTPRQLREFLGKAGFCRLFIPGFAEMAAPLYPLTKPGTLFSWGPDQQKAYQEIKQALLTAPALGLPDLTKPFELFVDEKQGYAKGVLTQKLGPWRRPVAYLSKKLDPVAAGWPPCLRMVAAIAVLTKDAGKLTMGQPLVILAPHAVEALVKQPPDRWLSNARMTHYQAMLLDTDRVQFGPVVALNPATLLPLPEEGAPHDCLEILAETHGTRPDLTDQPIPDADHTWYTDGSSFLQEGQRKAGAAVTTETEVIWAGALPAGTSAQRAELIALTQALKMAEGKRLNVYTDSRYAFATAHIHGEIYRRRGWLTSEGREIKNKSEILALLKALFLPKRLSIIHCLGHQKGDSAEARGNRLADQAAREAAIKTPPDTSTLLIAGKRTADGSEFEKRTADGSEFESPKKKAKVE

SEQ ID NO: 2117 - protein, 2096 aa, synthetic construct
MPAAKRVKLDGGDKKYSIGLDIGTNSVGWAVITDEYKVPSKKFKVLGNTDRHSIKKNLIGALLFDSGETAEATRLKRTARRRYTRRKNRICYLQEIFSNEMAKVDDSFFHRLEESFLVEEDKKHERHPIFGNIVDEVAYHEKYPTIYHLRKKLVDSTDKADLRLIYLALAHMIKFRGHFLIEGDLNPDNSDVDKLFIQLVQTYNQLFEENPINASGVDAKAILSARLSKSRRLENLIAQLPGEKKNGLFGNLIALSLGLTPNFKSNFDLAEDAKLQLSKDTYDDDLDNLLAQIGDQYADLFLAAKNLSDAILLSDILRVNTEITKAPLSASMIKRYDEHHQDLTLLKALVRQQLPEKYKEIFFDQSKNGYAGYIDGGASQEEFYKFIKPILEKMDGTEELLVKLNREDLLRKQRTFDNGSIPHQIHLGELHAILRRQEDFYPFLKDNREKIEKILTFRIPYYVGPLARGNSRFAWMTRKSEETITPWNFEEVVDKGASAQSFIERMTNFDKNLPNEKVLPKHSLLYEYFTVYNELTKVKYVTEGMRKPAFLSGEQKKAIVDLLFKTNRKVTVKQLKEDYFKKIECFDSVEISGVEDRFNASLGTYHDLLKIIKDKDFLDNEENEDILEDIVLTLTLFEDREMIEERLKTYAHLFDDKVMKQLKRRRYTGWGRLSRKLINGIRDKQSGKTILDFLKSDGFANRNFMQLIHDDSLTFKEDIQKAQVSGQGDSLHEHIANLAGSPAIKKGILQTVKVVDELVKVMGRHKPENIVIEMARENQTTQKGQKNSRERMKRIEEGIKELGSQILKEHPVENTQLQNEKLYLYYLQNGRDMYVDQELDINRLSDYDVDHIVPQSFLKDDSIDNKVLTRSDKARGKSDNVPSEEVVKKMKNYWRQLLNAKLITQRKFDNLTKAERGGLSELDKAGFIKRQLVETRQITKHVAQILDSRMNTKYDENDKLIREVKVITLKSKLVSDFRKDFQFYKVREINNYHHAHDAYLNAVVGTALIKKYPKLESEFVYGDYKVYDVRKMIAKSEQEIGKATAKYFFYSNIMNFFKTEITLANGEIRKRPLIETNGETGEIVWDKGRDFATVRKVLSMPQVNIVKKTEVQTGGFSKESILPKRNSDKLIARKKDWDPKKYGGFDSPTVAYSVLVVAKVEKGKSKKLKSVKELLGITIMERSSFEKNPIDFLEAKGYKEVKKDLIIKLPKYSLFELENGRKRMLASAGELQKGNELALPSKYVNFLYLASHYEKLKGSPEDNEQKQLFVEQHKHYLDEIIEQISEFSKRVILADANLDKVLSAYNKHRDKPIREQAENIIHLFTLTNLGAPAAFKYFDTTIDRKRYTSTKEVLDATLIHQSITGLYETRIDLSQLGGDGGGSSGGSEAAAKGGLGIEDEYRLHETSTEPDVSLGSTWLSDFPQAWAETGGMGLAVRQAPLIIPLKATSTPVSIQQYPMSHEARLGIKPHIQRLLDQGILVPCQSPWNTPLLPVKKPGTNDYRPVQDLREVNKRVEDIHPTVPNPYNLLSGLPPSHQWYTVLDLKDAFFCLRLHPTSQPLFAFEWRDPGMGISGQLTWTRLPQGFKNSPTLFNEALHRDLADFRIQHPDLILLQYVDDILLAATSELDCQQGTRALLQTLGDLGYRASAKKAQICQKQVKYLGYLLREGQRWLTEARKETVMGQPVPKTPRQLREFLGKAGFCRLFIPGFAEMAAPLYPLTKPGTLFSWGPDQQKAYQEIKQALLTAPALGLPDLTKPFELFVDEKQGYAKGVLTQKLGPWRRPVAYLSKKLDPVAAGWPPCLRMVAAIAVLTKDAGKLTMGQPLVILAPHAVEALVKQPPDRWLSNARMTHYQAMLLDTDRVQFGPVVALNPATLLPLPEEGAPHDCLEILAETHGTRPDLTDQPIPDADHTWYTDGSSFLQEGQRKAGAAVTTETEVIWAGALPAGTSAQRAELIALTQALKMAEGKRLNVYTDSRYAFATAHIHGEIYRRRGWLTSEGREIKNKSEILALLKALFLPKRLSIIHCLGHQKGDSAEARGNRLADQAAREAAIKTPPDTSTLLIAGKRTADGSEFEKRTADGSEFESPKKKAKVE

SEQ ID NO: 2118 - protein, 2100 aa, synthetic construct
MPAAKRVKLDGGDKKYSIGLDIGTNSVGWAVITDEYKVPSKKFKVLGNTDRHSIKKNLIGALLFDSGETAEATRLKRTARRRYTRRKNRICYLQEIFSNEMAKVDDSFFHRLEESFLVEEDKKHERHPIFGNIVDEVAYHEKYPTIYHLRKKLVDSTDKADLRLIYLALAHMIKFRGHFLIEGDLNPDNSDVDKLFIQLVQTYNQLFEENPINASGVDAKAILSARLSKSRRLENLIAQLPGEKKNGLFGNLIALSLGLTPNFKSNFDLAEDAKLQLSKDTYDDDLDNLLAQIGDQYADLFLAAKNLSDAILLSDILRVNTEITKAPLSASMIKRYDEHHQDLTLLKALVRQQLPEKYKEIFFDQSKNGYAGYIDGGASQEEFYKFIKPILEKMDGTEELLVKLNREDLLRKQRTFDNGSIPHQIHLGELHAILRRQEDFYPFLKDNREKIEKILTFRIPYYVGPLARGNSRFAWMTRKSEETITPWNFEEVVDKGASAQSFIERMTNFDKNLPNEKVLPKHSLLYEYFTVYNELTKVKYVTEGMRKPAFLSGEQKKAIVDLLFKTNRKVTVKQLKEDYFKKIECFDSVEISGVEDRFNASLGTYHDLLKIIKDKDFLDNEENEDILEDIVLTLTLFEDREMIEERLKTYAHLFDDKVMKQLKRRRYTGWGRLSRKLINGIRDKQSGKTILDFLKSDGFANRNFMQLIHDDSLTFKEDIQKAQVSGQGDSLHEHIANLAGSPAIKKGILQTVKVVDELVKVMGRHKPENIVIEMARENQTTQKGQKNSRERMKRIEEGIKELGSQILKEHPVENTQLQNEKLYLYYLQNGRDMYVDQELDINRLSDYDVDHIVPQSFLKDDSIDNKVLTRSDKARGKSDNVPSEEVVKKMKNYWRQLLNAKLITQRKFDNLTKAERGGLSELDKAGFIKRQLVETRQITKHVAQILDSRMNTKYDENDKLIREVKVITLKSKLVSDFRKDFQFYKVREINNYHHAHDAYLNAVVGTALIKKYPKLESEFVYGDYKVYDVRKMIAKSEQEIGKATAKYFFYSNIMNFFKTEITLANGEIRKRPLIETNGETGEIVWDKGRDFATVRKVLSMPQVNIVKKTEVQTGGFSKESILPKRNSDKLIARKKDWDPKKYGGFDSPTVAYSVLVVAKVEKGKSKKLKSVKELLGITIMERSSFEKNPIDFLEAKGYKEVKKDLIIKLPKYSLFELENGRKRMLASAGELQKGNELALPSKYVNFLYLASHYEKLKGSPEDNEQKQLFVEQHKHYLDEIIEQISEFSKRVILADANLDKVLSAYNKHRDKPIREQAENIIHLFTLTNLGAPAAFKYFDTTIDRKRYTSTKEVLDATLIHQSITGLYETRIDLSQLGGDGGGGSGGSGGSGGSGGSGGLGIEDEYRLHETSTEPDVSLGSTWLSDFPQAWAETGGMGLAVRQAPLIIPLKATSTPVSIQQYPMSHEARLGIKPHIQRLLDQGILVPCQSPWNTPLLPVKKPGTNDYRPVQDLREVNKRVEDIHPTVPNPYNLLSGLPPSHQWYTVLDLKDAFFCLRLHPTSQPLFAFEWRDPGMGISGQLTWTRLPQGFKNSPTLFNEALHRDLADFRIQHPDLILLQYVDDILLAATSELDCQQGTRALLQTLGDLGYRASAKKAQICQKQVKYLGYLLREGQRWLTEARKETVMGQPVPKTPRQLREFLGKAGFCRLFIPGFAEMAAPLYPLTKPGTLFSWGPDQQKAYQEIKQALLTAPALGLPDLTKPFELFVDEKQGYAKGVLTQKLGPWRRPVAYLSKKLDPVAAGWPPCLRMVAAIAVLTKDAGKLTMGQPLVILAPHAVEALVKQPPDRWLSNARMTHYQAMLLDTDRVQFGPVVALNPATLLPLPEEGAPHDCLEILAETHGTRPDLTDQPIPDADHTWYTDGSSFLQEGQRKAGAAVTTETEVIWAGALPAGTSAQRAELIALTQALKMAEGKRLNVYTDSRYAFATAHIHGEIYRRRGWLTSEGREIKNKSEILALLKALFLPKRLSIIHCLGHQKGDSAEARGNRLADQAAREAAIKTPPDTSTLLIAGKRTADGSEFEKRTADGSEFESPKKKAKVE

SEQ ID NO: 2119 - protein, 2096 aa, synthetic construct
MPAAKRVKLDGGDKKYSIGLDIGTNSVGWAVITDEYKVPSKKFKVLGNTDRHSIKKNLIGALLFDSGETAEATRLKRTARRRYTRRKNRICYLQEIFSNEMAKVDDSFFHRLEESFLVEEDKKHERHPIFGNIVDEVAYHEKYPTIYHLRKKLVDSTDKADLRLIYLALAHMIKFRGHFLIEGDLNPDNSDVDKLFIQLVQTYNQLFEENPINASGVDAKAILSARLSKSRRLENLIAQLPGEKKNGLFGNLIALSLGLTPNFKSNFDLAEDAKLQLSKDTYDDDLDNLLAQIGDQYADLFLAAKNLSDAILLSDILRVNTEITKAPLSASMIKRYDEHHQDLTLLKALVRQQLPEKYKEIFFDQSKNGYAGYIDGGASQEEFYKFIKPILEKMDGTEELLVKLNREDLLRKQRTFDNGSIPHQIHLGELHAILRRQEDFYPFLKDNREKIEKILTFRIPYYVGPLARGNSRFAWMTRKSEETITPWNFEEVVDKGASAQSFIERMTNFDKNLPNEKVLPKHSLLYEYFTVYNELTKVKYVTEGMRKPAFLSGEQKKAIVDLLFKTNRKVTVKQLKEDYFKKIECFDSVEISGVEDRFNASLGTYHDLLKIIKDKDFLDNEENEDILEDIVLTLTLFEDREMIEERLKTYAHLFDDKVMKQLKRRRYTGWGRLSRKLINGIRDKQSGKTILDFLKSDGFANRNFMQLIHDDSLTFKEDIQKAQVSGQGDSLHEHIANLAGSPAIKKGILQTVKVVDELVKVMGRHKPENIVIEMARENQTTQKGQKNSRERMKRIEEGIKELGSQILKEHPVENTQLQNEKLYLYYLQNGRDMYVDQELDINRLSDYDVDHIVPQSFLKDDSIDNKVLTRSDKARGKSDNVPSEEVVKKMKNYWRQLLNAKLITQRKFDNLTKAERGGLSELDKAGFIKRQLVETRQITKHVAQILDSRMNTKYDENDKLIREVKVITLKSKLVSDFRKDFQFYKVREINNYHHAHDAYLNAVVGTALIKKYPKLESEFVYGDYKVYDVRKMIAKSEQEIGKATAKYFFYSNIMNFFKTEITLANGEIRKRPLIETNGETGEIVWDKGRDFATVRKVLSMPQVNIVKKTEVQTGGFSKESILPKRNSDKLIARKKDWDPKKYGGFDSPTVAYSVLVVAKVEKGKSKKLKSVKELLGITIMERSSFEKNPIDFLEAKGYKEVKKDLIIKLPKYSLFELENGRKRMLASAGELQKGNELALPSKYVNFLYLASHYEKLKGSPEDNEQKQLFVEQHKHYLDEIIEQISEFSKRVILADANLDKVLSAYNKHRDKPIREQAENIIHLFTLTNLGAPAAFKYFDTTIDRKRYTSTKEVLDATLIHQSITGLYETRIDLSQLGGDGGEAAAKGSSGGSGGLGIEDEYRLHETSTEPDVSLGSTWLSDFPQAWAETGGMGLAVRQAPLIIPLKATSTPVSIQQYPMSHEARLGIKPHIQRLLDQGILVPCQSPWNTPLLPVKKPGTNDYRPVQDLREVNKRVEDIHPTVPNPYNLLSGLPPSHQWYTVLDLKDAFFCLRLHPTSQPLFAFEWRDPGMGISGQLTWTRLPQGFKNSPTLFNEALHRDLADFRIQHPDLILLQYVDDILLAATSELDCQQGTRALLQTLGDLGYRASAKKAQICQKQVKYLGYLLREGQRWLTEARKETVMGQPVPKTPRQLREFLGKAGFCRLFIPGFAEMAAPLYPLTKPGTLFSWGPDQQKAYQEIKQALLTAPALGLPDLTKPFELFVDEKQGYAKGVLTQKLGPWRRPVAYLSKKLDPVAAGWPPCLRMVAAIAVLTKDAGKLTMGQPLVILAPHAVEALVKQPPDRWLSNARMTHYQAMLLDTDRVQFGPVVALNPATLLPLPEEGAPHDCLEILAETHGTRPDLTDQPIPDADHTWYTDGSSFLQEGQRKAGAAVTTETEVIWAGALPAGTSAQRAELIALTQALKMAEGKRLNVYTDSRYAFATAHIHGEIYRRRGWLTSEGREIKNKSEILALLKALFLPKRLSIIHCLGHQKGDSAEARGNRLADQAAREAAIKTPPDTSTLLIAGKRTADGSEFEKRTADGSEFESPKKKAKVE

SEQ ID NO: 2120 - protein, 2096 aa, synthetic construct
MPAAKRVKLDGGDKKYSIGLDIGTNSVGWAVITDEYKVPSKKFKVLGNTDRHSIKKNLIGALLFDSGETAEATRLKRTARRRYTRRKNRICYLQEIFSNEMAKVDDSFFHRLEESFLVEEDKKHERHPIFGNIVDEVAYHEKYPTIYHLRKKLVDSTDKADLRLIYLALAHMIKFRGHFLIEGDLNPDNSDVDKLFIQLVQTYNQLFEENPINASGVDAKAILSARLSKSRRLENLIAQLPGEKKNGLFGNLIALSLGLTPNFKSNFDLAEDAKLQLSKDTYDDDLDNLLAQIGDQYADLFLAAKNLSDAILLSDILRVNTEITKAPLSASMIKRYDEHHQDLTLLKALVRQQLPEKYKEIFFDQSKNGYAGYIDGGASQEEFYKFIKPILEKMDGTEELLVKLNREDLLRKQRTFDNGSIPHQIHLGELHAILRRQEDFYPFLKDNREKIEKILTFRIPYYVGPLARGNSRFAWMTRKSEETITPWNFEEVVDKGASAQSFIERMTNFDKNLPNEKVLPKHSLLYEYFTVYNELTKVKYVTEGMRKPAFLSGEQKKAIVDLLFKTNRKVTVKQLKEDYFKKIECFDSVEISGVEDRFNASLGTYHDLLKIIKDKDFLDNEENEDILEDIVLTLTLFEDREMIEERLKTYAHLFDDKVMKQLKRRRYTGWGRLSRKLINGIRDKQSGKTILDFLKSDGFANRNFMQLIHDDSLTFKEDIQKAQVSGQGDSLHEHIANLAGSPAIKKGILQTVKVVDELVKVMGRHKPENIVIEMARENQTTQKGQKNSRERMKRIEEGIKELGSQILKEHPVENTQLQNEKLYLYYLQNGRDMYVDQELDINRLSDYDVDHIVPQSFLKDDSIDNKVLTRSDKARGKSDNVPSEEVVKKMKNYWRQLLNAKLITQRKFDNLTKAERGGLSELDKAGFIKRQLVETRQITKHVAQILDSRMNTKYDENDKLIREVKVITLKSKLVSDFRKDFQFYKVREINNYHHAHDAYLNAVVGTALIKKYPKLESEFVYGDYKVYDVRKMIAKSEQEIGKATAKYFFYSNIMNFFKTEITLANGEIRKRPLIETNGETGEIVWDKGRDFATVRKVLSMPQVNIVKKTEVQTGGFSKESILPKRNSDKLIARKKDWDPKKYGGFDSPTVAYSVLVVAKVEKGKSKKLKSVKELLGITIMERSSFEKNPIDFLEAKGYKEVKKDLIIKLPKYSLFELENGRKRMLASAGELQKGNELALPSKYVNFLYLASHYEKLKGSPEDNEQKQLFVEQHKHYLDEIIEQISEFSKRVILADANLDKVLSAYNKHRDKPIREQAENIIHLFTLTNLGAPAAFKYFDTTIDRKRYTSTKEVLDATLIHQSITGLYETRIDLSQLGGDGGPAPEAAAKGGGGGLGIEDEYRLHETSTEPDVSLGSTWLSDFPQAWAETGGMGLAVRQAPLIIPLKATSTPVSIQQYPMSHEARLGIKPHIQRLLDQGILVPCQSPWNTPLLPVKKPGTNDYRPVQDLREVNKRVEDIHPTVPNPYNLLSGLPPSHQWYTVLDLKDAFFCLRLHPTSQPLFAFEWRDPGMGISGQLTWTRLPQGFKNSPTLFNEALHRDLADFRIQHPDLILLQYVDDILLAATSELDCQQGTRALLQTLGDLGYRASAKKAQICQKQVKYLGYLLREGQRWLTEARKETVMGQPVPKTPRQLREFLGKAGFCRLFIPGFAEMAAPLYPLTKPGTLFSWGPDQQKAYQEIKQALLTAPALGLPDLTKPFELFVDEKQGYAKGVLTQKLGPWRRPVAYLSKKLDPVAAGWPPCLRMVAAIAVLTKDAGKLTMGQPLVILAPHAVEALVKQPPDRWLSNARMTHYQAMLLDTDRVQFGPVVALNPATLLPLPEEGAPHDCLEILAETHGTRPDLTDQPIPDADHTWYTDGSSFLQEGQRKAGAAVTTETEVIWAGALPAGTSAQRAELIALTQALKMAEGKRLNVYTDSRYAFATAHIHGEIYRRRGWLTSEGREIKNKSEILALLKALFLPKRLSIIHCLGHQKGDSAEARGNRLADQAAREAAIKTPPDTSTLLIAGKRTADGSEFEKRTADGSEFESPKKKAKVE

SEQ ID NO: 2121 - protein, 2101 aa, synthetic construct
MPAAKRVKLDGGDKKYSIGLDIGTNSVGWAVITDEYKVPSKKFKVLGNTDRHSIKKNLIGALLFDSGETAEATRLKRTARRRYTRRKNRICYLQEIFSNEMAKVDDSFFHRLEESFLVEEDKKHERHPIFGNIVDEVAYHEKYPTIYHLRKKLVDSTDKADLRLIYLALAHMIKFRGHFLIEGDLNPDNSDVDKLFIQLVQTYNQLFEENPINASGVDAKAILSARLSKSRRLENLIAQLPGEKKNGLFGNLIALSLGLTPNFKSNFDLAEDAKLQLSKDTYDDDLDNLLAQIGDQYADLFLAAKNLSDAILLSDILRVNTEITKAPLSASMIKRYDEHHQDLTLLKALVRQQLPEKYKEIFFDQSKNGYAGYIDGGASQEEFYKFIKPILEKMDGTEELLVKLNREDLLRKQRTFDNGSIPHQIHLGELHAILRRQEDFYPFLKDNREKIEKILTFRIPYYVGPLARGNSRFAWMTRKSEETITPWNFEEVVDKGASAQSFIERMTNFDKNLPNEKVLPKHSLLYEYFTVYNELTKVKYVTEGMRKPAFLSGEQKKAIVDLLFKTNRKVTVKQLKEDYFKKIECFDSVEISGVEDRFNASLGTYHDLLKIIKDKDFLDNEENEDILEDIVLTLTLFEDREMIEERLKTYAHLFDDKVMKQLKRRRYTGWGRLSRKLINGIRDKQSGKTILDFLKSDGFANRNFMQLIHDDSLTFKEDIQKAQVSGQGDSLHEHIANLAGSPAIKKGILQTVKVVDELVKVMGRHKPENIVIEMARENQTTQKGQKNSRERMKRIEEGIKELGSQILKEHPVENTQLQNEKLYLYYLQNGRDMYVDQELDINRLSDYDVDHIVPQSFLKDDSIDNKVLTRSDKARGKSDNVPSEEVVKKMKNYWRQLLNAKLITQRKFDNLTKAERGGLSELDKAGFIKRQLVETRQITKHVAQILDSRMNTKYDENDKLIREVKVITLKSKLVSDFRKDFQFYKVREINNYHHAHDAYLNAVVGTALIKKYPKLESEFVYGDYKVYDVRKMIAKSEQEIGKATAKYFFYSNIMNFFKTEITLANGEIRKRPLIETNGETGEIVWDKGRDFATVRKVLSMPQVNIVKKTEVQTGGFSKESILPKRNSDKLIARKKDWDPKKYGGFDSPTVAYSVLVVAKVEKGKSKKLKSVKELLGITIMERSSFEKNPIDFLEAKGYKEVKKDLIIKLPKYSLFELENGRKRMLASAGELQKGNELALPSKYVNFLYLASHYEKLKGSPEDNEQKQLFVEQHKHYLDEIIEQISEFSKRVILADANLDKVLSAYNKHRDKPIREQAENIIHLFTLTNLGAPAAFKYFDTTIDRKRYTSTKEVLDATLIHQSITGLYETRIDLSQLGGDGGSGSETPGTSESATPESGGLGIEDEYRLHETSTEPDVSLGSTWLSDFPQAWAETGGMGLAVRQAPLIIPLKATSTPVSIQQYPMSHEARLGIKPHIQRLLDQGILVPCQSPWNTPLLPVKKPGTNDYRPVQDLREVNKRVEDIHPTVPNPYNLLSGLPPSHQWYTVLDLKDAFFCLRLHPTSQPLFAFEWRDPGMGISGQLTWTRLPQGFKNSPTLFNEALHRDLADFRIQHPDLILLQYVDDILLAATSELDCQQGTRALLQTLGDLGYRASAKKAQICQKQVKYLGYLLREGQRWLTEARKETVMGQPVPKTPRQLREFLGKAGFCRLFIPGFAEMAAPLYPLTKPGTLFSWGPDQQKAYQEIKQALLTAPALGLPDLTKPFELFVDEKQGYAKGVLTQKLGPWRRPVAYLSKKLDPVAAGWPPCLRMVAAIAVLTKDAGKLTMGQPLVILAPHAVEALVKQPPDRWLSNARMTHYQAMLLDTDRVQFGPVVALNPATLLPLPEEGAPHDCLEILAETHGTRPDLTDQPIPDADHTWYTDGSSFLQEGQRKAGAAVTTETEVIWAGALPAGTSAQRAELIALTQALKMAEGKRLNVYTDSRYAFATAHIHGEIYRRRGWLTSEGREIKNKSEILALLKALFLPKRLSIIHCLGHQKGDSAEARGNRLADQAAREAAIKTPPDTSTLLIAGKRTADGSEFEKRTADGSEFESPKKKAKVE

SEQ ID NO: 2122 - protein, 2094 aa, synthetic construct; identical to SEQ ID NO: 2058

SEQ ID NO: 2123 - protein, 2096 aa, synthetic construct; identical to SEQ ID NO: 2054

SEQ ID NO: 2124 - protein, 2091 aa, synthetic construct
MPAAKRVKLDGGDKKYSIGLDIGTNSVGWAVITDEYKVPSKKFKVLGNTDRHSIKKNLIGALLFDSGETAEATRLKRTARRRYTRRKNRICYLQEIFSNEMAKVDDSFFHRLEESFLVEEDKKHERHPIFGNIVDEVAYHEKYPTIYHLRKKLVDSTDKADLRLIYLALAHMIKFRGHFLIEGDLNPDNSDVDKLFIQLVQTYNQLFEENPINASGVDAKAILSARLSKSRRLENLIAQLPGEKKNGLFGNLIALSLGLTPNFKSNFDLAEDAKLQLSKDTYDDDLDNLLAQIGDQYADLFLAAKNLSDAILLSDILRVNTEITKAPLSASMIKRYDEHHQDLTLLKALVRQQLPEKYKEIFFDQSKNGYAGYIDGGASQEEFYKFIKPILEKMDGTEELLVKLNREDLLRKQRTFDNGSIPHQIHLGELHAILRRQEDFYPFLKDNREKIEKILTFRIPYYVGPLARGNSRFAWMTRKSEETITPWNFEEVVDKGASAQSFIERMTNFDKNLPNEKVLPKHSLLYEYFTVYNELTKVKYVTEGMRKPAFLSGEQKKAIVDLLFKTNRKVTVKQLKEDYFKKIECFDSVEISGVEDRFNASLGTYHDLLKIIKDKDFLDNEENEDILEDIVLTLTLFEDREMIEERLKTYAHLFDDKVMKQLKRRRYTGWGRLSRKLINGIRDKQSGKTILDFLKSDGFANRNFMQLIHDDSLTFKEDIQKAQVSGQGDSLHEHIANLAGSPAIKKGILQTVKVVDELVKVMGRHKPENIVIEMARENQTTQKGQKNSRERMKRIEEGIKELGSQILKEHPVENTQLQNEKLYLYYLQNGRDMYVDQELDINRLSDYDVDHIVPQSFLKDDSIDNKVLTRSDKARGKSDNVPSEEVVKKMKNYWRQLLNAKLITQRKFDNLTKAERGGLSELDKAGFIKRQLVETRQITKHVAQILDSRMNTKYDENDKLIREVKVITLKSKLVSDFRKDFQFYKVREINNYHHAHDAYLNAVVGTALIKKYPKLESEFVYGDYKVYDVRKMIAKSEQEIGKATAKYFFYSNIMNFFKTEITLANGEIRKRPLIETNGETGEIVWDKGRDFATVRKVLSMPQVNIVKKTEVQTGGFSKESILPKRNSDKLIARKKDWDPKKYGGFDSPTVAYSVLVVAKVEKGKSKKLKSVKELLGITIMERSSFEKNPIDFLEAKGYKEVKKDLIIKLPKYSLFELENGRKRMLASAGELQKGNELALPSKYVNFLYLASHYEKLKGSPEDNEQKQLFVEQHKHYLDEIIEQISEFSKRVILADANLDKVLSAYNKHRDKPIREQAENIIHLFTLTNLGAPAAFKYFDTTIDRKRYTSTKEVLDATLIHQSITGLYETRIDLSQLGGDGGGSSPAPGGLGIEDEYRLHETSTEPDVSLGSTWLSDFPQAWAETGGMGLAVRQAPLIIPLKATSTPVSIQQYPMSHEARLGIKPHIQRLLDQGILVPCQSPWNTPLLPVKKPGTNDYRPVQDLREVNKRVEDIHPTVPNPYNLLSGLPPSHQWYTVLDLKDAFFCLRLHPTSQPLFAFEWRDPGMGISGQLTWTRLPQGFKNSPTLFNEALHRDLADFRIQHPDLILLQYVDDILLAATSELDCQQGTRALLQTLGDLGYRASAKKAQICQKQVKYLGYLLREGQRWLTEARKETVMGQPVPKTPRQLREFLGKAGFCRLFIPGFAEMAAPLYPLTKPGTLFSWGPDQQKAYQEIKQALLTAPALGLPDLTKPFELFVDEKQGYAKGVLTQKLGPWRRPVAYLSKKLDPVAAGWPPCLRMVAAIAVLTKDAGKLTMGQPLVILAPHAVEALVKQPPDRWLSNARMTHYQAMLLDTDRVQFGPVVALNPATLLPLPEEGAPHDCLEILAETHGTRPDLTDQPIPDADHTWYTDGSSFLQEGQRKAGAAVTTETEVIWAGALPAGTSAQRAELIALTQALKMAEGKRLNVYTDSRYAFATAHIHGEIYRRRGWLTSEGREIKNKSEILALLKALFLPKRLSIIHCLGHQKGDSAEARGNRLADQAAREAAIKTPPDTSTLLIAGKRTADGSEFEKRTADGSEFESPKKKAKVE

SEQ ID NO: 2125 - protein, 2090 aa, synthetic construct
MPAAKRVKLDGGDKKYSIGLDIGTNSVGWAVITDEYKVPSKKFKVLGNTDRHSIKKNLIGALLFDSGETAEATRLKRTARRRYTRRKNRICYLQEIFSNEMAKVDDSFFHRLEESFLVEEDKKHERHPIFGNIVDEVAYHEKYPTIYHLRKKLVDSTDKADLRLIYLALAHMIKFRGHFLIEGDLNPDNSDVDKLFIQLVQTYNQLFEENPINASGVDAKAILSARLSKSRRLENLIAQLPGEKKNGLFGNLIALSLGLTPNFKSNFDLAEDAKLQLSKDTYDDDLDNLLAQIGDQYADLFLAAKNLSDAILLSDILRVNTEITKAPLSASMIKRYDEHHQDLTLLKALVRQQLPEKYKEIFFDQSKNGYAGYIDGGASQEEFYKFIKPILEKMDGTEELLVKLNREDLLRKQRTFDNGSIPHQIHLGELHAILRRQEDFYPFLKDNREKIEKILTFRIPYYVGPLARGNSRFAWMTRKSEETITPWNFEEVVDKGASAQSFIERMTNFDKNLPNEKVLPKHSLLYEYFTVYNELTKVKYVTEGMRKPAFLSGEQKKAIVDLLFKTNRKVTVKQLKEDYFKKIECFDSVEISGVEDRFNASLGTYHDLLKIIKDKDFLDNEENEDILEDIVLTLTLFEDREMIEERLKTYAHLFDDKVMKQLKRRRYTGWGRLSRKLINGIRDKQSGKTILDFLKSDGFANRNFMQLIHDDSLTFKEDIQKAQVSGQGDSLHEHIANLAGSPAIKKGILQTVKVVDELVKVMGRHKPENIVIEMARENQTTQKGQKNSRERMKRIEEGIKELGSQILKEHPVENTQLQNEKLYLYYLQNGRDMYVDQELDINRLSDYDVDHIVPQSFLKDDSIDNKVLTRSDKARGKSDNVPSEEVVKKMKNYWRQLLNAKLITQRKFDNLTKAERGGLSELDKAGFIKRQLVETRQITKHVAQILDSRMNTKYDENDKLIREVKVITLKSKLVSDFRKDFQFYKVREINNYHHAHDAYLNAVVGTALIKKYPKLESEFVYGDYKVYDVRKMIAKSEQEIGKATAKYFFYSNIMNFFKTEITLANGEIRKRPLIETNGETGEIVWDKGRDFATVRKVLSMPQVNIVKKTEVQTGGFSKESILPKRNSDKLIARKKDWDPKKYGGFDSPTVAYSVLVVAKVEKGKSKKLKSVKELLGITIMERSSFEKNPIDFLEAKGYKEVKKDLIIKLPKYSLFELENGRKRMLASAGELQKGNELALPSKYVNFLYLASHYEKLKGSPEDNEQKQLFVEQHKHYLDEIIEQISEFSKRVILADANLDKVLSAYNKHRDKPIREQAENIIHLFTLTNLGAPAAFKYFDTTIDRKRYTSTKEVLDATLIHQSITGLYETRIDLSQLGGDGGGGGGSGGLGIEDEYRLHETSTEPDVSLGSTWLSDFPQAWAETGGMGLAVRQAPLIIPLKATSTPVSIQQYPMSHEARLGIKPHIQRLLDQGILVPCQSPWNTPLLPVKKPGTNDYRPVQDLREVNKRVEDIHPTVPNPYNLLSGLPPSHQWYTVLDLKDAFFCLRLHPTSQPLFAFEWRDPGMGISGQLTWTRLPQGFKNSPTLFNEALHRDLADFRIQHPDLILLQYVDDILLAATSELDCQQGTRALLQTLGDLGYRASAKKAQICQKQVKYLGYLLREGQRWLTEARKETVMGQPVPKTPRQLREFLGKAGFCRLFIPGFAEMAAPLYPLTKPGTLFSWGPDQQKAYQEIKQALLTAPALGLPDLTKPFELFVDEKQGYAKGVLTQKLGPWRRPVAYLSKKLDPVAAGWPPCLRMVAAIAVLTKDAGKLTMGQPLVILAPHAVEALVKQPPDRWLSNARMTHYQAMLLDTDRVQFGPVVALNPATLLPLPEEGAPHDCLEILAETHGTRPDLTDQPIPDADHTWYTDGSSFLQEGQRKAGAAVTTETEVIWAGALPAGTSAQRAELIALTQALKMAEGKRLNVYTDSRYAFATAHIHGEIYRRRGWLTSEGREIKNKSEILALLKALFLPKRLSIIHCLGHQKGDSAEARGNRLADQAAREAAIKTPPDTSTLLIAGKRTADGSEFEKRTADGSEFESPKKKAKVE

SEQ ID NO: 2126 - protein, 2096 aa, synthetic construct; identical to SEQ ID NO: 2052

SEQ ID NO: 2127 - protein, 2091 aa, synthetic construct
MPAAKRVKLDGGDKKYSIGLDIGTNSVGWAVITDEYKVPSKKFKVLGNTDRHSIKKNLIGALLFDSGETAEATRLKRTARRRYTRRKNRICYLQEIFSNEMAKVDDSFFHRLEESFLVEEDKKHERHPIFGNIVDEVAYHEKYPTIYHLRKKLVDSTDKADLRLIYLALAHMIKFRGHFLIEGDLNPDNSDVDKLFIQLVQTYNQLFEENPINASGVDAKAILSARLSKSRRLENLIAQLPGEKKNGLFGNLIALSLGLTPNFKSNFDLAEDAKLQLSKDTYDDDLDNLLAQIGDQYADLFLAAKNLSDAILLSDILRVNTEITKAPLSASMIKRYDEHHQDLTLLKALVRQQLPEKYKEIFFDQSKNGYAGYIDGGASQEEFYKFIKPILEKMDGTEELLVKLNREDLLRKQRTFDNGSIPHQIHLGELHAILRRQEDFYPFLKDNREKIEKILTFRIPYYVGPLARGNSRFAWMTRKSEETITPWNFEEVVDKGASAQSFIERMTNFDKNLPNEKVLPKHSLLYEYFTVYNELTKVKYVTEGMRKPAFLSGEQKKAIVDLLFKTNRKVTVKQLKEDYFKKIECFDSVEISGVEDRFNASLGTYHDLLKIIKDKDFLDNEENEDILEDIVLTLTLFEDREMIEERLKTYAHLFDDKVMKQLKRRRYTGWGRLSRKLINGIRDKQSGKTILDFLKSDGFANRNFMQLIHDDSLTFKEDIQKAQVSGQGDSLHEHIANLAGSPAIKKGILQTVKVVDELVKVMGRHKPENIVIEMARENQTTQKGQKNSRERMKRIEEGIKELGSQILKEHPVENTQLQNEKLYLYYLQNGRDMYVDQELDINRLSDYDVDHIVPQSFLKDDSIDNKVLTRSDKARGKSDNVPSEEVVKKMKNYWRQLLNAKLITQRKFDNLTKAERGGLSELDKAGFIKRQLVETRQITKHVAQILDSRMNTKYDENDKLIREVKVITLKSKLVSDFRKDFQFYKVREINNYHHAHDAYLNAVVGTALIKKYPKLESEFVYGDYKVYDVRKMIAKSEQEIGKATAKYFFYSNIMNFFKTEITLANGEIRKRPLIETNGETGEIVWDKGRDFATVRKVLSMPQVNIVKKTEVQTGGFSKESILPKRNSDKLIARKKDWDPKKYGGFDSPTVAYSVLVVAKVEKGKSKKLKSVKELLGITIMERSSFEKNPIDFLEAKGYKEVKKDLIIKLPKYSLFELENGRKRMLASAGELQKGNELALPSKYVNFLYLASHYEKLKGSPEDNEQKQLFVEQHKHYLDEIIEQISEFSKRVILADANLDKVLSAYNKHRDKPIREQAENIIHLFTLTNLGAPAAFKYFDTTIDRKRYTSTKEVLDATLIHQSITGLYETRIDLSQLGGDGGGGGPAPGGLGIEDEYRLHETSTEPDVSLGSTWLSDFPQAWAETGGMGLAVRQAPLIIPLKATSTPVSIQQYPMSHEARLGIKPHIQRLLDQGILVPCQSPWNTPLLPVKKPGTNDYRPVQDLREVNKRVEDIHPTVPNPYNLLSGLPPSHQWYTVLDLKDAFFCLRLHPTSQPLFAFEWRDPGMGISGQLTWTRLPQGFKNSPTLFNEALHRDLADFRIQHPDLILLQYVDDILLAATSELDCQQGTRALLQTLGDLGYRASAKKAQICQKQVKYLGYLLREGQRWLTEARKETVMGQPVPKTPRQLREFLGKAGFCRLFIPGFAEMAAPLYPLTKPGTLFSWGPDQQKAYQEIKQALLTAPALGLPDLTKPFELFVDEKQGYAKGVLTQKLGPWRRPVAYLSKKLDPVAAGWPPCLRMVAAIAVLTKDAGKLTMGQPLVILAPHAVEALVKQPPDRWLSNARMTHYQAMLLDTDRVQFGPVVALNPATLLPLPEEGAPHDCLEILAETHGTRPDLTDQPIPDADHTWYTDGSSFLQEGQRKAGAAVTTETEVIWAGALPAGTSAQRAELIALTQALKMAEGKRLNVYTDSRYAFATAHIHGEIYRRRGWLTSEGREIKNKSEILALLKALFLPKRLSIIHCLGHQKGDSAEARGNRLADQAAREAAIKTPPDTSTLLIAGKRTADGSEFEKRTADGSEFESPKKKAKVE

SEQ ID NO: 2128 - protein, 2095 aa, synthetic construct
MPAAKRVKLDGGDKKYSIGLDIGTNSVGWAVITDEYKVPSKKFKVLGNTDRHSIKKNLIGALLFDSGETAEATRLKRTARRRYTRRKNRICYLQEIFSNEMAKVDDSFFHRLEESFLVEEDKKHERHPIFGNIVDEVAYHEKYPTIYHLRKKLVDSTDKADLRLIYLALAHMIKFRGHFLIEGDLNPDNSDVDKLFIQLVQTYNQLFEENPINASGVDAKAILSARLSKSRRLENLIAQLPGEKKNGLFGNLIALSLGLTPNFKSNFDLAEDAKLQLSKDTYDDDLDNLLAQIGDQYADLFLAAKNLSDAILLSDILRVNTEITKAPLSASMIKRYDEHHQDLTLLKALVRQQLPEKYKEIFFDQSKNGYAGYIDGGASQEEFYKFIKPILEKMDGTEELLVKLNREDLLRKQRTFDNGSIPHQIHLGELHAILRRQEDFYPFLKDNREKIEKILTFRIPYYVGPLARGNSRFAWMTRKSEETITPWNFEEVVDKGASAQSFIERMTNFDKNLPNEKVLPKHSLLYEYFTVYNELTKVKYVTEGMRKPAFLSGEQKKAIVDLLFKTNRKVTVKQLKEDYFKKIECFDSVEISGVEDRFNASLGTYHDLLKIIKDKDFLDNEENEDILEDIVLTLTLFEDREMIEERLKTYAHLFDDKVMKQLKRRRYTGWGRLSRKLINGIRDKQSGKTILDFLKSDGFANRNFMQLIHDDSLTFKEDIQKAQVSGQGDSLHEHIANLAGSPAIKKGILQTVKVVDELVKVMGRHKPENIVIEMARENQTTQKGQKNSRERMKRIEEGIKELGSQILKEHPVENTQLQNEKLYLYYLQNGRDMYVDQELDINRLSDYDVDHIVPQSFLKDDSIDNKVLTRSDKARGKSDNVPSEEVVKKMKNYWRQLLNAKLITQRKFDNLTKAERGGLSELDKAGFIKRQLVETRQITKHVAQILDSRMNTKYDENDKLIREVKVITLKSKLVSDFRKDFQFYKVREINNYHHAHDAYLNAVVGTALIKKYPKLESEFVYGDYKVYDVRKMIAKSEQEIGKATAKYFFYSNIMNFFKTEITLANGEIRKRPLIETNGETGEIVWDKGRDFATVRKVLSMPQVNIVKKTEVQTGGFSKESILPKRNSDKLIARKKDWDPKKYGGFDSPTVAYSVLVVAKVEKGKSKKLKSVKELLGITIMERSSFEKNPIDFLEAKGYKEVKKDLIIKLPKYSLFELENGRKRMLASAGELQKGNELALPSKYVNFLYLASHYEKLKGSPEDNEQKQLFVEQHKHYLDEIIEQISEFSKRVILADANLDKVLSAYNKHRDKPIREQAENIIHLFTLTNLGAPAAFKYFDTTIDRKRYTSTKEVLDATLIHQSITGLYETRIDLSQLGGDGGEAAAKEAAAKGGLGIEDEYRLHETSTEPDVSLGSTWLSDFPQAWAETGGMGLAVRQAPLIIPLKATSTPVSIQQYPMSHEARLGIKPHIQRLLDQGILVPCQSPWNTPLLPVKKPGTNDYRPVQDLREVNKRVEDIHPTVPNPYNLLSGLPPSHQWYTVLDLKDAFFCLRLHPTSQPLFAFEWRDPGMGISGQLTWTRLPQGFKNSPTLFNEALHRDLADFRIQHPDLILLQYVDDILLAATSELDCQQGTRALLQTLGDLGYRASAKKAQICQKQVKYLGYLLREGQRWLTEARKETVMGQPVPKTPRQLREFLGKAGFCRLFIPGFAEMAAPLYPLTKPGTLFSWGPDQQKAYQEIKQALLTAPALGLPDLTKPFELFVDEKQGYAKGVLTQKLGPWRRPVAYLSKKLDPVAAGWPPCLRMVAAIAVLTKDAGKLTMGQPLVILAPHAVEALVKQPPDRWLSNARMTHYQAMLLDTDRVQFGPVVALNPATLLPLPEEGAPHDCLEILAETHGTRPDLTDQPIPDADHTWYTDGSSFLQEGQRKAGAAVTTETEVIWAGALPAGTSAQRAELIALTQALKMAEGKRLNVYTDSRYAFATAHIHGEIYRRRGWLTSEGREIKNKSEILALLKALFLPKRLSIIHCLGHQKGDSAEARGNRLADQAAREAAIKTPPDTSTLLIAGKRTADGSEFEKRTADGSEFESPKKKAKVE

SEQ ID NO: 2129 - protein, 2096 aa, synthetic construct; identical to SEQ ID NO: 2059

SEQ ID NO: 2130 - protein, 2096 aa, synthetic construct
MPAAKRVKLDGGDKKYSIGLDIGTNSVGWAVITDEYKVPSKKFKVLGNTDRHSIKKNLIGALLFDSGETAEATRLKRTARRRYTRRKNRICYLQEIFSNEMAKVDDSFFHRLEESFLVEEDKKHERHPIFGNIVDEVAYHEKYPTIYHLRKKLVDSTDKADLRLIYLALAHMIKFRGHFLIEGDLNPDNSDVDKLFIQLVQTYNQLFEENPINASGVDAKAILSARLSKSRRLENLIAQLPGEKKNGLFGNLIALSLGLTPNFKSNFDLAEDAKLQLSKDTYDDDLDNLLAQIGDQYADLFLAAKNLSDAILLSDILRVNTEITKAPLSASMIKRYDEHHQDLTLLKALVRQQLPEKYKEIFFDQSKNGYAGYIDGGASQEEFYKFIKPILEKMDGTEELLVKLNREDLLRKQRTFDNGSIPHQIHLGELHAILRRQEDFYPFLKDNREKIEKILTFRIPYYVGPLARGNSRFAWMTRKSEETITPWNFEEVVDKGASAQSFIERMTNFDKNLPNEKVLPKHSLLYEYFTVYNELTKVKYVTEGMRKPAFLSGEQKKAIVDLLFKTNRKVTVKQLKEDYFKKIECFDSVEISGVEDRFNASLGTYHDLLKIIKDKDFLDNEENEDILEDIVLTLTLFEDREMIEERLKTYAHLFDDKVMKQLKRRRYTGWGRLSRKLINGIRDKQSGKTILDFLKSDGFANRNFMQLIHDDSLTFKEDIQKAQVSGQGDSLHEHIANLAGSPAIKKGILQTVKVVDELVKVMGRHKPENIVIEMARENQTTQKGQKNSRERMKRIEEGIKELGSQILKEHPVENTQLQNEKLYLYYLQNGRDMYVDQELDINRLSDYDVDHIVPQSFLKDDSIDNKVLTRSDKARGKSDNVPSEEVVKKMKNYWRQLLNAKLITQRKFDNLTKAERGGLSELDKAGFIKRQLVETRQITKHVAQILDSRMNTKYDENDKLIREVKVITLKSKLVSDFRKDFQFYKVREINNYHHAHDAYLNAVVGTALIKKYPKLESEFVYGDYKVYDVRKMIAKSEQEIGKATAKYFFYSNIMNFFKTEITLANGEIRKRPLIETNGETGEIVWDKGRDFATVRKVLSMPQVNIVKKTEVQTGGFSKESILPKRNSDKLIARKKDWDPKKYGGFDSPTVAYSVLVVAKVEKGKSKKLKSVKELLGITIMERSSFEKNPIDFLEAKGYKEVKKDLIIKLPKYSLFELENGRKRMLASAGELQKGNELALPSKYVNFLYLASHYEKLKGSPEDNEQKQLFVEQHKHYLDEIIEQISEFSKRVILADANLDKVLSAYNKHRDKPIREQAENIIHLFTLTNLGAPAAFKYFDTTIDRKRYTSTKEVLDATLIHQSITGLYETRIDLSQLGGDGGEAAAKPAPGGGGGLGIEDEYRLHETSTEPDVSLGSTWLSDFPQAWAETGGMGLAVRQAPLIIPLKATSTPVSIQQYPMSHEARLGIKPHIQRLLDQGILVPCQSPWNTPLLPVKKPGTNDYRPVQDLREVNKRVEDIHPTVPNPYNLLSGLPPSHQWYTVLDLKDAFFCLRLHPTSQPLFAFEWRDPGMGISGQLTWTRLPQGFKNSPTLFNEALHRDLADFRIQHPDLILLQYVDDILLAATSELDCQQGTRALLQTLGDLGYRASAKKAQICQKQVKYLGYLLREGQRWLTEARKETVMGQPVPKTPRQLREFLGKAGFCRLFIPGFAEMAAPLYPLTKPGTLFSWGPDQQKAYQEIKQALLTAPALGLPDLTKPFELFVDEKQGYAKGVLTQKLGPWRRPVAYLSKKLDPVAAGWPPCLRMVAAIAVLTKDAGKLTMGQPLVILAPHAVEALVKQPPDRWLSNARMTHYQAMLLDTDRVQFGPVVALNPATLLPLPEEGAPHDCLEILAETHGTRPDLTDQPIPDADHTWYTDGSSFLQEGQRKAGAAVTTETEVIWAGALPAGTSAQRAELIALTQALKMAEGKRLNVYTDSRYAFATAHIHGEIYRRRGWLTSEGREIKNKSEILALLKALFLPKRLSIIHCLGHQKGDSAEARGNRLADQAAREAAIKTPPDTSTLLIAGKRTADGSEFEKRTADGSEFESPKKKAKVE

SEQ ID NO: 2131 - protein, 2088 aa, synthetic construct
MPAAKRVKLDGGDKKYSIGLDIGTNSVGWAVITDEYKVPSKKFKVLGNTDRHSIKKNLIGALLFDSGETAEATRLKRTARRRYTRRKNRICYLQEIFSNEMAKVDDSFFHRLEESFLVEEDKKHERHPIFGNIVDEVAYHEKYPTIYHLRKKLVDSTDKADLRLIYLALAHMIKFRGHFLIEGDLNPDNSDVDKLFIQLVQTYNQLFEENPINASGVDAKAILSARLSKSRRLENLIAQLPGEKKNGLFGNLIALSLGLTPNFKSNFDLAEDAKLQLSKDTYDDDLDNLLAQIGDQYADLFLAAKNLSDAILLSDILRVNTEITKAPLSASMIKRYDEHHQDLTLLKALVRQQLPEKYKEIFFDQSKNGYAGYIDGGASQEEFYKFIKPILEKMDGTEELLVKLNREDLLRKQRTFDNGSIPHQIHLGELHAILRRQEDFYPFLKDNREKIEKILTFRIPYYVGPLARGNSRFAWMTRKSEETITPWNFEEVVDKGASAQSFIERMTNFDKNLPNEKVLPKHSLLYEYFTVYNELTKVKYVTEGMRKPAFLSGEQKKAIVDLLFKTNRKVTVKQLKEDYFKKIECFDSVEISGVEDRFNASLGTYHDLLKIIKDKDFLDNEENEDILEDIVLTLTLFEDREMIEERLKTYAHLFDDKVMKQLKRRRYTGWGRLSRKLINGIRDKQSGKTILDFLKSDGFANRNFMQLIHDDSLTFKEDIQKAQVSGQGDSLHEHIANLAGSPAIKKGILQTVKVVDELVKVMGRHKPENIVIEMARENQTTQKGQKNSRERMKRIEEGIKELGSQILKEHPVENTQLQNEKLYLYYLQNGRDMYVDQELDINRLSDYDVDHIVPQSFLKDDSIDNKVLTRSDKARGKSDNVPSEEVVKKMKNYWRQLLNAKLITQRKFDNLTKAERGGLSELDKAGFIKRQLVETRQITKHVAQILDSRMNTKYDENDKLIREVKVITLKSKLVSDFRKDFQFYKVREINNYHHAHDAYLNAVVGTALIKKYPKLESEFVYGDYKVYDVRKMIAKSEQEIGKATAKYFFYSNIMNFFKTEITLANGEIRKRPLIETNGETGEIVWDKGRDFATVRKVLSMPQVNIVKKTEVQTGGFSKESILPKRNSDKLIARKKDWDPKKYGGFDSPTVAYSVLVVAKVEKGKSKKLKSVKELLGITIMERSSFEKNPIDFLEAKGYKEVKKDLIIKLPKYSLFELENGRKRMLASAGELQKGNELALPSKYVNFLYLASHYEKLKGSPEDNEQKQLFVEQHKHYLDEIIEQISEFSKRVILADANLDKVLSAYNKHRDKPIREQAENIIHLFTLTNLGAPAAFKYFDTTIDRKRYTSTKEVLDATLIHQSITGLYETRIDLSQLGGDGGGGSGGLGIEDEYRLHETSTEPDVSLGSTWLSDFPQAWAETGGMGLAVRQAPLIIPLKATSTPVSIQQYPMSHEARLGIKPHIQRLLDQGILVPCQSPWNTPLLPVKKPGTNDYRPVQDLREVNKRVEDIHPTVPNPYNLLSGLPPSHQWYTVLDLKDAFFCLRLHPTSQPLFAFEWRDPGMGISGQLTWTRLPQGFKNSPTLFNEALHRDLADFRIQHPDLILLQYVDDILLAATSELDCQQGTRALLQTLGDLGYRASAKKAQICQKQVKYLGYLLREGQRWLTEARKETVMGQPVPKTPRQLREFLGKAGFCRLFIPGFAEMAAPLYPLTKPGTLFSWGPDQQKAYQEIKQALLTAPALGLPDLTKPFELFVDEKQGYAKGVLTQKLGPWRRPVAYLSKKLDPVAAGWPPCLRMVAAIAVLTKDAGKLTMGQPLVILAPHAVEALVKQPPDRWLSNARMTHYQAMLLDTDRVQFGPVVALNPATLLPLPEEGAPHDCLEILAETHGTRPDLTDQPIPDADHTWYTDGSSFLQEGQRKAGAAVTTETEVIWAGALPAGTSAQRAELIALTQALKMAEGKRLNVYTDSRYAFATAHIHGEIYRRRGWLTSEGREIKNKSEILALLKALFLPKRLSIIHCLGHQKGDSAEARGNRLADQAAREAAIKTPPDTSTLLIAGKRTADGSEFEKRTADGSEFESPKKKAKVE

SEQ ID NO: 2132 - protein, 2096 aa, synthetic construct
MPAAKRVKLDGGDKKYSIGLDIGTNSVGWAVITDEYKVPSKKFKVLGNTDRHSIKKNLIGALLFDSGETAEATRLKRTARRRYTRRKNRICYLQEIFSNEMAKVDDSFFHRLEESFLVEEDKKHERHPIFGNIVDEVAYHEKYPTIYHLRKKLVDSTDKADLRLIYLALAHMIKFRGHFLIEGDLNPDNSDVDKLFIQLVQTYNQLFEENPINASGVDAKAILSARLSKSRRLENLIAQLPGEKKNGLFGNLIALSLGLTPNFKSNFDLAEDAKLQLSKDTYDDDLDNLLAQIGDQYADLFLAAKNLSDAILLSDILRVNTEITKAPLSASMIKRYDEHHQDLTLLKALVRQQLPEKYKEIFFDQSKNGYAGYIDGGASQEEFYKFIKPILEKMDGTEELLVKLNREDLLRKQRTFDNGSIPHQIHLGELHAILRRQEDFYPFLKDNREKIEKILTFRIPYYVGPLARGNSRFAWMTRKSEETITPWNFEEVVDKGASAQSFIERMTNFDKNLPNEKVLPKHSLLYEYFTVYNELTKVKYVTEGMRKPAFLSGEQKKAIVDLLFKTNRKVTVKQLKEDYFKKIECFDSVEISGVEDRFNASLGTYHDLLKIIKDKDFLDNEENEDILEDIVLTLTLFEDREMIEERLKTYAHLFDDKVMKQLKRRRYTGWGRLSRKLINGIRDKQSGKTILDFLKSDGFANRNFMQLIHDDSLTFKEDIQKAQVSGQGDSLHEHIANLAGSPAIKKGILQTVKVVDELVKVMGRHKPENIVIEMARENQTTQKGQKNSRERMKRIEEGIKELGSQILKEHPVENTQLQNEKLYLYYLQNGRDMYVDQELDINRLSDYDVDHIVPQSFLKDDSIDNKVLTRSDKARGKSDNVPSEEVVKKMKNYWRQLLNAKLITQRKFDNLTKAERGGLSELDKAGFIKRQLVETRQITKHVAQILDSRMNTKYDENDKLIREVKVITLKSKLVSDFRKDFQFYKVREINNYHHAHDAYLNAVVGTALIKKYPKLESEFVYGDYKVYDVRKMIAKSEQEIGKATAKYFFYSNIMNFFKTEITLANGEIRKRPLIETNGETGEIVWDKGRDFATVRKVLSMPQVNIVKKTEVQTGGFSKESILPKRNSDKLIARKKDWDPKKYGGFDSPTVAYSVLVVAKVEKGKSKKLKSVKELLGITIMERSSFEKNPIDFLEAKGYKEVKKDLIIKLPKYSLFELENGRKRMLASAGELQKGNELALPSKYVNFLYLASHYEKLKGSPEDNEQKQLFVEQHKHYLDEIIEQISEFSKRVILADANLDKVLSAYNKHRDKPIREQAENIIHLFTLTNLGAPAAFKYFDTTIDRKRYTSTKEVLDATLIHQSITGLYETRIDLSQLGGDGGGGGEAAAKGGSGGLGIEDEYRLHETSTEPDVSLGSTWLSDFPQAWAETGGMGLAVRQAPLIIPLKATSTPVSIQQYPMSHEARLGIKPHIQRLLDQGILVPCQSPWNTPLLPVKKPGTNDYRPVQDLREVNKRVEDIHPTVPNPYNLLSGLPPSHQWYTVLDLKDAFFCLRLHPTSQPLFAFEWRDPGMGISGQLTWTRLPQGFKNSPTLFNEALHRDLADFRIQHPDLILLQYVDDILLAATSELDCQQGTRALLQTLGDLGYRASAKKAQICQKQVKYLGYLLREGQRWLTEARKETVMGQPVPKTPRQLREFLGKAGFCRLFIPGFAEMAAPLYPLTKPGTLFSWGPDQQKAYQEIKQALLTAPALGLPDLTKPFELFVDEKQGYAKGVLTQKLGPWRRPVAYLSKKLDPVAAGWPPCLRMVAAIAVLTKDAGKLTMGQPLVILAPHAVEALVKQPPDRWLSNARMTHYQAMLLDTDRVQFGPVVALNPATLLPLPEEGAPHDCLEILAETHGTRPDLTDQPIPDADHTWYTDGSSFLQEGQRKAGAAVTTETEVIWAGALPAGTSAQRAELIALTQALKMAEGKRLNVYTDSRYAFATAHIHGEIYRRRGWLTSEGREIKNKSEILALLKALFLPKRLSIIHCLGHQKGDSAEARGNRLADQAAREAAIKTPPDTSTLLIAGKRTADGSEFEKRTADGSEFESPKKKAKVE

SEQ ID NO: 2133 - protein, 2094 aa, synthetic construct
MPAAKRVKLDGGDKKYSIGLDIGTNSVGWAVITDEYKVPSKKFKVLGNTDRHSIKKNLIGALLFDSGETAEATRLKRTARRRYTRRKNRICYLQEIFSNEMAKVDDSFFHRLEESFLVEEDKKHERHPIFGNIVDEVAYHEKYPTIYHLRKKLVDSTDKADLRLIYLALAHMIKFRGHFLIEGDLNPDNSDVDKLFIQLVQTYNQLFEENPINASGVDAKAILSARLSKSRRLENLIAQLPGEKKNGLFGNLIALSLGLTPNFKSNFDLAEDAKLQLSKDTYDDDLDNLLAQIGDQYADLFLAAKNLSDAILLSDILRVNTEITKAPLSASMIKRYDEHHQDLTLLKALVRQQLPEKYKEIFFDQSKNGYAGYIDGGASQEEFYKFIKPILEKMDGTEELLVKLNREDLLRKQRTFDNGSIPHQIHLGELHAILRRQEDFYPFLKDNREKIEKILTFRIPYYVGPLARGNSRFAWMTRKSEETITPWNFEEVVDKGASAQSFIERMTNFDKNLPNEKVLPKHSLLYEYFTVYNELTKVKYVTEGMRKPAFLSGEQKKAIVDLLFKTNRKVTVKQLKEDYFKKIECFDSVEISGVEDRFNASLGTYHDLLKIIKDKDFLDNEENEDILEDIVLTLTLFEDREMIEERLKTYAHLFDDKVMKQLKRRRYTGWGRLSRKLINGIRDKQSGKTILDFLKSDGFANRNFMQLIHDDSLTFKEDIQKAQVSGQGDSLHEHIANLAGSPAIKKGILQTVKVVDELVKVMGRHKPENIVIEMARENQTTQKGQKNSRERMKRIEEGIKELGSQILKEHPVENTQLQNEKLYLYYLQNGRDMYVDQELDINRLSDYDVDHIVPQSFLKDDSIDNKVLTRSDKARGKSDNVPSEEVVKKMKNYWRQLLNAKLITQRKFDNLTKAERGGLSELDKAGFIKRQLVETRQITKHVAQILDSRMNTKYDENDKLIREVKVITLKSKLVSDFRKDFQFYKVREINNYHHAHDAYLNAVVGTALIKKYPKLESEFVYGDYKVYDVRKMIAKSEQEIGKATAKYFFYSNIMNFFKTEITLANGEIRKRPLIETNGETGEIVWDKGRDFATVRKVLSMPQVNIVKKTEVQTGGFSKESILPKRNSDKLIARKKDWDPKKYGGFDSPTVAYSVLVVAKVEKGKSKKLKSVKELLGITIMERSSFEKNPIDFLEAKGYKEVKKDLIIKLPKYSLFELENGRKRMLASAGELQKGNELALPSKYVNFLYLASHYEKLKGSPEDNEQKQLFVEQHKHYLDEIIEQISEFSKRVILADANLDKVLSAYNKHRDKPIREQAENIIHLFTLTNLGAPAAFKYFDTTIDRKRYTSTKEVLDATLIHQSITGLYETRIDLSQLGGDGGGGGGGSPAPGGLGIEDEYRLHETSTEPDVSLGSTWLSDFPQAWAETGGMGLAVRQAPLIIPLKATSTPVSIQQYPMSHEARLGIKPHIQRLLDQGILVPCQSPWNTPLLPVKKPGTNDYRPVQDLREVNKRVEDIHPTVPNPYNLLSGLPPSHQWYTVLDLKDAFFCLRLHPTSQPLFAFEWRDPGMGISGQLTWTRLPQGFKNSPTLFNEALHRDLADFRIQHPDLILLQYVDDILLAATSELDCQQGTRALLQTLGDLGYRASAKKAQICQKQVKYLGYLLREGQRWLTEARKETVMGQPVPKTPRQLREFLGKAGFCRLFIPGFAEMAAPLYPLTKPGTLFSWGPDQQKAYQEIKQALLTAPALGLPDLTKPFELFVDEKQGYAKGVLTQKLGPWRRPVAYLSKKLDPVAAGWPPCLRMVAAIAVLTKDAGKLTMGQPLVILAPHAVEALVKQPPDRWLSNARMTHYQAMLLDTDRVQFGPVVALNPATLLPLPEEGAPHDCLEILAETHGTRPDLTDQPIPDADHTWYTDGSSFLQEGQRKAGAAVTTETEVIWAGALPAGTSAQRAELIALTQALKMAEGKRLNVYTDSRYAFATAHIHGEIYRRRGWLTSEGREIKNKSEILALLKALFLPKRLSIIHCLGHQKGDSAEARGNRLADQAAREAAIKTPPDTSTLLIAGKRTADGSEFEKRTADGSEFESPKKKAKVE

SEQ ID NO: 2134 - protein, 2091 aa, synthetic construct
MPAAKRVKLDGGDKKYSIGLDIGTNSVGWAVITDEYKVPSKKFKVLGNTDRHSIKKNLIGALLFDSGETAEATRLKRTARRRYTRRKNRICYLQEIFSNEMAKVDDSFFHRLEESFLVEEDKKHERHPIFGNIVDEVAYHEKYPTIYHLRKKLVDSTDKADLRLIYLALAHMIKFRGHFLIEGDLNPDNSDVDKLFIQLVQTYNQLFEENPINASGVDAKAILSARLSKSRRLENLIAQLPGEKKNGLFGNLIALSLGLTPNFKSNFDLAEDAKLQLSKDTYDDDLDNLLAQIGDQYADLFLAAKNLSDAILLSDILRVNTEITKAPLSASMIKRYDEHHQDLTLLKALVRQQLPEKYKEIFFDQSKNGYAGYIDGGASQEEFYKFIKPILEKMDGTEELLVKLNREDLLRKQRTFDNGSIPHQIHLGELHAILRRQEDFYPFLKDNREKIEKILTFRIPYYVGPLARGNSRFAWMTRKSEETITPWNFEEVVDKGASAQSFIERMTNFDKNLPNEKVLPKHSLLYEYFTVYNELTKVKYVTEGMRKPAFLSGEQKKAIVDLLFKTNRKVTVKQLKEDYFKKIECFDSVEISGVEDRFNASLGTYHDLLKIIKDKDFLDNEENEDILEDIVLTLTLFEDREMIEERLKTYAHLFDDKVMKQLKRRRYTGWGRLSRKLINGIRDKQSGKTILDFLKSDGFANRNFMQLIHDDSLTFKEDIQKAQVSGQGDSLHEHIANLAGSPAIKKGILQTVKVVDELVKVMGRHKPENIVIEMARENQTTQKGQKNSRERMKRIEEGIKELGSQILKEHPVENTQLQNEKLYLYYLQNGRDMYVDQELDINRLSDYDVDHIVPQSFLKDDSIDNKVLTRSDKARGKSDNVPSEEVVKKMKNYWRQLLNAKLITQRKFDNLTKAERGGLSELDKAGFIKRQLVETRQITKHVAQILDSRMNTKYDENDKLIREVKVITLKSKLVSDFRKDFQFYKVREINNYHHAHDAYLNAVVGTALIKKYPKLESEFVYGDYKVYDVRKMIAKSEQEIGKATAKYFFYSNIMNFFKTEITLANGEIRKRPLIETNGETGEIVWDKGRDFATVRKVLSMPQVNIVKKTEVQTGGFSKESILPKRNSDKLIARKKDWDPKKYGGFDSPTVAYSVLVVAKVEKGKSKKLKSVKELLGITIMERSSFEKNPIDFLEAKGYKEVKKDLIIKLPKYSLFELENGRKRMLASAGELQKGNELALPSKYVNFLYLASHYEKLKGSPEDNEQKQLFVEQHKHYLDEIIEQISEFSKRVILADANLDKVLSAYNKHRDKPIREQAENIIHLFTLTNLGAPAAFKYFDTTIDRKRYTSTKEVLDATLIHQSITGLYETRIDLSQLGGDGGPAPGGGGGLGIEDEYRLHETSTEPDVSLGSTWLSDFPQAWAETGGMGLAVRQAPLIIPLKATSTPVSIQQYPMSHEARLGIKPHIQRLLDQGILVPCQSPWNTPLLPVKKPGTNDYRPVQDLREVNKRVEDIHPTVPNPYNLLSGLPPSHQWYTVLDLKDAFFCLRLHPTSQPLFAFEWRDPGMGISGQLTWTRLPQGFKNSPTLFNEALHRDLADFRIQHPDLILLQYVDDILLAATSELDCQQGTRALLQTLGDLGYRASAKKAQICQKQVKYLGYLLREGQRWLTEARKETVMGQPVPKTPRQLREFLGKAGFCRLFIPGFAEMAAPLYPLTKPGTLFSWGPDQQKAYQEIKQALLTAPALGLPDLTKPFELFVDEKQGYAKGVLTQKLGPWRRPVAYLSKKLDPVAAGWPPCLRMVAAIAVLTKDAGKLTMGQPLVILAPHAVEALVKQPPDRWLSNARMTHYQAMLLDTDRVQFGPVVALNPATLLPLPEEGAPHDCLEILAETHGTRPDLTDQPIPDADHTWYTDGSSFLQEGQRKAGAAVTTETEVIWAGALPAGTSAQRAELIALTQALKMAEGKRLNVYTDSRYAFATAHIHGEIYRRRGWLTSEGREIKNKSEILALLKALFLPKRLSIIHCLGHQKGDSAEARGNRLADQAAREAAIKTPPDTSTLLIAGKRTADGSEFEKRTADGSEFESPKKKAKVE

SEQ ID NO: 2135 - protein, 2096 aa, synthetic construct
MPAAKRVKLDGGDKKYSIGLDIGTNSVGWAVITDEYKVPSKKFKVLGNTDRHSIKKNLIGALLFDSGETAEATRLKRTARRRYTRRKNRICYLQEIFSNEMAKVDDSFFHRLEESFLVEEDKKHERHPIFGNIVDEVAYHEKYPTIYHLRKKLVDSTDKADLRLIYLALAHMIKFRGHFLIEGDLNPDNSDVDKLFIQLVQTYNQLFEENPINASGVDAKAILSARLSKSRRLENLIAQLPGEKKNGLFGNLIALSLGLTPNFKSNFDLAEDAKLQLSKDTYDDDLDNLLAQIGDQYADLFLAAKNLSDAILLSDILRVNTEITKAPLSASMIKRYDEHHQDLTLLKALVRQQLPEKYKEIFFDQSKNGYAGYIDGGASQEEFYKFIKPILEKMDGTEELLVKLNREDLLRKQRTFDNGSIPHQIHLGELHAILRRQEDFYPFLKDNREKIEKILTFRIPYYVGPLARGNSRFAWMTRKSEETITPWNFEEVVDKGASAQSFIERMTNFDKNLPNEKVLPKHSLLYEYFTVYNELTKVKYVTEGMRKPAFLSGEQKKAIVDLLFKTNRKVTVKQLKEDYFKKIECFDSVEISGVEDRFNASLGTYHDLLKIIKDKDFLDNEENEDILEDIVLTLTLFEDREMIEERLKTYAHLFDDKVMKQLKRRRYTGWGRLSRKLINGIRDKQSGKTILDFLKSDGFANRNFMQLIHDDSLTFKEDIQKAQVSGQGDSLHEHIANLAGSPAIKKGILQTVKVVDELVKVMGRHKPENIVIEMARENQTTQKGQKNSRERMKRIEEGIKELGSQILKEHPVENTQLQNEKLYLYYLQNGRDMYVDQELDINRLSDYDVDHIVPQSFLKDDSIDNKVLTRSDKARGKSDNVPSEEVVKKMKNYWRQLLNAKLITQRKFDNLTKAERGGLSELDKAGFIKRQLVETRQITKHVAQILDSRMNTKYDENDKLIREVKVITLKSKLVSDFRKDFQFYKVREINNYHHAHDAYLNAVVGTALIKKYPKLESEFVYGDYKVYDVRKMIAKSEQEIGKATAKYFFYSNIMNFFKTEITLANGEIRKRPLIETNGETGEIVWDKGRDFATVRKVLSMPQVNIVKKTEVQTGGFSKESILPKRNSDKLIARKKDWDPKKYGGFDSPTVAYSVLVVAKVEKGKSKKLKSVKELLGITIMERSSFEKNPIDFLEAKGYKEVKKDLIIKLPKYSLFELENGRKRMLASAGELQKGNELALPSKYVNFLYLASHYEKLKGSPEDNEQKQLFVEQHKHYLDEIIEQISEFSKRVILADANLDKVLSAYNKHRDKPIREQAENIIHLFTLTNLGAPAAFKYFDTTIDRKRYTSTKEVLDATLIHQSITGLYETRIDLSQLGGDGGGGGEAAAKPAPGGLGIEDEYRLHETSTEPDVSLGSTWLSDFPQAWAETGGMGLAVRQAPLIIPLKATSTPVSIQQYPMSHEARLGIKPHIQRLLDQGILVPCQSPWNTPLLPVKKPGTNDYRPVQDLREVNKRVEDIHPTVPNPYNLLSGLPPSHQWYTVLDLKDAFFCLRLHPTSQPLFAFEWRDPGMGISGQLTWTRLPQGFKNSPTLFNEALHRDLADFRIQHPDLILLQYVDDILLAATSELDCQQGTRALLQTLGDLGYRASAKKAQICQKQVKYLGYLLREGQRWLTEARKETVMGQPVPKTPRQLREFLGKAGFCRLFIPGFAEMAAPLYPLTKPGTLFSWGPDQQKAYQEIKQALLTAPALGLPDLTKPFELFVDEKQGYAKGVLTQKLGPWRRPVAYLSKKLDPVAAGWPPCLRMVAAIAVLTKDAGKLTMGQPLVILAPHAVEALVKQPPDRWLSNARMTHYQAMLLDTDRVQFGPVVALNPATLLPLPEEGAPHDCLEILAETHGTRPDLTDQPIPDADHTWYTDGSSFLQEGQRKAGAAVTTETEVIWAGALPAGTSAQRAELIALTQALKMAEGKRLNVYTDSRYAFATAHIHGEIYRRRGWLTSEGREIKNKSEILALLKALFLPKRLSIIHCLGHQKGDSAEARGNRLADQAAREAAIKTPPDTSTLLIAGKRTADGSEFEKRTADGSEFESPKKKAKVE

SEQ ID NO: 2136 - protein, 2091 aa, synthetic construct
MPAAKRVKLDGGDKKYSIGLDIGTNSVGWAVITDEYKVPSKKFKVLGNTDRHSIKKNLIGALLFDSGETAEATRLKRTARRRYTRRKNRICYLQEIFSNEMAKVDDSFFHRLEESFLVEEDKKHERHPIFGNIVDEVAYHEKYPTIYHLRKKLVDSTDKADLRLIYLALAHMIKFRGHFLIEGDLNPDNSDVDKLFIQLVQTYNQLFEENPINASGVDAKAILSARLSKSRRLENLIAQLPGEKKNGLFGNLIALSLGLTPNFKSNFDLAEDAKLQLSKDTYDDDLDNLLAQIGDQYADLFLAAKNLSDAILLSDILRVNTEITKAPLSASMIKRYDEHHQDLTLLKALVRQQLPEKYKEIFFDQSKNGYAGYIDGGASQEEFYKFIKPILEKMDGTEELLVKLNREDLLRKQRTFDNGSIPHQIHLGELHAILRRQEDFYPFLKDNREKIEKILTFRIPYYVGPLARGNSRFAWMTRKSEETITPWNFEEVVDKGASAQSFIERMTNFDKNLPNEKVLPKHSLLYEYFTVYNELTKVKYVTEGMRKPAFLSGEQKKAIVDLLFKTNRKVTVKQLKEDYFKKIECFDSVEISGVEDRFNASLGTYHDLLKIIKDKDFLDNEENEDILEDIVLTLTLFEDREMIEERLKTYAHLFDDKVMKQLKRRRYTGWGRLSRKLINGIRDKQSGKTILDFLKSDGFANRNFMQLIHDDSLTFKEDIQKAQVSGQGDSLHEHIANLAGSPAIKKGILQTVKVVDELVKVMGRHKPENIVIEMARENQTTQKGQKNSRERMKRIEEGIKELGSQILKEHPVENTQLQNEKLYLYYLQNGRDMYVDQELDINRLSDYDVDHIVPQSFLKDDSIDNKVLTRSDKARGKSDNVPSEEVVKKMKNYWRQLLNAKLITQRKFDNLTKAERGGLSELDKAGFIKRQLVETRQITKHVAQILDSRMNTKYDENDKLIREVKVITLKSKLVSDFRKDFQFYKVREINNYHHAHDAYLNAVVGTALIKKYPKLESEFVYGDYKVYDVRKMIAKSEQEIGKATAKYFFYSNIMNFFKTEITLANGEIRKRPLIETNGETGEIVWDKGRDFATVRKVLSMPQVNIVKKTEVQTGGFSKESILPKRNSDKLIARKKDWDPKKYGGFDSPTVAYSVLVVAKVEKGKSKKLKSVKELLGITIMERSSFEKNPIDFLEAKGYKEVKKDLIIKLPKYSLFELENGRKRMLASAGELQKGNELALPSKYVNFLYLASHYEKLKGSPEDNEQKQLFVEQHKHYLDEIIEQISEFSKRVILADANLDKVLSAYNKHRDKPIREQAENIIHLFTLTNLGAPAAFKYFDTTIDRKRYTSTKEVLDATLIHQSITGLYETRIDLSQLGGDGGGGSPAPGGLGIEDEYRLHETSTEPDVSLGSTWLSDFPQAWAETGGMGLAVRQAPLIIPLKATSTPVSIQQYPMSHEARLGIKPHIQRLLDQGILVPCQSPWNTPLLPVKKPGTNDYRPVQDLREVNKRVEDIHPTVPNPYNLLSGLPPSHQWYTVLDLKDAFFCLRLHPTSQPLFAFEWRDPGMGISGQLTWTRLPQGFKNSPTLFNEALHRDLADFRIQHPDLILLQYVDDILLAATSELDCQQGTRALLQTLGDLGYRASAKKAQICQKQVKYLGYLLREGQRWLTEARKETVMGQPVPKTPRQLREFLGKAGFCRLFIPGFAEMAAPLYPLTKPGTLFSWGPDQQKAYQEIKQALLTAPALGLPDLTKPFELFVDEKQGYAKGVLTQKLGPWRRPVAYLSKKLDPVAAGWPPCLRMVAAIAVLTKDAGKLTMGQPLVILAPHAVEALVKQPPDRWLSNARMTHYQAMLLDTDRVQFGPVVALNPATLLPLPEEGAPHDCLEILAETHGTRPDLTDQPIPDADHTWYTDGSSFLQEGQRKAGAAVTTETEVIWAGALPAGTSAQRAELIALTQALKMAEGKRLNVYTDSRYAFATAHIHGEIYRRRGWLTSEGREIKNKSEILALLKALFLPKRLSIIHCLGHQKGDSAEARGNRLADQAAREAAIKTPPDTSTLLIAGKRTADGSEFEKRTADGSEFESPKKKAKVE

SEQ ID NO: 2137 - protein, 2097 aa, synthetic construct
MPAAKRVKLDGGDKKYSIGLDIGTNSVGWAVITDEYKVPSKKFKVLGNTDRHSIKKNLIGALLFDSGETAEATRLKRTARRRYTRRKNRICYLQEIFSNEMAKVDDSFFHRLEESFLVEEDKKHERHPIFGNIVDEVAYHEKYPTIYHLRKKLVDSTDKADLRLIYLALAHMIKFRGHFLIEGDLNPDNSDVDKLFIQLVQTYNQLFEENPINASGVDAKAILSARLSKSRRLENLIAQLPGEKKNGLFGNLIALSLGLTPNFKSNFDLAEDAKLQLSKDTYDDDLDNLLAQIGDQYADLFLAAKNLSDAILLSDILRVNTEITKAPLSASMIKRYDEHHQDLTLLKALVRQQLPEKYKEIFFDQSKNGYAGYIDGGASQEEFYKFIKPILEKMDGTEELLVKLNREDLLRKQRTFDNGSIPHQIHLGELHAILRRQEDFYPFLKDNREKIEKILTFRIPYYVGPLARGNSRFAWMTRKSEETITPWNFEEVVDKGASAQSFIERMTNFDKNLPNEKVLPKHSLLYEYFTVYNELTKVKYVTEGMRKPAFLSGEQKKAIVDLLFKTNRKVTVKQLKEDYFKKIECFDSVEISGVEDRFNASLGTYHDLLKIIKDKDFLDNEENEDILEDIVLTLTLFEDREMIEERLKTYAHLFDDKVMKQLKRRRYTGWGRLSRKLINGIRDKQSGKTILDFLKSDGFANRNFMQLIHDDSLTFKEDIQKAQVSGQGDSLHEHIANLAGSPAIKKGILQTVKVVDELVKVMGRHKPENIVIEMARENQTTQKGQKNSRERMKRIEEGIKELGSQILKEHPVENTQLQNEKLYLYYLQNGRDMYVDQELDINRLSDYDVDHIVPQSFLKDDSIDNKVLTRSDKARGKSDNVPSEEVVKKMKNYWRQLLNAKLITQRKFDNLTKAERGGLSELDKAGFIKRQLVETRQITKHVAQILDSRMNTKYDENDKLIREVKVITLKSKLVSDFRKDFQFYKVREINNYHHAHDAYLNAVVGTALIKKYPKLESEFVYGDYKVYDVRKMIAKSEQEIGKATAKYFFYSNIMNFFKTEITLANGEIRKRPLIETNGETGEIVWDKGRDFATVRKVLSMPQVNIVKKTEVQTGGFSKESILPKRNSDKLIARKKDWDPKKYGGFDSPTVAYSVLVVAKVEKGKSKKLKSVKELLGITIMERSSFEKNPIDFLEAKGYKEVKKDLIIKLPKYSLFELENGRKRMLASAGELQKGNELALPSKYVNFLYLASHYEKLKGSPEDNEQKQLFVEQHKHYLDEIIEQISEFSKRVILADANLDKVLSAYNKHRDKPIREQAENIIHLFTLTNLGAPAAFKYFDTTIDRKRYTSTKEVLDATLIHQSITGLYETRIDLSQLGGDGGGGSGGSGGSGGSGGLGIEDEYRLHETSTEPDVSLGSTWLSDFPQAWAETGGMGLAVRQAPLIIPLKATSTPVSIQQYPMSHEARLGIKPHIQRLLDQGILVPCQSPWNTPLLPVKKPGTNDYRPVQDLREVNKRVEDIHPTVPNPYNLLSGLPPSHQWYTVLDLKDAFFCLRLHPTSQPLFAFEWRDPGMGISGQLTWTRLPQGFKNSPTLFNEALHRDLADFRIQHPDLILLQYVDDILLAATSELDCQQGTRALLQTLGDLGYRASAKKAQICQKQVKYLGYLLREGQRWLTEARKETVMGQPVPKTPRQLREFLGKAGFCRLFIPGFAEMAAPLYPLTKPGTLFSWGPDQQKAYQEIKQALLTAPALGLPDLTKPFELFVDEKQGYAKGVLTQKLGPWRRPVAYLSKKLDPVAAGWPPCLRMVAAIAVLTKDAGKLTMGQPLVILAPHAVEALVKQPPDRWLSNARMTHYQAMLLDTDRVQFGPVVALNPATLLPLPEEGAPHDCLEILAETHGTRPDLTDQPIPDADHTWYTDGSSFLQEGQRKAGAAVTTETEVIWAGALPAGTSAQRAELIALTQALKMAEGKRLNVYTDSRYAFATAHIHGEIYRRRGWLTSEGREIKNKSEILALLKALFLPKRLSIIHCLGHQKGDSAEARGNRLADQAAREAAIKTPPDTSTLLIAGKRTADGSEFEKRTADGSEFESPKKKAKVE

SEQ ID NO: 2138 - protein, 2094 aa, synthetic construct; identical to SEQ ID NO: 2061

SEQ ID NO: 2139 - protein, 2096 aa, synthetic construct
MPAAKRVKLDGGDKKYSIGLDIGTNSVGWAVITDEYKVPSKKFKVLGNTDRHSIKKNLIGALLFDSGETAEATRLKRTARRRYTRRKNRICYLQEIFSNEMAKVDDSFFHRLEESFLVEEDKKHERHPIFGNIVDEVAYHEKYPTIYHLRKKLVDSTDKADLRLIYLALAHMIKFRGHFLIEGDLNPDNSDVDKLFIQLVQTYNQLFEENPINASGVDAKAILSARLSKSRRLENLIAQLPGEKKNGLFGNLIALSLGLTPNFKSNFDLAEDAKLQLSKDTYDDDLDNLLAQIGDQYADLFLAAKNLSDAILLSDILRVNTEITKAPLSASMIKRYDEHHQDLTLLKALVRQQLPEKYKEIFFDQSKNGYAGYIDGGASQEEFYKFIKPILEKMDGTEELLVKLNREDLLRKQRTFDNGSIPHQIHLGELHAILRRQEDFYPFLKDNREKIEKILTFRIPYYVGPLARGNSRFAWMTRKSEETITPWNFEEVVDKGASAQSFIERMTNFDKNLPNEKVLPKHSLLYEYFTVYNELTKVKYVTEGMRKPAFLSGEQKKAIVDLLFKTNRKVTVKQLKEDYFKKIECFDSVEISGVEDRFNASLGTYHDLLKIIKDKDFLDNEENEDILEDIVLTLTLFEDREMIEERLKTYAHLFDDKVMKQLKRRRYTGWGRLSRKLINGIRDKQSGKTILDFLKSDGFANRNFMQLIHDDSLTFKEDIQKAQVSGQGDSLHEHIANLAGSPAIKKGILQTVKVVDELVKVMGRHKPENIVIEMARENQTTQKGQKNSRERMKRIEEGIKELGSQILKEHPVENTQLQNEKLYLYYLQNGRDMYVDQELDINRLSDYDVDHIVPQSFLKDDSIDNKVLTRSDKARGKSDNVPSEEVVKKMKNYWRQLLNAKLITQRKFDNLTKAERGGLSELDKAGFIKRQLVETRQITKHVAQILDSRMNTKYDENDKLIREVKVITLKSKLVSDFRKDFQFYKVREINNYHHAHDAYLNAVVGTALIKKYPKLESEFVYGDYKVYDVRKMIAKSEQEIGKATAKYFFYSNIMNFFKTEITLANGEIRKRPLIETNGETGEIVWDKGRDFATVRKVLSMPQVNIVKKTEVQTGGFSKESILPKRNSDKLIARKKDWDPKKYGGFDSPTVAYSVLVVAKVEKGKSKKLKSVKELLGITIMERSSFEKNPIDFLEAKGYKEVKKDLIIKLPKYSLFELENGRKRMLASAGELQKGNELALPSKYVNFLYLASHYEKLKGSPEDNEQKQLFVEQHKHYLDEIIEQISEFSKRVILADANLDKVLSAYNKHRDKPIREQAENIIHLFTLTNLGAPAAFKYFDTTIDRKRYTSTKEVLDATLIHQSITGLYETRIDLSQLGGDGGGGSPAPEAAAKGGLGIEDEYRLHETSTEPDVSLGSTWLSDFPQAWAETGGMGLAVRQAPLIIPLKATSTPVSIQQYPMSHEARLGIKPHIQRLLDQGILVPCQSPWNTPLLPVKKPGTNDYRPVQDLREVNKRVEDIHPTVPNPYNLLSGLPPSHQWYTVLDLKDAFFCLRLHPTSQPLFAFEWRDPGMGISGQLTWTRLPQGFKNSPTLFNEALHRDLADFRIQHPDLILLQYVDDILLAATSELDCQQGTRALLQTLGDLGYRASAKKAQICQKQVKYLGYLLREGQRWLTEARKETVMGQPVPKTPRQLREFLGKAGFCRLFIPGFAEMAAPLYPLTKPGTLFSWGPDQQKAYQEIKQALLTAPALGLPDLTKPFELFVDEKQGYAKGVLTQKLGPWRRPVAYLSKKLDPVAAGWPPCLRMVAAIAVLTKDAGKLTMGQPLVILAPHAVEALVKQPPDRWLSNARMTHYQAMLLDTDRVQFGPVVALNPATLLPLPEEGAPHDCLEILAETHGTRPDLTDQPIPDADHTWYTDGSSFLQEGQRKAGAAVTTETEVIWAGALPAGTSAQRAELIALTQALKMAEGKRLNVYTDSRYAFATAHIHGEIYRRRGWLTSEGREIKNKSEILALLKALFLPKRLSIIHCLGHQKGDSAEARGNRLADQAAREAAIKTPPDTSTLLIAGKRTADGSEFEKRTADGSEFESPKKKAKVE

SEQ ID NO: 2140 - protein, 2103 aa, synthetic construct
MPAAKRVKLDGGDKKYSIGLDIGTNSVGWAVITDEYKVPSKKFKVLGNTDRHSIKKNLIGALLFDSGETAEATRLKRTARRRYTRRKNRICYLQEIFSNEMAKVDDSFFHRLEESFLVEEDKKHERHPIFGNIVDEVAYHEKYPTIYHLRKKLVDSTDKADLRLIYLALAHMIKFRGHFLIEGDLNPDNSDVDKLFIQLVQTYNQLFEENPINASGVDAKAILSARLSKSRRLENLIAQLPGEKKNGLFGNLIALSLGLTPNFKSNFDLAEDAKLQLSKDTYDDDLDNLLAQIGDQYADLFLAAKNLSDAILLSDILRVNTEITKAPLSASMIKRYDEHHQDLTLLKALVRQQLPEKYKEIFFDQSKNGYAGYIDGGASQEEFYKFIKPILEKMDGTEELLVKLNREDLLRKQRTFDNGSIPHQIHLGELHAILRRQEDFYPFLKDNREKIEKILTFRIPYYVGPLARGNSRFAWMTRKSEETITPWNFEEVVDKGASAQSFIERMTNFDKNLPNEKVLPKHSLLYEYFTVYNELTKVKYVTEGMRKPAFLSGEQKKAIVDLLFKTNRKVTVKQLKEDYFKKIECFDSVEISGVEDRFNASLGTYHDLLKIIKDKDFLDNEENEDILEDIVLTLTLFEDREMIEERLKTYAHLFDDKVMKQLKRRRYTGWGRLSRKLINGIRDKQSGKTILDFLKSDGFANRNFMQLIHDDSLTFKEDIQKAQVSGQGDSLHEHIANLAGSPAIKKGILQTVKVVDELVKVMGRHKPENIVIEMARENQTTQKGQKNSRERMKRIEEGIKELGSQILKEHPVENTQLQNEKLYLYYLQNGRDMYVDQELDINRLSDYDVDHIVPQSFLKDDSIDNKVLTRSDKARGKSDNVPSEEVVKKMKNYWRQLLNAKLITQRKFDNLTKAERGGLSELDKAGFIKRQLVETRQITKHVAQILDSRMNTKYDENDKLIREVKVITLKSKLVSDFRKDFQFYKVREINNYHHAHDAYLNAVVGTALIKKYPKLESEFVYGDYKVYDVRKMIAKSEQEIGKATAKYFFYSNIMNFFKTEITLANGEIRKRPLIETNGETGEIVWDKGRDFATVRKVLSMPQVNIVKKTEVQTGGFSKESILPKRNSDKLIARKKDWDPKKYGGFDSPTVAYSVLVVAKVEKGKSKKLKSVKELLGITIMERSSFEKNPIDFLEAKGYKEVKKDLIIKLPKYSLFELENGRKRMLASAGELQKGNELALPSKYVNFLYLASHYEKLKGSPEDNEQKQLFVEQHKHYLDEIIEQISEFSKRVILADANLDKVLSAYNKHRDKPIREQAENIIHLFTLTNLGAPAAFKYFDTTIDRKRYTSTKEVLDATLIHQSITGLYETRIDLSQLGGDGGGSSGSSGSSGSSGSSGSSGGLGIEDEYRLHETSTEPDVSLGSTWLSDFPQAWAETGGMGLAVRQAPLIIPLKATSTPVSIQQYPMSHEARLGIKPHIQRLLDQGILVPCQSPWNTPLLPVKKPGTNDYRPVQDLREVNKRVEDIHPTVPNPYNLLSGLPPSHQWYTVLDLKDAFFCLRLHPTSQPLFAFEWRDPGMGISGQLTWTRLPQGFKNSPTLFNEALHRDLADFRIQHPDLILLQYVDDILLAATSELDCQQGTRALLQTLGDLGYRASAKKAQICQKQVKYLGYLLREGQRWLTEARKETVMGQPVPKTPRQLREFLGKAGFCRLFIPGFAEMAAPLYPLTKPGTLFSWGPDQQKAYQEIKQALLTAPALGLPDLTKPFELFVDEKQGYAKGVLTQKLGPWRRPVAYLSKKLDPVAAGWPPCLRMVAAIAVLTKDAGKLTMGQPLVILAPHAVEALVKQPPDRWLSNARMTHYQAMLLDTDRVQFGPVVALNPATLLPLPEEGAPHDCLEILAETHGTRPDLTDQPIPDADHTWYTDGSSFLQEGQRKAGAAVTTETEVIWAGALPAGTSAQRAELIALTQALKMAEGKRLNVYTDSRYAFATAHIHGEIYRRRGWLTSEGREIKNKSEILALLKALFLPKRLSIIHCLGHQKGDSAEARGNRLADQAAREAAIKTPPDTSTLLIAGKRTADGSEFEKRTADGSEFESPKKKAKVE

SEQ ID NO: 2141 - protein, 2096 aa, synthetic construct
MPAAKRVKLDGGDKKYSIGLDIGTNSVGWAVITDEYKVPSKKFKVLGNTDRHSIKKNLIGALLFDSGETAEATRLKRTARRRYTRRKNRICYLQEIFSNEMAKVDDSFFHRLEESFLVEEDKKHERHPIFGNIVDEVAYHEKYPTIYHLRKKLVDSTDKADLRLIYLALAHMIKFRGHFLIEGDLNPDNSDVDKLFIQLVQTYNQLFEENPINASGVDAKAILSARLSKSRRLENLIAQLPGEKKNGLFGNLIALSLGLTPNFKSNFDLAEDAKLQLSKDTYDDDLDNLLAQIGDQYADLFLAAKNLSDAILLSDILRVNTEITKAPLSASMIKRYDEHHQDLTLLKALVRQQLPEKYKEIFFDQSKNGYAGYIDGGASQEEFYKFIKPILEKMDGTEELLVKLNREDLLRKQRTFDNGSIPHQIHLGELHAILRRQEDFYPFLKDNREKIEKILTFRIPYYVGPLARGNSRFAWMTRKSEETITPWNFEEVVDKGASAQSFIERMTNFDKNLPNEKVLPKHSLLYEYFTVYNELTKVKYVTEGMRKPAFLSGEQKKAIVDLLFKTNRKVTVKQLKEDYFKKIECFDSVEISGVEDRFNASLGTYHDLLKIIKDKDFLDNEENEDILEDIVLTLTLFEDREMIEERLKTYAHLFDDKVMKQLKRRRYTGWGRLSRKLINGIRDKQSGKTILDFLKSDGFANRNFMQLIHDDSLTFKEDIQKAQVSGQGDSLHEHIANLAGSPAIKKGILQTVKVVDELVKVMGRHKPENIVIEMARENQTTQKGQKNSRERMKRIEEGIKELGSQILKEHPVENTQLQNEKLYLYYLQNGRDMYVDQELDINRLSDYDVDHIVPQSFLKDDSIDNKVLTRSDKARGKSDNVPSEEVVKKMKNYWRQLLNAKLITQRKFDNLTKAERGGLSELDKAGFIKRQLVETRQITKHVAQILDSRMNTKYDENDKLIREVKVITLKSKLVSDFRKDFQFYKVREINNYHHAHDAYLNAVVGTALIKKYPKLESEFVYGDYKVYDVRKMIAKSEQEIGKATAKYFFYSNIMNFFKTEITLANGEIRKRPLIETNGETGEIVWDKGRDFATVRKVLSMPQVNIVKKTEVQTGGFSKESILPKRNSDKLIARKKDWDPKKYGGFDSPTVAYSVLVVAKVEKGKSKKLKSVKELLGITIMERSSFEKNPIDFLEAKGYKEVKKDLIIKLPKYSLFELENGRKRMLASAGELQKGNELALPSKYVNFLYLASHYEKLKGSPEDNEQKQLFVEQHKHYLDEIIEQISEFSKRVILADANLDKVLSAYNKHRDKPIREQAENIIHLFTLTNLGAPAAFKYFDTTIDRKRYTSTKEVLDATLIHQSITGLYETRIDLSQLGGDGGEAAAKGSSGGGGGLGIEDEYRLHETSTEPDVSLGSTWLSDFPQAWAETGGMGLAVRQAPLIIPLKATSTPVSIQQYPMSHEARLGIKPHIQRLLDQGILVPCQSPWNTPLLPVKKPGTNDYRPVQDLREVNKRVEDIHPTVPNPYNLLSGLPPSHQWYTVLDLKDAFFCLRLHPTSQPLFAFEWRDPGMGISGQLTWTRLPQGFKNSPTLFNEALHRDLADFRIQHPDLILLQYVDDILLAATSELDCQQGTRALLQTLGDLGYRASAKKAQICQKQVKYLGYLLREGQRWLTEARKETVMGQPVPKTPRQLREFLGKAGFCRLFIPGFAEMAAPLYPLTKPGTLFSWGPDQQKAYQEIKQALLTAPALGLPDLTKPFELFVDEKQGYAKGVLTQKLGPWRRPVAYLSKKLDPVAAGWPPCLRMVAAIAVLTKDAGKLTMGQPLVILAPHAVEALVKQPPDRWLSNARMTHYQAMLLDTDRVQFGPVVALNPATLLPLPEEGAPHDCLEILAETHGTRPDLTDQPIPDADHTWYTDGSSFLQEGQRKAGAAVTTETEVIWAGALPAGTSAQRAELIALTQALKMAEGKRLNVYTDSRYAFATAHIHGEIYRRRGWLTSEGREIKNKSEILALLKALFLPKRLSIIHCLGHQKGDSAEARGNRLADQAAREAAIKTPPDTSTLLIAGKRTADGSEFEKRTADGSEFESPKKKAKVE

SEQ ID NO: 2142 - protein, 2094 aa, synthetic construct
MPAAKRVKLDGGDKKYSIGLDIGTNSVGWAVITDEYKVPSKKFKVLGNTDRHSIKKNLIGALLFDSGETAEATRLKRTARRRYTRRKNRICYLQEIFSNEMAKVDDSFFHRLEESFLVEEDKKHERHPIFGNIVDEVAYHEKYPTIYHLRKKLVDSTDKADLRLIYLALAHMIKFRGHFLIEGDLNPDNSDVDKLFIQLVQTYNQLFEENPINASGVDAKAILSARLSKSRRLENLIAQLPGEKKNGLFGNLIALSLGLTPNFKSNFDLAEDAKLQLSKDTYDDDLDNLLAQIGDQYADLFLAAKNLSDAILLSDILRVNTEITKAPLSASMIKRYDEHHQDLTLLKALVRQQLPEKYKEIFFDQSKNGYAGYIDGGASQEEFYKFIKPILEKMDGTEELLVKLNREDLLRKQRTFDNGSIPHQIHLGELHAILRRQEDFYPFLKDNREKIEKILTFRIPYYVGPLARGNSRFAWMTRKSEETITPWNFEEVVDKGASAQSFIERMTNFDKNLPNEKVLPKHSLLYEYFTVYNELTKVKYVTEGMRKPAFLSGEQKKAIVDLLFKTNRKVTVKQLKEDYFKKIECFDSVEISGVEDRFNASLGTYHDLLKIIKDKDFLDNEENEDILEDIVLTLTLFEDREMIEERLKTYAHLFDDKVMKQLKRRRYTGWGRLSRKLINGIRDKQSGKTILDFLKSDGFANRNFMQLIHDDSLTFKEDIQKAQVSGQGDSLHEHIANLAGSPAIKKGILQTVKVVDELVKVMGRHKPENIVIEMARENQTTQKGQKNSRERMKRIEEGIKELGSQILKEHPVENTQLQNEKLYLYYLQNGRDMYVDQELDINRLSDYDVDHIVPQSFLKDDSIDNKVLTRSDKARGKSDNVPSEEVVKKMKNYWRQLLNAKLITQRKFDNLTKAERGGLSELDKAGFIKRQLVETRQITKHVAQILDSRMNTKYDENDKLIREVKVITLKSKLVSDFRKDFQFYKVREINNYHHAHDAYLNAVVGTALIKKYPKLESEFVYGDYKVYDVRKMIAKSEQEIGKATAKYFFYSNIMNFFKTEITLANGEIRKRPLIETNGETGEIVWDKGRDFATVRKVLSMPQVNIVKKTEVQTGGFSKESILPKRNSDKLIARKKDWDPKKYGGFDSPTVAYSVLVVAKVEKGKSKKLKSVKELLGITIMERSSFEKNPIDFLEAKGYKEVKKDLIIKLPKYSLFELENGRKRMLASAGELQKGNELALPSKYVNFLYLASHYEKLKGSPEDNEQKQLFVEQHKHYLDEIIEQISEFSKRVILADANLDKVLSAYNKHRDKPIREQAENIIHLFTLTNLGAPAAFKYFDTTIDRKRYTSTKEVLDATLIHQSITGLYETRIDLSQLGGDGGGSSGSSGSSGGLGIEDEYRLHETSTEPDVSLGSTWLSDFPQAWAETGGMGLAVRQAPLIIPLKATSTPVSIQQYPMSHEARLGIKPHIQRLLDQGILVPCQSPWNTPLLPVKKPGTNDYRPVQDLREVNKRVEDIHPTVPNPYNLLSGLPPSHQWYTVLDLKDAFFCLRLHPTSQPLFAFEWRDPGMGISGQLTWTRLPQGFKNSPTLFNEALHRDLADFRIQHPDLILLQYVDDILLAATSELDCQQGTRALLQTLGDLGYRASAKKAQICQKQVKYLGYLLREGQRWLTEARKETVMGQPVPKTPRQLREFLGKAGFCRLFIPGFAEMAAPLYPLTKPGTLFSWGPDQQKAYQEIKQALLTAPALGLPDLTKPFELFVDEKQGYAKGVLTQKLGPWRRPVAYLSKKLDPVAAGWPPCLRMVAAIAVLTKDAGKLTMGQPLVILAPHAVEALVKQPPDRWLSNARMTHYQAMLLDTDRVQFGPVVALNPATLLPLPEEGAPHDCLEILAETHGTRPDLTDQPIPDADHTWYTDGSSFLQEGQRKAGAAVTTETEVIWAGALPAGTSAQRAELIALTQALKMAEGKRLNVYTDSRYAFATAHIHGEIYRRRGWLTSEGREIKNKSEILALLKALFLPKRLSIIHCLGHQKGDSAEARGNRLADQAAREAAIKTPPDTSTLLIAGKRTADGSEFEKRTADGSEFESPKKKAKVE

SEQ ID NO: 2143 - protein, 2094 aa, synthetic construct
MPAAKRVKLDGGDKKYSIGLDIGTNSVGWAVITDEYKVPSKKFKVLGNTDRHSIKKNLIGALLFDSGETAEATRLKRTARRRYTRRKNRICYLQEIFSNEMAKVDDSFFHRLEESFLVEEDKKHERHPIFGNIVDEVAYHEKYPTIYHLRKKLVDSTDKADLRLIYLALAHMIKFRGHFLIEGDLNPDNSDVDKLFIQLVQTYNQLFEENPINASGVDAKAILSARLSKSRRLENLIAQLPGEKKNGLFGNLIALSLGLTPNFKSNFDLAEDAKLQLSKDTYDDDLDNLLAQIGDQYADLFLAAKNLSDAILLSDILRVNTEITKAPLSASMIKRYDEHHQDLTLLKALVRQQLPEKYKEIFFDQSKNGYAGYIDGGASQEEFYKFIKPILEKMDGTEELLVKLNREDLLRKQRTFDNGSIPHQIHLGELHAILRRQEDFYPFLKDNREKIEKILTFRIPYYVGPLARGNSRFAWMTRKSEETITPWNFEEVVDKGASAQSFIERMTNFDKNLPNEKVLPKHSLLYEYFTVYNELTKVKYVTEGMRKPAFLSGEQKKAIVDLLFKTNRKVTVKQLKEDYFKKIECFDSVEISGVEDRFNASLGTYHDLLKIIKDKDFLDNEENEDILEDIVLTLTLFEDREMIEERLKTYAHLFDDKVMKQLKRRRYTGWGRLSRKLINGIRDKQSGKTILDFLKSDGFANRNFMQLIHDDSLTFKEDIQKAQVSGQGDSLHEHIANLAGSPAIKKGILQTVKVVDELVKVMGRHKPENIVIEMARENQTTQKGQKNSRERMKRIEEGIKELGSQILKEHPVENTQLQNEKLYLYYLQNGRDMYVDQELDINRLSDYDVDHIVPQSFLKDDSIDNKVLTRSDKARGKSDNVPSEEVVKKMKNYWRQLLNAKLITQRKFDNLTKAERGGLSELDKAGFIKRQLVETRQITKHVAQILDSRMNTKYDENDKLIREVKVITLKSKLVSDFRKDFQFYKVREINNYHHAHDAYLNAVVGTALIKKYPKLESEFVYGDYKVYDVRKMIAKSEQEIGKATAKYFFYSNIMNFFKTEITLANGEIRKRPLIETNGETGEIVWDKGRDFATVRKVLSMPQVNIVKKTEVQTGGFSKESILPKRNSDKLIARKKDWDPKKYGGFDSPTVAYSVLVVAKVEKGKSKKLKSVKELLGITIMERSSFEKNPIDFLEAKGYKEVKKDLIIKLPKYSLFELENGRKRMLASAGELQKGNELALPSKYVNFLYLASHYEKLKGSPEDNEQKQLFVEQHKHYLDEIIEQISEFSKRVILADANLDKVLSAYNKHRDKPIREQAENIIHLFTLTNLGAPAAFKYFDTTIDRKRYTSTKEVLDATLIHQSITGLYETRIDLSQLGGDGGGSSGGSPAPGGLGIEDEYRLHETSTEPDVSLGSTWLSDFPQAWAETGGMGLAVRQAPLIIPLKATSTPVSIQQYPMSHEARLGIKPHIQRLLDQGILVPCQSPWNTPLLPVKKPGTNDYRPVQDLREVNKRVEDIHPTVPNPYNLLSGLPPSHQWYTVLDLKDAFFCLRLHPTSQPLFAFEWRDPGMGISGQLTWTRLPQGFKNSPTLFNEALHRDLADFRIQHPDLILLQYVDDILLAATSELDCQQGTRALLQTLGDLGYRASAKKAQICQKQVKYLGYLLREGQRWLTEARKETVMGQPVPKTPRQLREFLGKAGFCRLFIPGFAEMAAPLYPLTKPGTLFSWGPDQQKAYQEIKQALLTAPALGLPDLTKPFELFVDEKQGYAKGVLTQKLGPWRRPVAYLSKKLDPVAAGWPPCLRMVAAIAVLTKDAGKLTMGQPLVILAPHAVEALVKQPPDRWLSNARMTHYQAMLLDTDRVQFGPVVALNPATLLPLPEEGAPHDCLEILAETHGTRPDLTDQPIPDADHTWYTDGSSFLQEGQRKAGAAVTTETEVIWAGALPAGTSAQRAELIALTQALKMAEGKRLNVYTDSRYAFATAHIHGEIYRRRGWLTSEGREIKNKSEILALLKALFLPKRLSIIHCLGHQKGDSAEARGNRLADQAAREAAIKTPPDTSTLLIAGKRTADGSEFEKRTADGSEFESPKKKAKVE

SEQ ID NO: 2144 - protein, 2090 aa, synthetic construct
MPAAKRVKLDGGDKKYSIGLDIGTNSVGWAVITDEYKVPSKKFKVLGNTDRHSIKKNLIGALLFDSGETAEATRLKRTARRRYTRRKNRICYLQEIFSNEMAKVDDSFFHRLEESFLVEEDKKHERHPIFGNIVDEVAYHEKYPTIYHLRKKLVDSTDKADLRLIYLALAHMIKFRGHFLIEGDLNPDNSDVDKLFIQLVQTYNQLFEENPINASGVDAKAILSARLSKSRRLENLIAQLPGEKKNGLFGNLIALSLGLTPNFKSNFDLAEDAKLQLSKDTYDDDLDNLLAQIGDQYADLFLAAKNLSDAILLSDILRVNTEITKAPLSASMIKRYDEHHQDLTLLKALVRQQLPEKYKEIFFDQSKNGYAGYIDGGASQEEFYKFIKPILEKMDGTEELLVKLNREDLLRKQRTFDNGSIPHQIHLGELHAILRRQEDFYPFLKDNREKIEKILTFRIPYYVGPLARGNSRFAWMTRKSEETITPWNFEEVVDKGASAQSFIERMTNFDKNLPNEKVLPKHSLLYEYFTVYNELTKVKYVTEGMRKPAFLSGEQKKAIVDLLFKTNRKVTVKQLKEDYFKKIECFDSVEISGVEDRFNASLGTYHDLLKIIKDKDFLDNEENEDILEDIVLTLTLFEDREMIEERLKTYAHLFDDKVMKQLKRRRYTGWGRLSRKLINGIRDKQSGKTILDFLKSDGFANRNFMQLIHDDSLTFKEDIQKAQVSGQGDSLHEHIANLAGSPAIKKGILQTVKVVDELVKVMGRHKPENIVIEMARENQTTQKGQKNSRERMKRIEEGIKELGSQILKEHPVENTQLQNEKLYLYYLQNGRDMYVDQELDINRLSDYDVDHIVPQSFLKDDSIDNKVLTRSDKARGKSDNVPSEEVVKKMKNYWRQLLNAKLITQRKFDNLTKAERGGLSELDKAGFIKRQLVETRQITKHVAQILDSRMNTKYDENDKLIREVKVITLKSKLVSDFRKDFQFYKVREINNYHHAHDAYLNAVVGTALIKKYPKLESEFVYGDYKVYDVRKMIAKSEQEIGKATAKYFFYSNIMNFFKTEITLANGEIRKRPLIETNGETGEIVWDKGRDFATVRKVLSMPQVNIVKKTEVQTGGFSKESILPKRNSDKLIARKKDWDPKKYGGFDSPTVAYSVLVVAKVEKGKSKKLKSVKELLGITIMERSSFEKNPIDFLEAKGYKEVKKDLIIKLPKYSLFELENGRKRMLASAGELQKGNELALPSKYVNFLYLASHYEKLKGSPEDNEQKQLFVEQHKHYLDEIIEQISEFSKRVILADANLDKVLSAYNKHRDKPIREQAENIIHLFTLTNLGAPAAFKYFDTTIDRKRYTSTKEVLDATLIHQSITGLYETRIDLSQLGGDGGPAPAPGGLGIEDEYRLHETSTEPDVSLGSTWLSDFPQAWAETGGMGLAVRQAPLIIPLKATSTPVSIQQYPMSHEARLGIKPHIQRLLDQGILVPCQSPWNTPLLPVKKPGTNDYRPVQDLREVNKRVEDIHPTVPNPYNLLSGLPPSHQWYTVLDLKDAFFCLRLHPTSQPLFAFEWRDPGMGISGQLTWTRLPQGFKNSPTLFNEALHRDLADFRIQHPDLILLQYVDDILLAATSELDCQQGTRALLQTLGDLGYRASAKKAQICQKQVKYLGYLLREGQRWLTEARKETVMGQPVPKTPRQLREFLGKAGFCRLFIPGFAEMAAPLYPLTKPGTLFSWGPDQQKAYQEIKQALLTAPALGLPDLTKPFELFVDEKQGYAKGVLTQKLGPWRRPVAYLSKKLDPVAAGWPPCLRMVAAIAVLTKDAGKLTMGQPLVILAPHAVEALVKQPPDRWLSNARMTHYQAMLLDTDRVQFGPVVALNPATLLPLPEEGAPHDCLEILAETHGTRPDLTDQPIPDADHTWYTDGSSFLQEGQRKAGAAVTTETEVIWAGALPAGTSAQRAELIALTQALKMAEGKRLNVYTDSRYAFATAHIHGEIYRRRGWLTSEGREIKNKSEILALLKALFLPKRLSIIHCLGHQKGDSAEARGNRLADQAAREAAIKTPPDTSTLLIAGKRTADGSEFEKRTADGSEFESPKKKAKVE

SEQ ID NO: 2145 - protein, 2096 aa, synthetic construct
MPAAKRVKLDGGDKKYSIGLDIGTNSVGWAVITDEYKVPSKKFKVLGNTDRHSIKKNLIGALLFDSGETAEATRLKRTARRRYTRRKNRICYLQEIFSNEMAKVDDSFFHRLEESFLVEEDKKHERHPIFGNIVDEVAYHEKYPTIYHLRKKLVDSTDKADLRLIYLALAHMIKFRGHFLIEGDLNPDNSDVDKLFIQLVQTYNQLFEENPINASGVDAKAILSARLSKSRRLENLIAQLPGEKKNGLFGNLIALSLGLTPNFKSNFDLAEDAKLQLSKDTYDDDLDNLLAQIGDQYADLFLAAKNLSDAILLSDILRVNTEITKAPLSASMIKRYDEHHQDLTLLKALVRQQLPEKYKEIFFDQSKNGYAGYIDGGASQEEFYKFIKPILEKMDGTEELLVKLNREDLLRKQRTFDNGSIPHQIHLGELHAILRRQEDFYPFLKDNREKIEKILTFRIPYYVGPLARGNSRFAWMTRKSEETITPWNFEEVVDKGASAQSFIERMTNFDKNLPNEKVLPKHSLLYEYFTVYNELTKVKYVTEGMRKPAFLSGEQKKAIVDLLFKTNRKVTVKQLKEDYFKKIECFDSVEISGVEDRFNASLGTYHDLLKIIKDKDFLDNEENEDILEDIVLTLTLFEDREMIEERLKTYAHLFDDKVMKQLKRRRYTGWGRLSRKLINGIRDKQSGKTILDFLKSDGFANRNFMQLIHDDSLTFKEDIQKAQVSGQGDSLHEHIANLAGSPAIKKGILQTVKVVDELVKVMGRHKPENIVIEMARENQTTQKGQKNSRERMKRIEEGIKELGSQILKEHPVENTQLQNEKLYLYYLQNGRDMYVDQELDINRLSDYDVDHIVPQSFLKDDSIDNKVLTRSDKARGKSDNVPSEEVVKKMKNYWRQLLNAKLITQRKFDNLTKAERGGLSELDKAGFIKRQLVETRQITKHVAQILDSRMNTKYDENDKLIREVKVITLKSKLVSDFRKDFQFYKVREINNYHHAHDAYLNAVVGTALIKKYPKLESEFVYGDYKVYDVRKMIAKSEQEIGKATAKYFFYSNIMNFFKTEITLANGEIRKRPLIETNGETGEIVWDKGRDFATVRKVLSMPQVNIVKKTEVQTGGFSKESILPKRNSDKLIARKKDWDPKKYGGFDSPTVAYSVLVVAKVEKGKSKKLKSVKELLGITIMERSSFEKNPIDFLEAKGYKEVKKDLIIKLPKYSLFELENGRKRMLASAGELQKGNELALPSKYVNFLYLASHYEKLKGSPEDNEQKQLFVEQHKHYLDEIIEQISEFSKRVILADANLDKVLSAYNKHRDKPIREQAENIIHLFTLTNLGAPAAFKYFDTTIDRKRYTSTKEVLDATLIHQSITGLYETRIDLSQLGGDGGGGGGSSEAAAKGGLGIEDEYRLHETSTEPDVSLGSTWLSDFPQAWAETGGMGLAVRQAPLIIPLKATSTPVSIQQYPMSHEARLGIKPHIQRLLDQGILVPCQSPWNTPLLPVKKPGTNDYRPVQDLREVNKRVEDIHPTVPNPYNLLSGLPPSHQWYTVLDLKDAFFCLRLHPTSQPLFAFEWRDPGMGISGQLTWTRLPQGFKNSPTLFNEALHRDLADFRIQHPDLILLQYVDDILLAATSELDCQQGTRALLQTLGDLGYRASAKKAQICQKQVKYLGYLLREGQRWLTEARKETVMGQPVPKTPRQLREFLGKAGFCRLFIPGFAEMAAPLYPLTKPGTLFSWGPDQQKAYQEIKQALLTAPALGLPDLTKPFELFVDEKQGYAKGVLTQKLGPWRRPVAYLSKKLDPVAAGWPPCLRMVAAIAVLTKDAGKLTMGQPLVILAPHAVEALVKQPPDRWLSNARMTHYQAMLLDTDRVQFGPVVALNPATLLPLPEEGAPHDCLEILAETHGTRPDLTDQPIPDADHTWYTDGSSFLQEGQRKAGAAVTTETEVIWAGALPAGTSAQRAELIALTQALKMAEGKRLNVYTDSRYAFATAHIHGEIYRRRGWLTSEGREIKNKSEILALLKALFLPKRLSIIHCLGHQKGDSAEARGNRLADQAAREAAIKTPPDTSTLLIAGKRTADGSEFEKRTADGSEFESPKKKAKVE

SEQ ID NO: 2146 - protein, 2096 aa, synthetic construct
MPAAKRVKLDGGDKKYSIGLDIGTNSVGWAVITDEYKVPSKKFKVLGNTDRHSIKKNLIGALLFDSGETAEATRLKRTARRRYTRRKNRICYLQEIFSNEMAKVDDSFFHRLEESFLVEEDKKHERHPIFGNIVDEVAYHEKYPTIYHLRKKLVDSTDKADLRLIYLALAHMIKFRGHFLIEGDLNPDNSDVDKLFIQLVQTYNQLFEENPINASGVDAKAILSARLSKSRRLENLIAQLPGEKKNGLFGNLIALSLGLTPNFKSNFDLAEDAKLQLSKDTYDDDLDNLLAQIGDQYADLFLAAKNLSDAILLSDILRVNTEITKAPLSASMIKRYDEHHQDLTLLKALVRQQLPEKYKEIFFDQSKNGYAGYIDGGASQEEFYKFIKPILEKMDGTEELLVKLNREDLLRKQRTFDNGSIPHQIHLGELHAILRRQEDFYPFLKDNREKIEKILTFRIPYYVGPLARGNSRFAWMTRKSEETITPWNFEEVVDKGASAQSFIERMTNFDKNLPNEKVLPKHSLLYEYFTVYNELTKVKYVTEGMRKPAFLSGEQKKAIVDLLFKTNRKVTVKQLKEDYFKKIECFDSVEISGVEDRFNASLGTYHDLLKIIKDKDFLDNEENEDILEDIVLTLTLFEDREMIEERLKTYAHLFDDKVMKQLKRRRYTGWGRLSRKLINGIRDKQSGKTILDFLKSDGFANRNFMQLIHDDSLTFKEDIQKAQVSGQGDSLHEHIANLAGSPAIKKGILQTVKVVDELVKVMGRHKPENIVIEMARENQTTQKGQKNSRERMKRIEEGIKELGSQILKEHPVENTQLQNEKLYLYYLQNGRDMYVDQELDINRLSDYDVDHIVPQSFLKDDSIDNKVLTRSDKARGKSDNVPSEEVVKKMKNYWRQLLNAKLITQRKFDNLTKAERGGLSELDKAGFIKRQLVETRQITKHVAQILDSRMNTKYDENDKLIREVKVITLKSKLVSDFRKDFQFYKVREINNYHHAHDAYLNAVVGTALIKKYPKLESEFVYGDYKVYDVRKMIAKSEQEIGKATAKYFFYSNIMNFFKTEITLANGEIRKRPLIETNGETGEIVWDKGRDFATVRKVLSMPQVNIVKKTEVQTGGFSKESILPKRNSDKLIARKKDWDPKKYGGFDSPTVAYSVLVVAKVEKGKSKKLKSVKELLGITIMERSSFEKNPIDFLEAKGYKEVKKDLIIKLPKYSLFELENGRKRMLASAGELQKGNELALPSKYVNFLYLASHYEKLKGSPEDNEQKQLFVEQHKHYLDEIIEQISEFSKRVILADANLDKVLSAYNKHRDKPIREQAENIIHLFTLTNLGAPAAFKYFDTTIDRKRYTSTKEVLDATLIHQSITGLYETRIDLSQLGGDGGGGSEAAAKPAPGGLGIEDEYRLHETSTEPDVSLGSTWLSDFPQAWAETGGMGLAVRQAPLIIPLKATSTPVSIQQYPMSHEARLGIKPHIQRLLDQGILVPCQSPWNTPLLPVKKPGTNDYRPVQDLREVNKRVEDIHPTVPNPYNLLSGLPPSHQWYTVLDLKDAFFCLRLHPTSQPLFAFEWRDPGMGISGQLTWTRLPQGFKNSPTLFNEALHRDLADFRIQHPDLILLQYVDDILLAATSELDCQQGTRALLQTLGDLGYRASAKKAQICQKQVKYLGYLLREGQRWLTEARKETVMGQPVPKTPRQLREFLGKAGFCRLFIPGFAEMAAPLYPLTKPGTLFSWGPDQQKAYQEIKQALLTAPALGLPDLTKPFELFVDEKQGYAKGVLTQKLGPWRRPVAYLSKKLDPVAAGWPPCLRMVAAIAVLTKDAGKLTMGQPLVILAPHAVEALVKQPPDRWLSNARMTHYQAMLLDTDRVQFGPVVALNPATLLPLPEEGAPHDCLEILAETHGTRPDLTDQPIPDADHTWYTDGSSFLQEGQRKAGAAVTTETEVIWAGALPAGTSAQRAELIALTQALKMAEGKRLNVYTDSRYAFATAHIHGEIYRRRGWLTSEGREIKNKSEILALLKALFLPKRLSIIHCLGHQKGDSAEARGNRLADQAAREAAIKTPPDTSTLLIAGKRTADGSEFEKRTADGSEFESPKKKAKVE

SEQ ID NO: 2147 - protein, 2093 aa, synthetic construct
MPAAKRVKLDGGDKKYSIGLDIGTNSVGWAVITDEYKVPSKKFKVLGNTDRHSIKKNLIGALLFDSGETAEATRLKRTARRRYTRRKNRICYLQEIFSNEMAKVDDSFFHRLEESFLVEEDKKHERHPIFGNIVDEVAYHEKYPTIYHLRKKLVDSTDKADLRLIYLALAHMIKFRGHFLIEGDLNPDNSDVDKLFIQLVQTYNQLFEENPINASGVDAKAILSARLSKSRRLENLIAQLPGEKKNGLFGNLIALSLGLTPNFKSNFDLAEDAKLQLSKDTYDDDLDNLLAQIGDQYADLFLAAKNLSDAILLSDILRVNTEITKAPLSASMIKRYDEHHQDLTLLKALVRQQLPEKYKEIFFDQSKNGYAGYIDGGASQEEFYKFIKPILEKMDGTEELLVKLNREDLLRKQRTFDNGSIPHQIHLGELHAILRRQEDFYPFLKDNREKIEKILTFRIPYYVGPLARGNSRFAWMTRKSEETITPWNFEEVVDKGASAQSFIERMTNFDKNLPNEKVLPKHSLLYEYFTVYNELTKVKYVTEGMRKPAFLSGEQKKAIVDLLFKTNRKVTVKQLKEDYFKKIECFDSVEISGVEDRFNASLGTYHDLLKIIKDKDFLDNEENEDILEDIVLTLTLFEDREMIEERLKTYAHLFDDKVMKQLKRRRYTGWGRLSRKLINGIRDKQSGKTILDFLKSDGFANRNFMQLIHDDSLTFKEDIQKAQVSGQGDSLHEHIANLAGSPAIKKGILQTVKVVDELVKVMGRHKPENIVIEMARENQTTQKGQKNSRERMKRIEEGIKELGSQILKEHPVENTQLQNEKLYLYYLQNGRDMYVDQELDINRLSDYDVDHIVPQSFLKDDSIDNKVLTRSDKARGKSDNVPSEEVVKKMKNYWRQLLNAKLITQRKFDNLTKAERGGLSELDKAGFIKRQLVETRQITKHVAQILDSRMNTKYDENDKLIREVKVITLKSKLVSDFRKDFQFYKVREINNYHHAHDAYLNAVVGTALIKKYPKLESEFVYGDYKVYDVRKMIAKSEQEIGKATAKYFFYSNIMNFFKTEITLANGEIRKRPLIETNGETGEIVWDKGRDFATVRKVLSMPQVNIVKKTEVQTGGFSKESILPKRNSDKLIARKKDWDPKKYGGFDSPTVAYSVLVVAKVEKGKSKKLKSVKELLGITIMERSSFEKNPIDFLEAKGYKEVKKDLIIKLPKYSLFELENGRKRMLASAGELQKGNELALPSKYVNFLYLASHYEKLKGSPEDNEQKQLFVEQHKHYLDEIIEQISEFSKRVILADANLDKVLSAYNKHRDKPIREQAENIIHLFTLTNLGAPAAFKYFDTTIDRKRYTSTKEVLDATLIHQSITGLYETRIDLSQLGGDGGEAAAKPAPGGLGIEDEYRLHETSTEPDVSLGSTWLSDFPQAWAETGGMGLAVRQAPLIIPLKATSTPVSIQQYPMSHEARLGIKPHIQRLLDQGILVPCQSPWNTPLLPVKKPGTNDYRPVQDLREVNKRVEDIHPTVPNPYNLLSGLPPSHQWYTVLDLKDAFFCLRLHPTSQPLFAFEWRDPGMGISGQLTWTRLPQGFKNSPTLFNEALHRDLADFRIQHPDLILLQYVDDILLAATSELDCQQGTRALLQTLGDLGYRASAKKAQICQKQVKYLGYLLREGQRWLTEARKETVMGQPVPKTPRQLREFLGKAGFCRLFIPGFAEMAAPLYPLTKPGTLFSWGPDQQKAYQEIKQALLTAPALGLPDLTKPFELFVDEKQGYAKGVLTQKLGPWRRPVAYLSKKLDPVAAGWPPCLRMVAAIAVLTKDAGKLTMGQPLVILAPHAVEALVKQPPDRWLSNARMTHYQAMLLDTDRVQFGPVVALNPATLLPLPEEGAPHDCLEILAETHGTRPDLTDQPIPDADHTWYTDGSSFLQEGQRKAGAAVTTETEVIWAGALPAGTSAQRAELIALTQALKMAEGKRLNVYTDSRYAFATAHIHGEIYRRRGWLTSEGREIKNKSEILALLKALFLPKRLSIIHCLGHQKGDSAEARGNRLADQAAREAAIKTPPDTSTLLIAGKRTADGSEFEKRTADGSEFESPKKKAKVE

SEQ ID NO: 2148 - protein, 2091 aa, synthetic construct
MPAAKRVKLDGGDKKYSIGLDIGTNSVGWAVITDEYKVPSKKFKVLGNTDRHSIKKNLIGALLFDSGETAEATRLKRTARRRYTRRKNRICYLQEIFSNEMAKVDDSFFHRLEESFLVEEDKKHERHPIFGNIVDEVAYHEKYPTIYHLRKKLVDSTDKADLRLIYLALAHMIKFRGHFLIEGDLNPDNSDVDKLFIQLVQTYNQLFEENPINASGVDAKAILSARLSKSRRLENLIAQLPGEKKNGLFGNLIALSLGLTPNFKSNFDLAEDAKLQLSKDTYDDDLDNLLAQIGDQYADLFLAAKNLSDAILLSDILRVNTEITKAPLSASMIKRYDEHHQDLTLLKALVRQQLPEKYKEIFFDQSKNGYAGYIDGGASQEEFYKFIKPILEKMDGTEELLVKLNREDLLRKQRTFDNGSIPHQIHLGELHAILRRQEDFYPFLKDNREKIEKILTFRIPYYVGPLARGNSRFAWMTRKSEETITPWNFEEVVDKGASAQSFIERMTNFDKNLPNEKVLPKHSLLYEYFTVYNELTKVKYVTEGMRKPAFLSGEQKKAIVDLLFKTNRKVTVKQLKEDYFKKIECFDSVEISGVEDRFNASLGTYHDLLKIIKDKDFLDNEENEDILEDIVLTLTLFEDREMIEERLKTYAHLFDDKVMKQLKRRRYTGWGRLSRKLINGIRDKQSGKTILDFLKSDGFANRNFMQLIHDDSLTFKEDIQKAQVSGQGDSLHEHIANLAGSPAIKKGILQTVKVVDELVKVMGRHKPENIVIEMARENQTTQKGQKNSRERMKRIEEGIKELGSQILKEHPVENTQLQNEKLYLYYLQNGRDMYVDQELDINRLSDYDVDHIVPQSFLKDDSIDNKVLTRSDKARGKSDNVPSEEVVKKMKNYWRQLLNAKLITQRKFDNLTKAERGGLSELDKAGFIKRQLVETRQITKHVAQILDSRMNTKYDENDKLIREVKVITLKSKLVSDFRKDFQFYKVREINNYHHAHDAYLNAVVGTALIKKYPKLESEFVYGDYKVYDVRKMIAKSEQEIGKATAKYFFYSNIMNFFKTEITLANGEIRKRPLIETNGETGEIVWDKGRDFATVRKVLSMPQVNIVKKTEVQTGGFSKESILPKRNSDKLIARKKDWDPKKYGGFDSPTVAYSVLVVAKVEKGKSKKLKSVKELLGITIMERSSFEKNPIDFLEAKGYKEVKKDLIIKLPKYSLFELENGRKRMLASAGELQKGNELALPSKYVNFLYLASHYEKLKGSPEDNEQKQLFVEQHKHYLDEIIEQISEFSKRVILADANLDKVLSAYNKHRDKPIREQAENIIHLFTLTNLGAPAAFKYFDTTIDRKRYTSTKEVLDATLIHQSITGLYETRIDLSQLGGDGGGGSGGGGGLGIEDEYRLHETSTEPDVSLGSTWLSDFPQAWAETGGMGLAVRQAPLIIPLKATSTPVSIQQYPMSHEARLGIKPHIQRLLDQGILVPCQSPWNTPLLPVKKPGTNDYRPVQDLREVNKRVEDIHPTVPNPYNLLSGLPPSHQWYTVLDLKDAFFCLRLHPTSQPLFAFEWRDPGMGISGQLTWTRLPQGFKNSPTLFNEALHRDLADFRIQHPDLILLQYVDDILLAATSELDCQQGTRALLQTLGDLGYRASAKKAQICQKQVKYLGYLLREGQRWLTEARKETVMGQPVPKTPRQLREFLGKAGFCRLFIPGFAEMAAPLYPLTKPGTLFSWGPDQQKAYQEIKQALLTAPALGLPDLTKPFELFVDEKQGYAKGVLTQKLGPWRRPVAYLSKKLDPVAAGWPPCLRMVAAIAVLTKDAGKLTMGQPLVILAPHAVEALVKQPPDRWLSNARMTHYQAMLLDTDRVQFGPVVALNPATLLPLPEEGAPHDCLEILAETHGTRPDLTDQPIPDADHTWYTDGSSFLQEGQRKAGAAVTTETEVIWAGALPAGTSAQRAELIALTQALKMAEGKRLNVYTDSRYAFATAHIHGEIYRRRGWLTSEGREIKNKSEILALLKALFLPKRLSIIHCLGHQKGDSAEARGNRLADQAAREAAIKTPPDTSTLLIAGKRTADGSEFEKRTADGSEFESPKKKAKVE

SEQ ID NO: 2149 - protein, 2096 aa, synthetic construct
MPAAKRVKLDGGDKKYSIGLDIGTNSVGWAVITDEYKVPSKKFKVLGNTDRHSIKKNLIGALLFDSGETAEATRLKRTARRRYTRRKNRICYLQEIFSNEMAKVDDSFFHRLEESFLVEEDKKHERHPIFGNIVDEVAYHEKYPTIYHLRKKLVDSTDKADLRLIYLALAHMIKFRGHFLIEGDLNPDNSDVDKLFIQLVQTYNQLFEENPINASGVDAKAILSARLSKSRRLENLIAQLPGEKKNGLFGNLIALSLGLTPNFKSNFDLAEDAKLQLSKDTYDDDLDNLLAQIGDQYADLFLAAKNLSDAILLSDILRVNTEITKAPLSASMIKRYDEHHQDLTLLKALVRQQLPEKYKEIFFDQSKNGYAGYIDGGASQEEFYKFIKPILEKMDGTEELLVKLNREDLLRKQRTFDNGSIPHQIHLGELHAILRRQEDFYPFLKDNREKIEKILTFRIPYYVGPLARGNSRFAWMTRKSEETITPWNFEEVVDKGASAQSFIERMTNFDKNLPNEKVLPKHSLLYEYFTVYNELTKVKYVTEGMRKPAFLSGEQKKAIVDLLFKTNRKVTVKQLKEDYFKKIECFDSVEISGVEDRFNASLGTYHDLLKIIKDKDFLDNEENEDILEDIVLTLTLFEDREMIEERLKTYAHLFDDKVMKQLKRRRYTGWGRLSRKLINGIRDKQSGKTILDFLKSDGFANRNFMQLIHDDSLTFKEDIQKAQVSGQGDSLHEHIANLAGSPAIKKGILQTVKVVDELVKVMGRHKPENIVIEMARENQTTQKGQKNSRERMKRIEEGIKELGSQILKEHPVENTQLQNEKLYLYYLQNGRDMYVDQELDINRLSDYDVDHIVPQSFLKDDSIDNKVLTRSDKARGKSDNVPSEEVVKKMKNYWRQLLNAKLITQRKFDNLTKAERGGLSELDKAGFIKRQLVETRQITKHVAQILDSRMNTKYDENDKLIREVKVITLKSKLVSDFRKDFQFYKVREINNYHHAHDAYLNAVVGTALIKKYPKLESEFVYGDYKVYDVRKMIAKSEQEIGKATAKYFFYSNIMNFFKTEITLANGEIRKRPLIETNGETGEIVWDKGRDFATVRKVLSMPQVNIVKKTEVQTGGFSKESILPKRNSDKLIARKKDWDPKKYGGFDSPTVAYSVLVVAKVEKGKSKKLKSVKELLGITIMERSSFEKNPIDFLEAKGYKEVKKDLIIKLPKYSLFELENGRKRMLASAGELQKGNELALPSKYVNFLYLASHYEKLKGSPEDNEQKQLFVEQHKHYLDEIIEQISEFSKRVILADANLDKVLSAYNKHRDKPIREQAENIIHLFTLTNLGAPAAFKYFDTTIDRKRYTSTKEVLDATLIHQSITGLYETRIDLSQLGGDGGGSSPAPEAAAKGGLGIEDEYRLHETSTEPDVSLGSTWLSDFPQAWAETGGMGLAVRQAPLIIPLKATSTPVSIQQYPMSHEARLGIKPHIQRLLDQGILVPCQSPWNTPLLPVKKPGTNDYRPVQDLREVNKRVEDIHPTVPNPYNLLSGLPPSHQWYTVLDLKDAFFCLRLHPTSQPLFAFEWRDPGMGISGQLTWTRLPQGFKNSPTLFNEALHRDLADFRIQHPDLILLQYVDDILLAATSELDCQQGTRALLQTLGDLGYRASAKKAQICQKQVKYLGYLLREGQRWLTEARKETVMGQPVPKTPRQLREFLGKAGFCRLFIPGFAEMAAPLYPLTKPGTLFSWGPDQQKAYQEIKQALLTAPALGLPDLTKPFELFVDEKQGYAKGVLTQKLGPWRRPVAYLSKKLDPVAAGWPPCLRMVAAIAVLTKDAGKLTMGQPLVILAPHAVEALVKQPPDRWLSNARMTHYQAMLLDTDRVQFGPVVALNPATLLPLPEEGAPHDCLEILAETHGTRPDLTDQPIPDADHTWYTDGSSFLQEGQRKAGAAVTTETEVIWAGALPAGTSAQRAELIALTQALKMAEGKRLNVYTDSRYAFATAHIHGEIYRRRGWLTSEGREIKNKSEILALLKALFLPKRLSIIHCLGHQKGDSAEARGNRLADQAAREAAIKTPPDTSTLLIAGKRTADGSEFEKRTADGSEFESPKKKAKVE

SEQ ID NO: 2150 - protein, 2091 aa, synthetic construct; identical to SEQ ID NO: 2057

SEQ ID NO: 2151 - protein, 2094 aa, synthetic construct
MPAAKRVKLDGGDKKYSIGLDIGTNSVGWAVITDEYKVPSKKFKVLGNTDRHSIKKNLIGALLFDSGETAEATRLKRTARRRYTRRKNRICYLQEIFSNEMAKVDDSFFHRLEESFLVEEDKKHERHPIFGNIVDEVAYHEKYPTIYHLRKKLVDSTDKADLRLIYLALAHMIKFRGHFLIEGDLNPDNSDVDKLFIQLVQTYNQLFEENPINASGVDAKAILSARLSKSRRLENLIAQLPGEKKNGLFGNLIALSLGLTPNFKSNFDLAEDAKLQLSKDTYDDDLDNLLAQIGDQYADLFLAAKNLSDAILLSDILRVNTEITKAPLSASMIKRYDEHHQDLTLLKALVRQQLPEKYKEIFFDQSKNGYAGYIDGGASQEEFYKFIKPILEKMDGTEELLVKLNREDLLRKQRTFDNGSIPHQIHLGELHAILRRQEDFYPFLKDNREKIEKILTFRIPYYVGPLARGNSRFAWMTRKSEETITPWNFEEVVDKGASAQSFIERMTNFDKNLPNEKVLPKHSLLYEYFTVYNELTKVKYVTEGMRKPAFLSGEQKKAIVDLLFKTNRKVTVKQLKEDYFKKIECFDSVEISGVEDRFNASLGTYHDLLKIIKDKDFLDNEENEDILEDIVLTLTLFEDREMIEERLKTYAHLFDDKVMKQLKRRRYTGWGRLSRKLINGIRDKQSGKTILDFLKSDGFANRNFMQLIHDDSLTFKEDIQKAQVSGQGDSLHEHIANLAGSPAIKKGILQTVKVVDELVKVMGRHKPENIVIEMARENQTTQKGQKNSRERMKRIEEGIKELGSQILKEHPVENTQLQNEKLYLYYLQNGRDMYVDQELDINRLSDYDVDHIVPQSFLKDDSIDNKVLTRSDKARGKSDNVPSEEVVKKMKNYWRQLLNAKLITQRKFDNLTKAERGGLSELDKAGFIKRQLVETRQITKHVAQILDSRMNTKYDENDKLIREVKVITLKSKLVSDFRKDFQFYKVREINNYHHAHDAYLNAVVGTALIKKYPKLESEFVYGDYKVYDVRKMIAKSEQEIGKATAKYFFYSNIMNFFKTEITLANGEIRKRPLIETNGETGEIVWDKGRDFATVRKVLSMPQVNIVKKTEVQTGGFSKESILPKRNSDKLIARKKDWDPKKYGGFDSPTVAYSVLVVAKVEKGKSKKLKSVKELLGITIMERSSFEKNPIDFLEAKGYKEVKKDLIIKLPKYSLFELENGRKRMLASAGELQKGNELALPSKYVNFLYLASHYEKLKGSPEDNEQKQLFVEQHKHYLDEIIEQISEFSKRVILADANLDKVLSAYNKHRDKPIREQAENIIHLFTLTNLGAPAAFKYFDTTIDRKRYTSTKEVLDATLIHQSITGLYETRIDLSQLGGDGGPAPGGGGGSGGLGIEDEYRLHETSTEPDVSLGSTWLSDFPQAWAETGGMGLAVRQAPLIIPLKATSTPVSIQQYPMSHEARLGIKPHIQRLLDQGILVPCQSPWNTPLLPVKKPGTNDYRPVQDLREVNKRVEDIHPTVPNPYNLLSGLPPSHQWYTVLDLKDAFFCLRLHPTSQPLFAFEWRDPGMGISGQLTWTRLPQGFKNSPTLFNEALHRDLADFRIQHPDLILLQYVDDILLAATSELDCQQGTRALLQTLGDLGYRASAKKAQICQKQVKYLGYLLREGQRWLTEARKETVMGQPVPKTPRQLREFLGKAGFCRLFIPGFAEMAAPLYPLTKPGTLFSWGPDQQKAYQEIKQALLTAPALGLPDLTKPFELFVDEKQGYAKGVLTQKLGPWRRPVAYLSKKLDPVAAGWPPCLRMVAAIAVLTKDAGKLTMGQPLVILAPHAVEALVKQPPDRWLSNARMTHYQAMLLDTDRVQFGPVVALNPATLLPLPEEGAPHDCLEILAETHGTRPDLTDQPIPDADHTWYTDGSSFLQEGQRKAGAAVTTETEVIWAGALPAGTSAQRAELIALTQALKMAEGKRLNVYTDSRYAFATAHIHGEIYRRRGWLTSEGREIKNKSEILALLKALFLPKRLSIIHCLGHQKGDSAEARGNRLADQAAREAAIKTPPDTSTLLIAGKRTADGSEFEKRTADGSEFESPKKKAKVE

SEQ ID NO: 2152 - protein, 2093 aa, synthetic construct
MPAAKRVKLDGGDKKYSIGLDIGTNSVGWAVITDEYKVPSKKFKVLGNTDRHSIKKNLIGALLFDSGETAEATRLKRTARRRYTRRKNRICYLQEIFSNEMAKVDDSFFHRLEESFLVEEDKKHERHPIFGNIVDEVAYHEKYPTIYHLRKKLVDSTDKADLRLIYLALAHMIKFRGHFLIEGDLNPDNSDVDKLFIQLVQTYNQLFEENPINASGVDAKAILSARLSKSRRLENLIAQLPGEKKNGLFGNLIALSLGLTPNFKSNFDLAEDAKLQLSKDTYDDDLDNLLAQIGDQYADLFLAAKNLSDAILLSDILRVNTEITKAPLSASMIKRYDEHHQDLTLLKALVRQQLPEKYKEIFFDQSKNGYAGYIDGGASQEEFYKFIKPILEKMDGTEELLVKLNREDLLRKQRTFDNGSIPHQIHLGELHAILRRQEDFYPFLKDNREKIEKILTFRIPYYVGPLARGNSRFAWMTRKSEETITPWNFEEVVDKGASAQSFIERMTNFDKNLPNEKVLPKHSLLYEYFTVYNELTKVKYVTEGMRKPAFLSGEQKKAIVDLLFKTNRKVTVKQLKEDYFKKIECFDSVEISGVEDRFNASLGTYHDLLKIIKDKDFLDNEENEDILEDIVLTLTLFEDREMIEERLKTYAHLFDDKVMKQLKRRRYTGWGRLSRKLINGIRDKQSGKTILDFLKSDGFANRNFMQLIHDDSLTFKEDIQKAQVSGQGDSLHEHIANLAGSPAIKKGILQTVKVVDELVKVMGRHKPENIVIEMARENQTTQKGQKNSRERMKRIEEGIKELGSQILKEHPVENTQLQNEKLYLYYLQNGRDMYVDQELDINRLSDYDVDHIVPQSFLKDDSIDNKVLTRSDKARGKSDNVPSEEVVKKMKNYWRQLLNAKLITQRKFDNLTKAERGGLSELDKAGFIKRQLVETRQITKHVAQILDSRMNTKYDENDKLIREVKVITLKSKLVSDFRKDFQFYKVREINNYHHAHDAYLNAVVGTALIKKYPKLESEFVYGDYKVYDVRKMIAKSEQEIGKATAKYFFYSNIMNFFKTEITLANGEIRKRPLIETNGETGEIVWDKGRDFATVRKVLSMPQVNIVKKTEVQTGGFSKESILPKRNSDKLIARKKDWDPKKYGGFDSPTVAYSVLVVAKVEKGKSKKLKSVKELLGITIMERSSFEKNPIDFLEAKGYKEVKKDLIIKLPKYSLFELENGRKRMLASAGELQKGNELALPSKYVNFLYLASHYEKLKGSPEDNEQKQLFVEQHKHYLDEIIEQISEFSKRVILADANLDKVLSAYNKHRDKPIREQAENIIHLFTLTNLGAPAAFKYFDTTIDRKRYTSTKEVLDATLIHQSITGLYETRIDLSQLGGDGGEAAAKGGGGGLGIEDEYRLHETSTEPDVSLGSTWLSDFPQAWAETGGMGLAVRQAPLIIPLKATSTPVSIQQYPMSHEARLGIKPHIQRLLDQGILVPCQSPWNTPLLPVKKPGTNDYRPVQDLREVNKRVEDIHPTVPNPYNLLSGLPPSHQWYTVLDLKDAFFCLRLHPTSQPLFAFEWRDPGMGISGQLTWTRLPQGFKNSPTLFNEALHRDLADFRIQHPDLILLQYVDDILLAATSELDCQQGTRALLQTLGDLGYRASAKKAQICQKQVKYLGYLLREGQRWLTEARKETVMGQPVPKTPRQLREFLGKAGFCRLFIPGFAEMAAPLYPLTKPGTLFSWGPDQQKAYQEIKQALLTAPALGLPDLTKPFELFVDEKQGYAKGVLTQKLGPWRRPVAYLSKKLDPVAAGWPPCLRMVAAIAVLTKDAGKLTMGQPLVILAPHAVEALVKQPPDRWLSNARMTHYQAMLLDTDRVQFGPVVALNPATLLPLPEEGAPHDCLEILAETHGTRPDLTDQPIPDADHTWYTDGSSFLQEGQRKAGAAVTTETEVIWAGALPAGTSAQRAELIALTQALKMAEGKRLNVYTDSRYAFATAHIHGEIYRRRGWLTSEGREIKNKSEILALLKALFLPKRLSIIHCLGHQKGDSAEARGNRLADQAAREAAIKTPPDTSTLLIAGKRTADGSEFEKRTADGSEFESPKKKAKVE

SEQ ID NO: 2153 - protein, 2094 aa, synthetic construct
MPAAKRVKLDGGDKKYSIGLDIGTNSVGWAVITDEYKVPSKKFKVLGNTDRHSIKKNLIGALLFDSGETAEATRLKRTARRRYTRRKNRICYLQEIFSNEMAKVDDSFFHRLEESFLVEEDKKHERHPIFGNIVDEVAYHEKYPTIYHLRKKLVDSTDKADLRLIYLALAHMIKFRGHFLIEGDLNPDNSDVDKLFIQLVQTYNQLFEENPINASGVDAKAILSARLSKSRRLENLIAQLPGEKKNGLFGNLIALSLGLTPNFKSNFDLAEDAKLQLSKDTYDDDLDNLLAQIGDQYADLFLAAKNLSDAILLSDILRVNTEITKAPLSASMIKRYDEHHQDLTLLKALVRQQLPEKYKEIFFDQSKNGYAGYIDGGASQEEFYKFIKPILEKMDGTEELLVKLNREDLLRKQRTFDNGSIPHQIHLGELHAILRRQEDFYPFLKDNREKIEKILTFRIPYYVGPLARGNSRFAWMTRKSEETITPWNFEEVVDKGASAQSFIERMTNFDKNLPNEKVLPKHSLLYEYFTVYNELTKVKYVTEGMRKPAFLSGEQKKAIVDLLFKTNRKVTVKQLKEDYFKKIECFDSVEISGVEDRFNASLGTYHDLLKIIKDKDFLDNEENEDILEDIVLTLTLFEDREMIEERLKTYAHLFDDKVMKQLKRRRYTGWGRLSRKLINGIRDKQSGKTILDFLKSDGFANRNFMQLIHDDSLTFKEDIQKAQVSGQGDSLHEHIANLAGSPAIKKGILQTVKVVDELVKVMGRHKPENIVIEMARENQTTQKGQKNSRERMKRIEEGIKELGSQILKEHPVENTQLQNEKLYLYYLQNGRDMYVDQELDINRLSDYDVDHIVPQSFLKDDSIDNKVLTRSDKARGKSDNVPSEEVVKKMKNYWRQLLNAKLITQRKFDNLTKAERGGLSELDKAGFIKRQLVETRQITKHVAQILDSRMNTKYDENDKLIREVKVITLKSKLVSDFRKDFQFYKVREINNYHHAHDAYLNAVVGTALIKKYPKLESEFVYGDYKVYDVRKMIAKSEQEIGKATAKYFFYSNIMNFFKTEITLANGEIRKRPLIETNGETGEIVWDKGRDFATVRKVLSMPQVNIVKKTEVQTGGFSKESILPKRNSDKLIARKKDWDPKKYGGFDSPTVAYSVLVVAKVEKGKSKKLKSVKELLGITIMERSSFEKNPIDFLEAKGYKEVKKDLIIKLPKYSLFELENGRKRMLASAGELQKGNELALPSKYVNFLYLASHYEKLKGSPEDNEQKQLFVEQHKHYLDEIIEQISEFSKRVILADANLDKVLSAYNKHRDKPIREQAENIIHLFTLTNLGAPAAFKYFDTTIDRKRYTSTKEVLDATLIHQSITGLYETRIDLSQLGGDGGPAPGGSGGGGGLGIEDEYRLHETSTEPDVSLGSTWLSDFPQAWAETGGMGLAVRQAPLIIPLKATSTPVSIQQYPMSHEARLGIKPHIQRLLDQGILVPCQSPWNTPLLPVKKPGTNDYRPVQDLREVNKRVEDIHPTVPNPYNLLSGLPPSHQWYTVLDLKDAFFCLRLHPTSQPLFAFEWRDPGMGISGQLTWTRLPQGFKNSPTLFNEALHRDLADFRIQHPDLILLQYVDDILLAATSELDCQQGTRALLQTLGDLGYRASAKKAQICQKQVKYLGYLLREGQRWLTEARKETVMGQPVPKTPRQLREFLGKAGFCRLFIPGFAEMAAPLYPLTKPGTLFSWGPDQQKAYQEIKQALLTAPALGLPDLTKPFELFVDEKQGYAKGVLTQKLGPWRRPVAYLSKKLDPVAAGWPPCLRMVAAIAVLTKDAGKLTMGQPLVILAPHAVEALVKQPPDRWLSNARMTHYQAMLLDTDRVQFGPVVALNPATLLPLPEEGAPHDCLEILAETHGTRPDLTDQPIPDADHTWYTDGSSFLQEGQRKAGAAVTTETEVIWAGALPAGTSAQRAELIALTQALKMAEGKRLNVYTDSRYAFATAHIHGEIYRRRGWLTSEGREIKNKSEILALLKALFLPKRLSIIHCLGHQKGDSAEARGNRLADQAAREAAIKTPPDTSTLLIAGKRTADGSEFEKRTADGSEFESPKKKAKVE

SEQ ID NO: 2154 - protein, 2094 aa, synthetic construct
MPAAKRVKLDGGDKKYSIGLDIGTNSVGWAVITDEYKVPSKKFKVLGNTDRHSIKKNLIGALLFDSGETAEATRLKRTARRRYTRRKNRICYLQEIFSNEMAKVDDSFFHRLEESFLVEEDKKHERHPIFGNIVDEVAYHEKYPTIYHLRKKLVDSTDKADLRLIYLALAHMIKFRGHFLIEGDLNPDNSDVDKLFIQLVQTYNQLFEENPINASGVDAKAILSARLSKSRRLENLIAQLPGEKKNGLFGNLIALSLGLTPNFKSNFDLAEDAKLQLSKDTYDDDLDNLLAQIGDQYADLFLAAKNLSDAILLSDILRVNTEITKAPLSASMIKRYDEHHQDLTLLKALVRQQLPEKYKEIFFDQSKNGYAGYIDGGASQEEFYKFIKPILEKMDGTEELLVKLNREDLLRKQRTFDNGSIPHQIHLGELHAILRRQEDFYPFLKDNREKIEKILTFRIPYYVGPLARGNSRFAWMTRKSEETITPWNFEEVVDKGASAQSFIERMTNFDKNLPNEKVLPKHSLLYEYFTVYNELTKVKYVTEGMRKPAFLSGEQKKAIVDLLFKTNRKVTVKQLKEDYFKKIECFDSVEISGVEDRFNASLGTYHDLLKIIKDKDFLDNEENEDILEDIVLTLTLFEDREMIEERLKTYAHLFDDKVMKQLKRRRYTGWGRLSRKLINGIRDKQSGKTILDFLKSDGFANRNFMQLIHDDSLTFKEDIQKAQVSGQGDSLHEHIANLAGSPAIKKGILQTVKVVDELVKVMGRHKPENIVIEMARENQTTQKGQKNSRERMKRIEEGIKELGSQILKEHPVENTQLQNEKLYLYYLQNGRDMYVDQELDINRLSDYDVDHIVPQSFLKDDSIDNKVLTRSDKARGKSDNVPSEEVVKKMKNYWRQLLNAKLITQRKFDNLTKAERGGLSELDKAGFIKRQLVETRQITKHVAQILDSRMNTKYDENDKLIREVKVITLKSKLVSDFRKDFQFYKVREINNYHHAHDAYLNAVVGTALIKKYPKLESEFVYGDYKVYDVRKMIAKSEQEIGKATAKYFFYSNIMNFFKTEITLANGEIRKRPLIETNGETGEIVWDKGRDFATVRKVLSMPQVNIVKKTEVQTGGFSKESILPKRNSDKLIARKKDWDPKKYGGFDSPTVAYSVLVVAKVEKGKSKKLKSVKELLGITIMERSSFEKNPIDFLEAKGYKEVKKDLIIKLPKYSLFELENGRKRMLASAGELQKGNELALPSKYVNFLYLASHYEKLKGSPEDNEQKQLFVEQHKHYLDEIIEQISEFSKRVILADANLDKVLSAYNKHRDKPIREQAENIIHLFTLTNLGAPAAFKYFDTTIDRKRYTSTKEVLDATLIHQSITGLYETRIDLSQLGGDGGGGGPAPGGSGGLGIEDEYRLHETSTEPDVSLGSTWLSDFPQAWAETGGMGLAVRQAPLIIPLKATSTPVSIQQYPMSHEARLGIKPHIQRLLDQGILVPCQSPWNTPLLPVKKPGTNDYRPVQDLREVNKRVEDIHPTVPNPYNLLSGLPPSHQWYTVLDLKDAFFCLRLHPTSQPLFAFEWRDPGMGISGQLTWTRLPQGFKNSPTLFNEALHRDLADFRIQHPDLILLQYVDDILLAATSELDCQQGTRALLQTLGDLGYRASAKKAQICQKQVKYLGYLLREGQRWLTEARKETVMGQPVPKTPRQLREFLGKAGFCRLFIPGFAEMAAPLYPLTKPGTLFSWGPDQQKAYQEIKQALLTAPALGLPDLTKPFELFVDEKQGYAKGVLTQKLGPWRRPVAYLSKKLDPVAAGWPPCLRMVAAIAVLTKDAGKLTMGQPLVILAPHAVEALVKQPPDRWLSNARMTHYQAMLLDTDRVQFGPVVALNPATLLPLPEEGAPHDCLEILAETHGTRPDLTDQPIPDADHTWYTDGSSFLQEGQRKAGAAVTTETEVIWAGALPAGTSAQRAELIALTQALKMAEGKRLNVYTDSRYAFATAHIHGEIYRRRGWLTSEGREIKNKSEILALLKALFLPKRLSIIHCLGHQKGDSAEARGNRLADQAAREAAIKTPPDTSTLLIAGKRTADGSEFEKRTADGSEFESPKKKAKVE

SEQ ID NO: 2155 - protein, 2097 aa, synthetic construct; identical to SEQ ID NO: 2056

SEQ ID NO: 2156 - protein, 2094 aa, synthetic construct
MPAAKRVKLDGGDKKYSIGLDIGTNSVGWAVITDEYKVPSKKFKVLGNTDRHSIKKNLIGALLFDSGETAEATRLKRTARRRYTRRKNRICYLQEIFSNEMAKVDDSFFHRLEESFLVEEDKKHERHPIFGNIVDEVAYHEKYPTIYHLRKKLVDSTDKADLRLIYLALAHMIKFRGHFLIEGDLNPDNSDVDKLFIQLVQTYNQLFEENPINASGVDAKAILSARLSKSRRLENLIAQLPGEKKNGLFGNLIALSLGLTPNFKSNFDLAEDAKLQLSKDTYDDDLDNLLAQIGDQYADLFLAAKNLSDAILLSDILRVNTEITKAPLSASMIKRYDEHHQDLTLLKALVRQQLPEKYKEIFFDQSKNGYAGYIDGGASQEEFYKFIKPILEKMDGTEELLVKLNREDLLRKQRTFDNGSIPHQIHLGELHAILRRQEDFYPFLKDNREKIEKILTFRIPYYVGPLARGNSRFAWMTRKSEETITPWNFEEVVDKGASAQSFIERMTNFDKNLPNEKVLPKHSLLYEYFTVYNELTKVKYVTEGMRKPAFLSGEQKKAIVDLLFKTNRKVTVKQLKEDYFKKIECFDSVEISGVEDRFNASLGTYHDLLKIIKDKDFLDNEENEDILEDIVLTLTLFEDREMIEERLKTYAHLFDDKVMKQLKRRRYTGWGRLSRKLINGIRDKQSGKTILDFLKSDGFANRNFMQLIHDDSLTFKEDIQKAQVSGQGDSLHEHIANLAGSPAIKKGILQTVKVVDELVKVMGRHKPENIVIEMARENQTTQKGQKNSRERMKRIEEGIKELGSQILKEHPVENTQLQNEKLYLYYLQNGRDMYVDQELDINRLSDYDVDHIVPQSFLKDDSIDNKVLTRSDKARGKSDNVPSEEVVKKMKNYWRQLLNAKLITQRKFDNLTKAERGGLSELDKAGFIKRQLVETRQITKHVAQILDSRMNTKYDENDKLIREVKVITLKSKLVSDFRKDFQFYKVREINNYHHAHDAYLNAVVGTALIKKYPKLESEFVYGDYKVYDVRKMIAKSEQEIGKATAKYFFYSNIMNFFKTEITLANGEIRKRPLIETNGETGEIVWDKGRDFATVRKVLSMPQVNIVKKTEVQTGGFSKESILPKRNSDKLIARKKDWDPKKYGGFDSPTVAYSVLVVAKVEKGKSKKLKSVKELLGITIMERSSFEKNPIDFLEAKGYKEVKKDLIIKLPKYSLFELENGRKRMLASAGELQKGNELALPSKYVNFLYLASHYEKLKGSPEDNEQKQLFVEQHKHYLDEIIEQISEFSKRVILADANLDKVLSAYNKHRDKPIREQAENIIHLFTLTNLGAPAAFKYFDTTIDRKRYTSTKEVLDATLIHQSITGLYETRIDLSQLGGDGGGSSPAPGGSGGLGIEDEYRLHETSTEPDVSLGSTWLSDFPQAWAETGGMGLAVRQAPLIIPLKATSTPVSIQQYPMSHEARLGIKPHIQRLLDQGILVPCQSPWNTPLLPVKKPGTNDYRPVQDLREVNKRVEDIHPTVPNPYNLLSGLPPSHQWYTVLDLKDAFFCLRLHPTSQPLFAFEWRDPGMGISGQLTWTRLPQGFKNSPTLFNEALHRDLADFRIQHPDLILLQYVDDILLAATSELDCQQGTRALLQTLGDLGYRASAKKAQICQKQVKYLGYLLREGQRWLTEARKETVMGQPVPKTPRQLREFLGKAGFCRLFIPGFAEMAAPLYPLTKPGTLFSWGPDQQKAYQEIKQALLTAPALGLPDLTKPFELFVDEKQGYAKGVLTQKLGPWRRPVAYLSKKLDPVAAGWPPCLRMVAAIAVLTKDAGKLTMGQPLVILAPHAVEALVKQPPDRWLSNARMTHYQAMLLDTDRVQFGPVVALNPATLLPLPEEGAPHDCLEILAETHGTRPDLTDQPIPDADHTWYTDGSSFLQEGQRKAGAAVTTETEVIWAGALPAGTSAQRAELIALTQALKMAEGKRLNVYTDSRYAFATAHIHGEIYRRRGWLTSEGREIKNKSEILALLKALFLPKRLSIIHCLGHQKGDSAEARGNRLADQAAREAAIKTPPDTSTLLIAGKRTADGSEFEKRTADGSEFESPKKKAKVE

SEQ ID NO: 2157 - protein, 2095 aa, synthetic construct
MPAAKRVKLDGGDKKYSIGLDIGTNSVGWAVITDEYKVPSKKFKVLGNTDRHSIKKNLIGALLFDSGETAEATRLKRTARRRYTRRKNRICYLQEIFSNEMAKVDDSFFHRLEESFLVEEDKKHERHPIFGNIVDEVAYHEKYPTIYHLRKKLVDSTDKADLRLIYLALAHMIKFRGHFLIEGDLNPDNSDVDKLFIQLVQTYNQLFEENPINASGVDAKAILSARLSKSRRLENLIAQLPGEKKNGLFGNLIALSLGLTPNFKSNFDLAEDAKLQLSKDTYDDDLDNLLAQIGDQYADLFLAAKNLSDAILLSDILRVNTEITKAPLSASMIKRYDEHHQDLTLLKALVRQQLPEKYKEIFFDQSKNGYAGYIDGGASQEEFYKFIKPILEKMDGTEELLVKLNREDLLRKQRTFDNGSIPHQIHLGELHAILRRQEDFYPFLKDNREKIEKILTFRIPYYVGPLARGNSRFAWMTRKSEETITPWNFEEVVDKGASAQSFIERMTNFDKNLPNEKVLPKHSLLYEYFTVYNELTKVKYVTEGMRKPAFLSGEQKKAIVDLLFKTNRKVTVKQLKEDYFKKIECFDSVEISGVEDRFNASLGTYHDLLKIIKDKDFLDNEENEDILEDIVLTLTLFEDREMIEERLKTYAHLFDDKVMKQLKRRRYTGWGRLSRKLINGIRDKQSGKTILDFLKSDGFANRNFMQLIHDDSLTFKEDIQKAQVSGQGDSLHEHIANLAGSPAIKKGILQTVKVVDELVKVMGRHKPENIVIEMARENQTTQKGQKNSRERMKRIEEGIKELGSQILKEHPVENTQLQNEKLYLYYLQNGRDMYVDQELDINRLSDYDVDHIVPQSFLKDDSIDNKVLTRSDKARGKSDNVPSEEVVKKMKNYWRQLLNAKLITQRKFDNLTKAERGGLSELDKAGFIKRQLVETRQITKHVAQILDSRMNTKYDENDKLIREVKVITLKSKLVSDFRKDFQFYKVREINNYHHAHDAYLNAVVGTALIKKYPKLESEFVYGDYKVYDVRKMIAKSEQEIGKATAKYFFYSNIMNFFKTEITLANGEIRKRPLIETNGETGEIVWDKGRDFATVRKVLSMPQVNIVKKTEVQTGGFSKESILPKRNSDKLIARKKDWDPKKYGGFDSPTVAYSVLVVAKVEKGKSKKLKSVKELLGITIMERSSFEKNPIDFLEAKGYKEVKKDLIIKLPKYSLFELENGRKRMLASAGELQKGNELALPSKYVNFLYLASHYEKLKGSPEDNEQKQLFVEQHKHYLDEIIEQISEFSKRVILADANLDKVLSAYNKHRDKPIREQAENIIHLFTLTNLGAPAAFKYFDTTIDRKRYTSTKEVLDATLIHQSITGLYETRIDLSQLGGDGGGGGGSGGGGSGGLGIEDEYRLHETSTEPDVSLGSTWLSDFPQAWAETGGMGLAVRQAPLIIPLKATSTPVSIQQYPMSHEARLGIKPHIQRLLDQGILVPCQSPWNTPLLPVKKPGTNDYRPVQDLREVNKRVEDIHPTVPNPYNLLSGLPPSHQWYTVLDLKDAFFCLRLHPTSQPLFAFEWRDPGMGISGQLTWTRLPQGFKNSPTLFNEALHRDLADFRIQHPDLILLQYVDDILLAATSELDCQQGTRALLQTLGDLGYRASAKKAQICQKQVKYLGYLLREGQRWLTEARKETVMGQPVPKTPRQLREFLGKAGFCRLFIPGFAEMAAPLYPLTKPGTLFSWGPDQQKAYQEIKQALLTAPALGLPDLTKPFELFVDEKQGYAKGVLTQKLGPWRRPVAYLSKKLDPVAAGWPPCLRMVAAIAVLTKDAGKLTMGQPLVILAPHAVEALVKQPPDRWLSNARMTHYQAMLLDTDRVQFGPVVALNPATLLPLPEEGAPHDCLEILAETHGTRPDLTDQPIPDADHTWYTDGSSFLQEGQRKAGAAVTTETEVIWAGALPAGTSAQRAELIALTQALKMAEGKRLNVYTDSRYAFATAHIHGEIYRRRGWLTSEGREIKNKSEILALLKALFLPKRLSIIHCLGHQKGDSAEARGNRLADQAAREAAIKTPPDTSTLLIAGKRTADGSEFEKRTADGSEFESPKKKAKVE

SEQ ID NO: 2158 - protein, 2091 aa, synthetic construct
MPAAKRVKLDGGDKKYSIGLDIGTNSVGWAVITDEYKVPSKKFKVLGNTDRHSIKKNLIGALLFDSGETAEATRLKRTARRRYTRRKNRICYLQEIFSNEMAKVDDSFFHRLEESFLVEEDKKHERHPIFGNIVDEVAYHEKYPTIYHLRKKLVDSTDKADLRLIYLALAHMIKFRGHFLIEGDLNPDNSDVDKLFIQLVQTYNQLFEENPINASGVDAKAILSARLSKSRRLENLIAQLPGEKKNGLFGNLIALSLGLTPNFKSNFDLAEDAKLQLSKDTYDDDLDNLLAQIGDQYADLFLAAKNLSDAILLSDILRVNTEITKAPLSASMIKRYDEHHQDLTLLKALVRQQLPEKYKEIFFDQSKNGYAGYIDGGASQEEFYKFIKPILEKMDGTEELLVKLNREDLLRKQRTFDNGSIPHQIHLGELHAILRRQEDFYPFLKDNREKIEKILTFRIPYYVGPLARGNSRFAWMTRKSEETITPWNFEEVVDKGASAQSFIERMTNFDKNLPNEKVLPKHSLLYEYFTVYNELTKVKYVTEGMRKPAFLSGEQKKAIVDLLFKTNRKVTVKQLKEDYFKKIECFDSVEISGVEDRFNASLGTYHDLLKIIKDKDFLDNEENEDILEDIVLTLTLFEDREMIEERLKTYAHLFDDKVMKQLKRRRYTGWGRLSRKLINGIRDKQSGKTILDFLKSDGFANRNFMQLIHDDSLTFKEDIQKAQVSGQGDSLHEHIANLAGSPAIKKGILQTVKVVDELVKVMGRHKPENIVIEMARENQTTQKGQKNSRERMKRIEEGIKELGSQILKEHPVENTQLQNEKLYLYYLQNGRDMYVDQELDINRLSDYDVDHIVPQSFLKDDSIDNKVLTRSDKARGKSDNVPSEEVVKKMKNYWRQLLNAKLITQRKFDNLTKAERGGLSELDKAGFIKRQLVETRQITKHVAQILDSRMNTKYDENDKLIREVKVITLKSKLVSDFRKDFQFYKVREINNYHHAHDAYLNAVVGTALIKKYPKLESEFVYGDYKVYDVRKMIAKSEQEIGKATAKYFFYSNIMNFFKTEITLANGEIRKRPLIETNGETGEIVWDKGRDFATVRKVLSMPQVNIVKKTEVQTGGFSKESILPKRNSDKLIARKKDWDPKKYGGFDSPTVAYSVLVVAKVEKGKSKKLKSVKELLGITIMERSSFEKNPIDFLEAKGYKEVKKDLIIKLPKYSLFELENGRKRMLASAGELQKGNELALPSKYVNFLYLASHYEKLKGSPEDNEQKQLFVEQHKHYLDEIIEQISEFSKRVILADANLDKVLSAYNKHRDKPIREQAENIIHLFTLTNLGAPAAFKYFDTTIDRKRYTSTKEVLDATLIHQSITGLYETRIDLSQLGGDGGGGSGSSGGLGIEDEYRLHETSTEPDVSLGSTWLSDFPQAWAETGGMGLAVRQAPLIIPLKATSTPVSIQQYPMSHEARLGIKPHIQRLLDQGILVPCQSPWNTPLLPVKKPGTNDYRPVQDLREVNKRVEDIHPTVPNPYNLLSGLPPSHQWYTVLDLKDAFFCLRLHPTSQPLFAFEWRDPGMGISGQLTWTRLPQGFKNSPTLFNEALHRDLADFRIQHPDLILLQYVDDILLAATSELDCQQGTRALLQTLGDLGYRASAKKAQICQKQVKYLGYLLREGQRWLTEARKETVMGQPVPKTPRQLREFLGKAGFCRLFIPGFAEMAAPLYPLTKPGTLFSWGPDQQKAYQEIKQALLTAPALGLPDLTKPFELFVDEKQGYAKGVLTQKLGPWRRPVAYLSKKLDPVAAGWPPCLRMVAAIAVLTKDAGKLTMGQPLVILAPHAVEALVKQPPDRWLSNARMTHYQAMLLDTDRVQFGPVVALNPATLLPLPEEGAPHDCLEILAETHGTRPDLTDQPIPDADHTWYTDGSSFLQEGQRKAGAAVTTETEVIWAGALPAGTSAQRAELIALTQALKMAEGKRLNVYTDSRYAFATAHIHGEIYRRRGWLTSEGREIKNKSEILALLKALFLPKRLSIIHCLGHQKGDSAEARGNRLADQAAREAAIKTPPDTSTLLIAGKRTADGSEFEKRTADGSEFESPKKKAKVE

SEQ ID NO: 2159 - protein, 2096 aa, synthetic construct; identical to SEQ ID NO: 2055

SEQ ID NO: 2160 - protein, 2094 aa, synthetic construct
MPAAKRVKLDGGDKKYSIGLDIGTNSVGWAVITDEYKVPSKKFKVLGNTDRHSIKKNLIGALLFDSGETAEATRLKRTARRRYTRRKNRICYLQEIFSNEMAKVDDSFFHRLEESFLVEEDKKHERHPIFGNIVDEVAYHEKYPTIYHLRKKLVDSTDKADLRLIYLALAHMIKFRGHFLIEGDLNPDNSDVDKLFIQLVQTYNQLFEENPINASGVDAKAILSARLSKSRRLENLIAQLPGEKKNGLFGNLIALSLGLTPNFKSNFDLAEDAKLQLSKDTYDDDLDNLLAQIGDQYADLFLAAKNLSDAILLSDILRVNTEITKAPLSASMIKRYDEHHQDLTLLKALVRQQLPEKYKEIFFDQSKNGYAGYIDGGASQEEFYKFIKPILEKMDGTEELLVKLNREDLLRKQRTFDNGSIPHQIHLGELHAILRRQEDFYPFLKDNREKIEKILTFRIPYYVGPLARGNSRFAWMTRKSEETITPWNFEEVVDKGASAQSFIERMTNFDKNLPNEKVLPKHSLLYEYFTVYNELTKVKYVTEGMRKPAFLSGEQKKAIVDLLFKTNRKVTVKQLKEDYFKKIECFDSVEISGVEDRFNASLGTYHDLLKIIKDKDFLDNEENEDILEDIVLTLTLFEDREMIEERLKTYAHLFDDKVMKQLKRRRYTGWGRLSRKLINGIRDKQSGKTILDFLKSDGFANRNFMQLIHDDSLTFKEDIQKAQVSGQGDSLHEHIANLAGSPAIKKGILQTVKVVDELVKVMGRHKPENIVIEMARENQTTQKGQKNSRERMKRIEEGIKELGSQILKEHPVENTQLQNEKLYLYYLQNGRDMYVDQELDINRLSDYDVDHIVPQSFLKDDSIDNKVLTRSDKARGKSDNVPSEEVVKKMKNYWRQLLNAKLITQRKFDNLTKAERGGLSELDKAGFIKRQLVETRQITKHVAQILDSRMNTKYDENDKLIREVKVITLKSKLVSDFRKDFQFYKVREINNYHHAHDAYLNAVVGTALIKKYPKLESEFVYGDYKVYDVRKMIAKSEQEIGKATAKYFFYSNIMNFFKTEITLANGEIRKRPLIETNGETGEIVWDKGRDFATVRKVLSMPQVNIVKKTEVQTGGFSKESILPKRNSDKLIARKKDWDPKKYGGFDSPTVAYSVLVVAKVEKGKSKKLKSVKELLGITIMERSSFEKNPIDFLEAKGYKEVKKDLIIKLPKYSLFELENGRKRMLASAGELQKGNELALPSKYVNFLYLASHYEKLKGSPEDNEQKQLFVEQHKHYLDEIIEQISEFSKRVILADANLDKVLSAYNKHRDKPIREQAENIIHLFTLTNLGAPAAFKYFDTTIDRKRYTSTKEVLDATLIHQSITGLYETRIDLSQLGGDGGGGGGGSGSSGGLGIEDEYRLHETSTEPDVSLGSTWLSDFPQAWAETGGMGLAVRQAPLIIPLKATSTPVSIQQYPMSHEARLGIKPHIQRLLDQGILVPCQSPWNTPLLPVKKPGTNDYRPVQDLREVNKRVEDIHPTVPNPYNLLSGLPPSHQWYTVLDLKDAFFCLRLHPTSQPLFAFEWRDPGMGISGQLTWTRLPQGFKNSPTLFNEALHRDLADFRIQHPDLILLQYVDDILLAATSELDCQQGTRALLQTLGDLGYRASAKKAQICQKQVKYLGYLLREGQRWLTEARKETVMGQPVPKTPRQLREFLGKAGFCRLFIPGFAEMAAPLYPLTKPGTLFSWGPDQQKAYQEIKQALLTAPALGLPDLTKPFELFVDEKQGYAKGVLTQKLGPWRRPVAYLSKKLDPVAAGWPPCLRMVAAIAVLTKDAGKLTMGQPLVILAPHAVEALVKQPPDRWLSNARMTHYQAMLLDTDRVQFGPVVALNPATLLPLPEEGAPHDCLEILAETHGTRPDLTDQPIPDADHTWYTDGSSFLQEGQRKAGAAVTTETEVIWAGALPAGTSAQRAELIALTQALKMAEGKRLNVYTDSRYAFATAHIHGEIYRRRGWLTSEGREIKNKSEILALLKALFLPKRLSIIHCLGHQKGDSAEARGNRLADQAAREAAIKTPPDTSTLLIAGKRTADGSEFEKRTADGSEFESPKKKAKVE

SEQ ID NO: 2161 - protein, 2096 aa, synthetic construct
MPAAKRVKLDGGDKKYSIGLDIGTNSVGWAVITDEYKVPSKKFKVLGNTDRHSIKKNLIGALLFDSGETAEATRLKRTARRRYTRRKNRICYLQEIFSNEMAKVDDSFFHRLEESFLVEEDKKHERHPIFGNIVDEVAYHEKYPTIYHLRKKLVDSTDKADLRLIYLALAHMIKFRGHFLIEGDLNPDNSDVDKLFIQLVQTYNQLFEENPINASGVDAKAILSARLSKSRRLENLIAQLPGEKKNGLFGNLIALSLGLTPNFKSNFDLAEDAKLQLSKDTYDDDLDNLLAQIGDQYADLFLAAKNLSDAILLSDILRVNTEITKAPLSASMIKRYDEHHQDLTLLKALVRQQLPEKYKEIFFDQSKNGYAGYIDGGASQEEFYKFIKPILEKMDGTEELLVKLNREDLLRKQRTFDNGSIPHQIHLGELHAILRRQEDFYPFLKDNREKIEKILTFRIPYYVGPLARGNSRFAWMTRKSEETITPWNFEEVVDKGASAQSFIERMTNFDKNLPNEKVLPKHSLLYEYFTVYNELTKVKYVTEGMRKPAFLSGEQKKAIVDLLFKTNRKVTVKQLKEDYFKKIECFDSVEISGVEDRFNASLGTYHDLLKIIKDKDFLDNEENEDILEDIVLTLTLFEDREMIEERLKTYAHLFDDKVMKQLKRRRYTGWGRLSRKLINGIRDKQSGKTILDFLKSDGFANRNFMQLIHDDSLTFKEDIQKAQVSGQGDSLHEHIANLAGSPAIKKGILQTVKVVDELVKVMGRHKPENIVIEMARENQTTQKGQKNSRERMKRIEEGIKELGSQILKEHPVENTQLQNEKLYLYYLQNGRDMYVDQELDINRLSDYDVDHIVPQSFLKDDSIDNKVLTRSDKARGKSDNVPSEEVVKKMKNYWRQLLNAKLITQRKFDNLTKAERGGLSELDKAGFIKRQLVETRQITKHVAQILDSRMNTKYDENDKLIREVKVITLKSKLVSDFRKDFQFYKVREINNYHHAHDAYLNAVVGTALIKKYPKLESEFVYGDYKVYDVRKMIAKSEQEIGKATAKYFFYSNIMNFFKTEITLANGEIRKRPLIETNGETGEIVWDKGRDFATVRKVLSMPQVNIVKKTEVQTGGFSKESILPKRNSDKLIARKKDWDPKKYGGFDSPTVAYSVLVVAKVEKGKSKKLKSVKELLGITIMERSSFEKNPIDFLEAKGYKEVKKDLIIKLPKYSLFELENGRKRMLASAGELQKGNELALPSKYVNFLYLASHYEKLKGSPEDNEQKQLFVEQHKHYLDEIIEQISEFSKRVILADANLDKVLSAYNKHRDKPIREQAENIIHLFTLTNLGAPAAFKYFDTTIDRKRYTSTKEVLDATLIHQSITGLYETRIDLSQLGGDGGEAAAKGGGGGSGGLGIEDEYRLHETSTEPDVSLGSTWLSDFPQAWAETGGMGLAVRQAPLIIPLKATSTPVSIQQYPMSHEARLGIKPHIQRLLDQGILVPCQSPWNTPLLPVKKPGTNDYRPVQDLREVNKRVEDIHPTVPNPYNLLSGLPPSHQWYTVLDLKDAFFCLRLHPTSQPLFAFEWRDPGMGISGQLTWTRLPQGFKNSPTLFNEALHRDLADFRIQHPDLILLQYVDDILLAATSELDCQQGTRALLQTLGDLGYRASAKKAQICQKQVKYLGYLLREGQRWLTEARKETVMGQPVPKTPRQLREFLGKAGFCRLFIPGFAEMAAPLYPLTKPGTLFSWGPDQQKAYQEIKQALLTAPALGLPDLTKPFELFVDEKQGYAKGVLTQKLGPWRRPVAYLSKKLDPVAAGWPPCLRMVAAIAVLTKDAGKLTMGQPLVILAPHAVEALVKQPPDRWLSNARMTHYQAMLLDTDRVQFGPVVALNPATLLPLPEEGAPHDCLEILAETHGTRPDLTDQPIPDADHTWYTDGSSFLQEGQRKAGAAVTTETEVIWAGALPAGTSAQRAELIALTQALKMAEGKRLNVYTDSRYAFATAHIHGEIYRRRGWLTSEGREIKNKSEILALLKALFLPKRLSIIHCLGHQKGDSAEARGNRLADQAAREAAIKTPPDTSTLLIAGKRTADGSEFEKRTADGSEFESPKKKAKVE

SEQ ID NO: 2162 - protein, 2091 aa, synthetic construct
MPAAKRVKLDGGDKKYSIGLDIGTNSVGWAVITDEYKVPSKKFKVLGNTDRHSIKKNLIGALLFDSGETAEATRLKRTARRRYTRRKNRICYLQEIFSNEMAKVDDSFFHRLEESFLVEEDKKHERHPIFGNIVDEVAYHEKYPTIYHLRKKLVDSTDKADLRLIYLALAHMIKFRGHFLIEGDLNPDNSDVDKLFIQLVQTYNQLFEENPINASGVDAKAILSARLSKSRRLENLIAQLPGEKKNGLFGNLIALSLGLTPNFKSNFDLAEDAKLQLSKDTYDDDLDNLLAQIGDQYADLFLAAKNLSDAILLSDILRVNTEITKAPLSASMIKRYDEHHQDLTLLKALVRQQLPEKYKEIFFDQSKNGYAGYIDGGASQEEFYKFIKPILEKMDGTEELLVKLNREDLLRKQRTFDNGSIPHQIHLGELHAILRRQEDFYPFLKDNREKIEKILTFRIPYYVGPLARGNSRFAWMTRKSEETITPWNFEEVVDKGASAQSFIERMTNFDKNLPNEKVLPKHSLLYEYFTVYNELTKVKYVTEGMRKPAFLSGEQKKAIVDLLFKTNRKVTVKQLKEDYFKKIECFDSVEISGVEDRFNASLGTYHDLLKIIKDKDFLDNEENEDILEDIVLTLTLFEDREMIEERLKTYAHLFDDKVMKQLKRRRYTGWGRLSRKLINGIRDKQSGKTILDFLKSDGFANRNFMQLIHDDSLTFKEDIQKAQVSGQGDSLHEHIANLAGSPAIKKGILQTVKVVDELVKVMGRHKPENIVIEMARENQTTQKGQKNSRERMKRIEEGIKELGSQILKEHPVENTQLQNEKLYLYYLQNGRDMYVDQELDINRLSDYDVDHIVPQSFLKDDSIDNKVLTRSDKARGKSDNVPSEEVVKKMKNYWRQLLNAKLITQRKFDNLTKAERGGLSELDKAGFIKRQLVETRQITKHVAQILDSRMNTKYDENDKLIREVKVITLKSKLVSDFRKDFQFYKVREINNYHHAHDAYLNAVVGTALIKKYPKLESEFVYGDYKVYDVRKMIAKSEQEIGKATAKYFFYSNIMNFFKTEITLANGEIRKRPLIETNGETGEIVWDKGRDFATVRKVLSMPQVNIVKKTEVQTGGFSKESILPKRNSDKLIARKKDWDPKKYGGFDSPTVAYSVLVVAKVEKGKSKKLKSVKELLGITIMERSSFEKNPIDFLEAKGYKEVKKDLIIKLPKYSLFELENGRKRMLASAGELQKGNELALPSKYVNFLYLASHYEKLKGSPEDNEQKQLFVEQHKHYLDEIIEQISEFSKRVILADANLDKVLSAYNKHRDKPIREQAENIIHLFTLTNLGAPAAFKYFDTTIDRKRYTSTKEVLDATLIHQSITGLYETRIDLSQLGGDGGPAPGGSGGLGIEDEYRLHETSTEPDVSLGSTWLSDFPQAWAETGGMGLAVRQAPLIIPLKATSTPVSIQQYPMSHEARLGIKPHIQRLLDQGILVPCQSPWNTPLLPVKKPGTNDYRPVQDLREVNKRVEDIHPTVPNPYNLLSGLPPSHQWYTVLDLKDAFFCLRLHPTSQPLFAFEWRDPGMGISGQLTWTRLPQGFKNSPTLFNEALHRDLADFRIQHPDLILLQYVDDILLAATSELDCQQGTRALLQTLGDLGYRASAKKAQICQKQVKYLGYLLREGQRWLTEARKETVMGQPVPKTPRQLREFLGKAGFCRLFIPGFAEMAAPLYPLTKPGTLFSWGPDQQKAYQEIKQALLTAPALGLPDLTKPFELFVDEKQGYAKGVLTQKLGPWRRPVAYLSKKLDPVAAGWPPCLRMVAAIAVLTKDAGKLTMGQPLVILAPHAVEALVKQPPDRWLSNARMTHYQAMLLDTDRVQFGPVVALNPATLLPLPEEGAPHDCLEILAETHGTRPDLTDQPIPDADHTWYTDGSSFLQEGQRKAGAAVTTETEVIWAGALPAGTSAQRAELIALTQALKMAEGKRLNVYTDSRYAFATAHIHGEIYRRRGWLTSEGREIKNKSEILALLKALFLPKRLSIIHCLGHQKGDSAEARGNRLADQAAREAAIKTPPDTSTLLIAGKRTADGSEFEKRTADGSEFESPKKKAKVE

SEQ ID NO: 2163 - protein, 2096 aa, synthetic construct
MPAAKRVKLDGGDKKYSIGLDIGTNSVGWAVITDEYKVPSKKFKVLGNTDRHSIKKNLIGALLFDSGETAEATRLKRTARRRYTRRKNRICYLQEIFSNEMAKVDDSFFHRLEESFLVEEDKKHERHPIFGNIVDEVAYHEKYPTIYHLRKKLVDSTDKADLRLIYLALAHMIKFRGHFLIEGDLNPDNSDVDKLFIQLVQTYNQLFEENPINASGVDAKAILSARLSKSRRLENLIAQLPGEKKNGLFGNLIALSLGLTPNFKSNFDLAEDAKLQLSKDTYDDDLDNLLAQIGDQYADLFLAAKNLSDAILLSDILRVNTEITKAPLSASMIKRYDEHHQDLTLLKALVRQQLPEKYKEIFFDQSKNGYAGYIDGGASQEEFYKFIKPILEKMDGTEELLVKLNREDLLRKQRTFDNGSIPHQIHLGELHAILRRQEDFYPFLKDNREKIEKILTFRIPYYVGPLARGNSRFAWMTRKSEETITPWNFEEVVDKGASAQSFIERMTNFDKNLPNEKVLPKHSLLYEYFTVYNELTKVKYVTEGMRKPAFLSGEQKKAIVDLLFKTNRKVTVKQLKEDYFKKIECFDSVEISGVEDRFNASLGTYHDLLKIIKDKDFLDNEENEDILEDIVLTLTLFEDREMIEERLKTYAHLFDDKVMKQLKRRRYTGWGRLSRKLINGIRDKQSGKTILDFLKSDGFANRNFMQLIHDDSLTFKEDIQKAQVSGQGDSLHEHIANLAGSPAIKKGILQTVKVVDELVKVMGRHKPENIVIEMARENQTTQKGQKNSRERMKRIEEGIKELGSQILKEHPVENTQLQNEKLYLYYLQNGRDMYVDQELDINRLSDYDVDHIVPQSFLKDDSIDNKVLTRSDKARGKSDNVPSEEVVKKMKNYWRQLLNAKLITQRKFDNLTKAERGGLSELDKAGFIKRQLVETRQITKHVAQILDSRMNTKYDENDKLIREVKVITLKSKLVSDFRKDFQFYKVREINNYHHAHDAYLNAVVGTALIKKYPKLESEFVYGDYKVYDVRKMIAKSEQEIGKATAKYFFYSNIMNFFKTEITLANGEIRKRPLIETNGETGEIVWDKGRDFATVRKVLSMPQVNIVKKTEVQTGGFSKESILPKRNSDKLIARKKDWDPKKYGGFDSPTVAYSVLVVAKVEKGKSKKLKSVKELLGITIMERSSFEKNPIDFLEAKGYKEVKKDLIIKLPKYSLFELENGRKRMLASAGELQKGNELALPSKYVNFLYLASHYEKLKGSPEDNEQKQLFVEQHKHYLDEIIEQISEFSKRVILADANLDKVLSAYNKHRDKPIREQAENIIHLFTLTNLGAPAAFKYFDTTIDRKRYTSTKEVLDATLIHQSITGLYETRIDLSQLGGDGGEAAAKPAPGSSGGLGIEDEYRLHETSTEPDVSLGSTWLSDFPQAWAETGGMGLAVRQAPLIIPLKATSTPVSIQQYPMSHEARLGIKPHIQRLLDQGILVPCQSPWNTPLLPVKKPGTNDYRPVQDLREVNKRVEDIHPTVPNPYNLLSGLPPSHQWYTVLDLKDAFFCLRLHPTSQPLFAFEWRDPGMGISGQLTWTRLPQGFKNSPTLFNEALHRDLADFRIQHPDLILLQYVDDILLAATSELDCQQGTRALLQTLGDLGYRASAKKAQICQKQVKYLGYLLREGQRWLTEARKETVMGQPVPKTPRQLREFLGKAGFCRLFIPGFAEMAAPLYPLTKPGTLFSWGPDQQKAYQEIKQALLTAPALGLPDLTKPFELFVDEKQGYAKGVLTQKLGPWRRPVAYLSKKLDPVAAGWPPCLRMVAAIAVLTKDAGKLTMGQPLVILAPHAVEALVKQPPDRWLSNARMTHYQAMLLDTDRVQFGPVVALNPATLLPLPEEGAPHDCLEILAETHGTRPDLTDQPIPDADHTWYTDGSSFLQEGQRKAGAAVTTETEVIWAGALPAGTSAQRAELIALTQALKMAEGKRLNVYTDSRYAFATAHIHGEIYRRRGWLTSEGREIKNKSEILALLKALFLPKRLSIIHCLGHQKGDSAEARGNRLADQAAREAAIKTPPDTSTLLIAGKRTADGSEFEKRTADGSEFESPKKKAKVE

SEQ ID NO: 2164 - protein, 2100 aa, synthetic construct
MPAAKRVKLDGGDKKYSIGLDIGTNSVGWAVITDEYKVPSKKFKVLGNTDRHSIKKNLIGALLFDSGETAEATRLKRTARRRYTRRKNRICYLQEIFSNEMAKVDDSFFHRLEESFLVEEDKKHERHPIFGNIVDEVAYHEKYPTIYHLRKKLVDSTDKADLRLIYLALAHMIKFRGHFLIEGDLNPDNSDVDKLFIQLVQTYNQLFEENPINASGVDAKAILSARLSKSRRLENLIAQLPGEKKNGLFGNLIALSLGLTPNFKSNFDLAEDAKLQLSKDTYDDDLDNLLAQIGDQYADLFLAAKNLSDAILLSDILRVNTEITKAPLSASMIKRYDEHHQDLTLLKALVRQQLPEKYKEIFFDQSKNGYAGYIDGGASQEEFYKFIKPILEKMDGTEELLVKLNREDLLRKQRTFDNGSIPHQIHLGELHAILRRQEDFYPFLKDNREKIEKILTFRIPYYVGPLARGNSRFAWMTRKSEETITPWNFEEVVDKGASAQSFIERMTNFDKNLPNEKVLPKHSLLYEYFTVYNELTKVKYVTEGMRKPAFLSGEQKKAIVDLLFKTNRKVTVKQLKEDYFKKIECFDSVEISGVEDRFNASLGTYHDLLKIIKDKDFLDNEENEDILEDIVLTLTLFEDREMIEERLKTYAHLFDDKVMKQLKRRRYTGWGRLSRKLINGIRDKQSGKTILDFLKSDGFANRNFMQLIHDDSLTFKEDIQKAQVSGQGDSLHEHIANLAGSPAIKKGILQTVKVVDELVKVMGRHKPENIVIEMARENQTTQKGQKNSRERMKRIEEGIKELGSQILKEHPVENTQLQNEKLYLYYLQNGRDMYVDQELDINRLSDYDVDHIVPQSFLKDDSIDNKVLTRSDKARGKSDNVPSEEVVKKMKNYWRQLLNAKLITQRKFDNLTKAERGGLSELDKAGFIKRQLVETRQITKHVAQILDSRMNTKYDENDKLIREVKVITLKSKLVSDFRKDFQFYKVREINNYHHAHDAYLNAVVGTALIKKYPKLESEFVYGDYKVYDVRKMIAKSEQEIGKATAKYFFYSNIMNFFKTEITLANGEIRKRPLIETNGETGEIVWDKGRDFATVRKVLSMPQVNIVKKTEVQTGGFSKESILPKRNSDKLIARKKDWDPKKYGGFDSPTVAYSVLVVAKVEKGKSKKLKSVKELLGITIMERSSFEKNPIDFLEAKGYKEVKKDLIIKLPKYSLFELENGRKRMLASAGELQKGNELALPSKYVNFLYLASHYEKLKGSPEDNEQKQLFVEQHKHYLDEIIEQISEFSKRVILADANLDKVLSAYNKHRDKPIREQAENIIHLFTLTNLGAPAAFKYFDTTIDRKRYTSTKEVLDATLIHQSITGLYETRIDLSQLGGDGGGSSGSSGSSGSSGSSGGLGIEDEYRLHETSTEPDVSLGSTWLSDFPQAWAETGGMGLAVRQAPLIIPLKATSTPVSIQQYPMSHEARLGIKPHIQRLLDQGILVPCQSPWNTPLLPVKKPGTNDYRPVQDLREVNKRVEDIHPTVPNPYNLLSGLPPSHQWYTVLDLKDAFFCLRLHPTSQPLFAFEWRDPGMGISGQLTWTRLPQGFKNSPTLFNEALHRDLADFRIQHPDLILLQYVDDILLAATSELDCQQGTRALLQTLGDLGYRASAKKAQICQKQVKYLGYLLREGQRWLTEARKETVMGQPVPKTPRQLREFLGKAGFCRLFIPGFAEMAAPLYPLTKPGTLFSWGPDQQKAYQEIKQALLTAPALGLPDLTKPFELFVDEKQGYAKGVLTQKLGPWRRPVAYLSKKLDPVAAGWPPCLRMVAAIAVLTKDAGKLTMGQPLVILAPHAVEALVKQPPDRWLSNARMTHYQAMLLDTDRVQFGPVVALNPATLLPLPEEGAPHDCLEILAETHGTRPDLTDQPIPDADHTWYTDGSSFLQEGQRKAGAAVTTETEVIWAGALPAGTSAQRAELIALTQALKMAEGKRLNVYTDSRYAFATAHIHGEIYRRRGWLTSEGREIKNKSEILALLKALFLPKRLSIIHCLGHQKGDSAEARGNRLADQAAREAAIKTPPDTSTLLIAGKRTADGSEFEKRTADGSEFESPKKKAKVE

SEQ ID NO: 2165 - protein, 2094 aa, synthetic construct
MPAAKRVKLDGGDKKYSIGLDIGTNSVGWAVITDEYKVPSKKFKVLGNTDRHSIKKNLIGALLFDSGETAEATRLKRTARRRYTRRKNRICYLQEIFSNEMAKVDDSFFHRLEESFLVEEDKKHERHPIFGNIVDEVAYHEKYPTIYHLRKKLVDSTDKADLRLIYLALAHMIKFRGHFLIEGDLNPDNSDVDKLFIQLVQTYNQLFEENPINASGVDAKAILSARLSKSRRLENLIAQLPGEKKNGLFGNLIALSLGLTPNFKSNFDLAEDAKLQLSKDTYDDDLDNLLAQIGDQYADLFLAAKNLSDAILLSDILRVNTEITKAPLSASMIKRYDEHHQDLTLLKALVRQQLPEKYKEIFFDQSKNGYAGYIDGGASQEEFYKFIKPILEKMDGTEELLVKLNREDLLRKQRTFDNGSIPHQIHLGELHAILRRQEDFYPFLKDNREKIEKILTFRIPYYVGPLARGNSRFAWMTRKSEETITPWNFEEVVDKGASAQSFIERMTNFDKNLPNEKVLPKHSLLYEYFTVYNELTKVKYVTEGMRKPAFLSGEQKKAIVDLLFKTNRKVTVKQLKEDYFKKIECFDSVEISGVEDRFNASLGTYHDLLKIIKDKDFLDNEENEDILEDIVLTLTLFEDREMIEERLKTYAHLFDDKVMKQLKRRRYTGWGRLSRKLINGIRDKQSGKTILDFLKSDGFANRNFMQLIHDDSLTFKEDIQKAQVSGQGDSLHEHIANLAGSPAIKKGILQTVKVVDELVKVMGRHKPENIVIEMARENQTTQKGQKNSRERMKRIEEGIKELGSQILKEHPVENTQLQNEKLYLYYLQNGRDMYVDQELDINRLSDYDVDHIVPQSFLKDDSIDNKVLTRSDKARGKSDNVPSEEVVKKMKNYWRQLLNAKLITQRKFDNLTKAERGGLSELDKAGFIKRQLVETRQITKHVAQILDSRMNTKYDENDKLIREVKVITLKSKLVSDFRKDFQFYKVREINNYHHAHDAYLNAVVGTALIKKYPKLESEFVYGDYKVYDVRKMIAKSEQEIGKATAKYFFYSNIMNFFKTEITLANGEIRKRPLIETNGETGEIVWDKGRDFATVRKVLSMPQVNIVKKTEVQTGGFSKESILPKRNSDKLIARKKDWDPKKYGGFDSPTVAYSVLVVAKVEKGKSKKLKSVKELLGITIMERSSFEKNPIDFLEAKGYKEVKKDLIIKLPKYSLFELENGRKRMLASAGELQKGNELALPSKYVNFLYLASHYEKLKGSPEDNEQKQLFVEQHKHYLDEIIEQISEFSKRVILADANLDKVLSAYNKHRDKPIREQAENIIHLFTLTNLGAPAAFKYFDTTIDRKRYTSTKEVLDATLIHQSITGLYETRIDLSQLGGDGGGSSGGSGGGGGLGIEDEYRLHETSTEPDVSLGSTWLSDFPQAWAETGGMGLAVRQAPLIIPLKATSTPVSIQQYPMSHEARLGIKPHIQRLLDQGILVPCQSPWNTPLLPVKKPGTNDYRPVQDLREVNKRVEDIHPTVPNPYNLLSGLPPSHQWYTVLDLKDAFFCLRLHPTSQPLFAFEWRDPGMGISGQLTWTRLPQGFKNSPTLFNEALHRDLADFRIQHPDLILLQYVDDILLAATSELDCQQGTRALLQTLGDLGYRASAKKAQICQKQVKYLGYLLREGQRWLTEARKETVMGQPVPKTPRQLREFLGKAGFCRLFIPGFAEMAAPLYPLTKPGTLFSWGPDQQKAYQEIKQALLTAPALGLPDLTKPFELFVDEKQGYAKGVLTQKLGPWRRPVAYLSKKLDPVAAGWPPCLRMVAAIAVLTKDAGKLTMGQPLVILAPHAVEALVKQPPDRWLSNARMTHYQAMLLDTDRVQFGPVVALNPATLLPLPEEGAPHDCLEILAETHGTRPDLTDQPIPDADHTWYTDGSSFLQEGQRKAGAAVTTETEVIWAGALPAGTSAQRAELIALTQALKMAEGKRLNVYTDSRYAFATAHIHGEIYRRRGWLTSEGREIKNKSEILALLKALFLPKRLSIIHCLGHQKGDSAEARGNRLADQAAREAAIKTPPDTSTLLIAGKRTADGSEFEKRTADGSEFESPKKKAKVE

SEQ ID NO: 2166 - protein, 2094 aa, synthetic construct; identical to SEQ ID NO: 2051

SEQ ID NO: 2167 - protein, 2092 aa, synthetic construct
MPAAKRVKLDGGDKKYSIGLDIGTNSVGWAVITDEYKVPSKKFKVLGNTDRHSIKKNLIGALLFDSGETAEATRLKRTARRRYTRRKNRICYLQEIFSNEMAKVDDSFFHRLEESFLVEEDKKHERHPIFGNIVDEVAYHEKYPTIYHLRKKLVDSTDKADLRLIYLALAHMIKFRGHFLIEGDLNPDNSDVDKLFIQLVQTYNQLFEENPINASGVDAKAILSARLSKSRRLENLIAQLPGEKKNGLFGNLIALSLGLTPNFKSNFDLAEDAKLQLSKDTYDDDLDNLLAQIGDQYADLFLAAKNLSDAILLSDILRVNTEITKAPLSASMIKRYDEHHQDLTLLKALVRQQLPEKYKEIFFDQSKNGYAGYIDGGASQEEFYKFIKPILEKMDGTEELLVKLNREDLLRKQRTFDNGSIPHQIHLGELHAILRRQEDFYPFLKDNREKIEKILTFRIPYYVGPLARGNSRFAWMTRKSEETITPWNFEEVVDKGASAQSFIERMTNFDKNLPNEKVLPKHSLLYEYFTVYNELTKVKYVTEGMRKPAFLSGEQKKAIVDLLFKTNRKVTVKQLKEDYFKKIECFDSVEISGVEDRFNASLGTYHDLLKIIKDKDFLDNEENEDILEDIVLTLTLFEDREMIEERLKTYAHLFDDKVMKQLKRRRYTGWGRLSRKLINGIRDKQSGKTILDFLKSDGFANRNFMQLIHDDSLTFKEDIQKAQVSGQGDSLHEHIANLAGSPAIKKGILQTVKVVDELVKVMGRHKPENIVIEMARENQTTQKGQKNSRERMKRIEEGIKELGSQILKEHPVENTQLQNEKLYLYYLQNGRDMYVDQELDINRLSDYDVDHIVPQSFLKDDSIDNKVLTRSDKARGKSDNVPSEEVVKKMKNYWRQLLNAKLITQRKFDNLTKAERGGLSELDKAGFIKRQLVETRQITKHVAQILDSRMNTKYDENDKLIREVKVITLKSKLVSDFRKDFQFYKVREINNYHHAHDAYLNAVVGTALIKKYPKLESEFVYGDYKVYDVRKMIAKSEQEIGKATAKYFFYSNIMNFFKTEITLANGEIRKRPLIETNGETGEIVWDKGRDFATVRKVLSMPQVNIVKKTEVQTGGFSKESILPKRNSDKLIARKKDWDPKKYGGFDSPTVAYSVLVVAKVEKGKSKKLKSVKELLGITIMERSSFEKNPIDFLEAKGYKEVKKDLIIKLPKYSLFELENGRKRMLASAGELQKGNELALPSKYVNFLYLASHYEKLKGSPEDNEQKQLFVEQHKHYLDEIIEQISEFSKRVILADANLDKVLSAYNKHRDKPIREQAENIIHLFTLTNLGAPAAFKYFDTTIDRKRYTSTKEVLDATLIHQSITGLYETRIDLSQLGGDGGPAPAPAPGGLGIEDEYRLHETSTEPDVSLGSTWLSDFPQAWAETGGMGLAVRQAPLIIPLKATSTPVSIQQYPMSHEARLGIKPHIQRLLDQGILVPCQSPWNTPLLPVKKPGTNDYRPVQDLREVNKRVEDIHPTVPNPYNLLSGLPPSHQWYTVLDLKDAFFCLRLHPTSQPLFAFEWRDPGMGISGQLTWTRLPQGFKNSPTLFNEALHRDLADFRIQHPDLILLQYVDDILLAATSELDCQQGTRALLQTLGDLGYRASAKKAQICQKQVKYLGYLLREGQRWLTEARKETVMGQPVPKTPRQLREFLGKAGFCRLFIPGFAEMAAPLYPLTKPGTLFSWGPDQQKAYQEIKQALLTAPALGLPDLTKPFELFVDEKQGYAKGVLTQKLGPWRRPVAYLSKKLDPVAAGWPPCLRMVAAIAVLTKDAGKLTMGQPLVILAPHAVEALVKQPPDRWLSNARMTHYQAMLLDTDRVQFGPVVALNPATLLPLPEEGAPHDCLEILAETHGTRPDLTDQPIPDADHTWYTDGSSFLQEGQRKAGAAVTTETEVIWAGALPAGTSAQRAELIALTQALKMAEGKRLNVYTDSRYAFATAHIHGEIYRRRGWLTSEGREIKNKSEILALLKALFLPKRLSIIHCLGHQKGDSAEARGNRLADQAAREAAIKTPPDTSTLLIAGKRTADGSEFEKRTADGSEFESPKKKAKVE

SEQ ID NO: 2168 - protein, 2096 aa, synthetic construct
MPAAKRVKLDGGDKKYSIGLDIGTNSVGWAVITDEYKVPSKKFKVLGNTDRHSIKKNLIGALLFDSGETAEATRLKRTARRRYTRRKNRICYLQEIFSNEMAKVDDSFFHRLEESFLVEEDKKHERHPIFGNIVDEVAYHEKYPTIYHLRKKLVDSTDKADLRLIYLALAHMIKFRGHFLIEGDLNPDNSDVDKLFIQLVQTYNQLFEENPINASGVDAKAILSARLSKSRRLENLIAQLPGEKKNGLFGNLIALSLGLTPNFKSNFDLAEDAKLQLSKDTYDDDLDNLLAQIGDQYADLFLAAKNLSDAILLSDILRVNTEITKAPLSASMIKRYDEHHQDLTLLKALVRQQLPEKYKEIFFDQSKNGYAGYIDGGASQEEFYKFIKPILEKMDGTEELLVKLNREDLLRKQRTFDNGSIPHQIHLGELHAILRRQEDFYPFLKDNREKIEKILTFRIPYYVGPLARGNSRFAWMTRKSEETITPWNFEEVVDKGASAQSFIERMTNFDKNLPNEKVLPKHSLLYEYFTVYNELTKVKYVTEGMRKPAFLSGEQKKAIVDLLFKTNRKVTVKQLKEDYFKKIECFDSVEISGVEDRFNASLGTYHDLLKIIKDKDFLDNEENEDILEDIVLTLTLFEDREMIEERLKTYAHLFDDKVMKQLKRRRYTGWGRLSRKLINGIRDKQSGKTILDFLKSDGFANRNFMQLIHDDSLTFKEDIQKAQVSGQGDSLHEHIANLAGSPAIKKGILQTVKVVDELVKVMGRHKPENIVIEMARENQTTQKGQKNSRERMKRIEEGIKELGSQILKEHPVENTQLQNEKLYLYYLQNGRDMYVDQELDINRLSDYDVDHIVPQSFLKDDSIDNKVLTRSDKARGKSDNVPSEEVVKKMKNYWRQLLNAKLITQRKFDNLTKAERGGLSELDKAGFIKRQLVETRQITKHVAQILDSRMNTKYDENDKLIREVKVITLKSKLVSDFRKDFQFYKVREINNYHHAHDAYLNAVVGTALIKKYPKLESEFVYGDYKVYDVRKMIAKSEQEIGKATAKYFFYSNIMNFFKTEITLANGEIRKRPLIETNGETGEIVWDKGRDFATVRKVLSMPQVNIVKKTEVQTGGFSKESILPKRNSDKLIARKKDWDPKKYGGFDSPTVAYSVLVVAKVEKGKSKKLKSVKELLGITIMERSSFEKNPIDFLEAKGYKEVKKDLIIKLPKYSLFELENGRKRMLASAGELQKGNELALPSKYVNFLYLASHYEKLKGSPEDNEQKQLFVEQHKHYLDEIIEQISEFSKRVILADANLDKVLSAYNKHRDKPIREQAENIIHLFTLTNLGAPAAFKYFDTTIDRKRYTSTKEVLDATLIHQSITGLYETRIDLSQLGGDGGGGSEAAAKGSSGGLGIEDEYRLHETSTEPDVSLGSTWLSDFPQAWAETGGMGLAVRQAPLIIPLKATSTPVSIQQYPMSHEARLGIKPHIQRLLDQGILVPCQSPWNTPLLPVKKPGTNDYRPVQDLREVNKRVEDIHPTVPNPYNLLSGLPPSHQWYTVLDLKDAFFCLRLHPTSQPLFAFEWRDPGMGISGQLTWTRLPQGFKNSPTLFNEALHRDLADFRIQHPDLILLQYVDDILLAATSELDCQQGTRALLQTLGDLGYRASAKKAQICQKQVKYLGYLLREGQRWLTEARKETVMGQPVPKTPRQLREFLGKAGFCRLFIPGFAEMAAPLYPLTKPGTLFSWGPDQQKAYQEIKQALLTAPALGLPDLTKPFELFVDEKQGYAKGVLTQKLGPWRRPVAYLSKKLDPVAAGWPPCLRMVAAIAVLTKDAGKLTMGQPLVILAPHAVEALVKQPPDRWLSNARMTHYQAMLLDTDRVQFGPVVALNPATLLPLPEEGAPHDCLEILAETHGTRPDLTDQPIPDADHTWYTDGSSFLQEGQRKAGAAVTTETEVIWAGALPAGTSAQRAELIALTQALKMAEGKRLNVYTDSRYAFATAHIHGEIYRRRGWLTSEGREIKNKSEILALLKALFLPKRLSIIHCLGHQKGDSAEARGNRLADQAAREAAIKTPPDTSTLLIAGKRTADGSEFEKRTADGSEFESPKKKAKVE

SEQ ID NO: 2169 - protein, 2090 aa, synthetic construct
MPAAKRVKLDGGDKKYSIGLDIGTNSVGWAVITDEYKVPSKKFKVLGNTDRHSIKKNLIGALLFDSGETAEATRLKRTARRRYTRRKNRICYLQEIFSNEMAKVDDSFFHRLEESFLVEEDKKHERHPIFGNIVDEVAYHEKYPTIYHLRKKLVDSTDKADLRLIYLALAHMIKFRGHFLIEGDLNPDNSDVDKLFIQLVQTYNQLFEENPINASGVDAKAILSARLSKSRRLENLIAQLPGEKKNGLFGNLIALSLGLTPNFKSNFDLAEDAKLQLSKDTYDDDLDNLLAQIGDQYADLFLAAKNLSDAILLSDILRVNTEITKAPLSASMIKRYDEHHQDLTLLKALVRQQLPEKYKEIFFDQSKNGYAGYIDGGASQEEFYKFIKPILEKMDGTEELLVKLNREDLLRKQRTFDNGSIPHQIHLGELHAILRRQEDFYPFLKDNREKIEKILTFRIPYYVGPLARGNSRFAWMTRKSEETITPWNFEEVVDKGASAQSFIERMTNFDKNLPNEKVLPKHSLLYEYFTVYNELTKVKYVTEGMRKPAFLSGEQKKAIVDLLFKTNRKVTVKQLKEDYFKKIECFDSVEISGVEDRFNASLGTYHDLLKIIKDKDFLDNEENEDILEDIVLTLTLFEDREMIEERLKTYAHLFDDKVMKQLKRRRYTGWGRLSRKLINGIRDKQSGKTILDFLKSDGFANRNFMQLIHDDSLTFKEDIQKAQVSGQGDSLHEHIANLAGSPAIKKGILQTVKVVDELVKVMGRHKPENIVIEMARENQTTQKGQKNSRERMKRIEEGIKELGSQILKEHPVENTQLQNEKLYLYYLQNGRDMYVDQELDINRLSDYDVDHIVPQSFLKDDSIDNKVLTRSDKARGKSDNVPSEEVVKKMKNYWRQLLNAKLITQRKFDNLTKAERGGLSELDKAGFIKRQLVETRQITKHVAQILDSRMNTKYDENDKLIREVKVITLKSKLVSDFRKDFQFYKVREINNYHHAHDAYLNAVVGTALIKKYPKLESEFVYGDYKVYDVRKMIAKSEQEIGKATAKYFFYSNIMNFFKTEITLANGEIRKRPLIETNGETGEIVWDKGRDFATVRKVLSMPQVNIVKKTEVQTGGFSKESILPKRNSDKLIARKKDWDPKKYGGFDSPTVAYSVLVVAKVEKGKSKKLKSVKELLGITIMERSSFEKNPIDFLEAKGYKEVKKDLIIKLPKYSLFELENGRKRMLASAGELQKGNELALPSKYVNFLYLASHYEKLKGSPEDNEQKQLFVEQHKHYLDEIIEQISEFSKRVILADANLDKVLSAYNKHRDKPIREQAENIIHLFTLTNLGAPAAFKYFDTTIDRKRYTSTKEVLDATLIHQSITGLYETRIDLSQLGGDGGGGGGGGGLGIEDEYRLHETSTEPDVSLGSTWLSDFPQAWAETGGMGLAVRQAPLIIPLKATSTPVSIQQYPMSHEARLGIKPHIQRLLDQGILVPCQSPWNTPLLPVKKPGTNDYRPVQDLREVNKRVEDIHPTVPNPYNLLSGLPPSHQWYTVLDLKDAFFCLRLHPTSQPLFAFEWRDPGMGISGQLTWTRLPQGFKNSPTLFNEALHRDLADFRIQHPDLILLQYVDDILLAATSELDCQQGTRALLQTLGDLGYRASAKKAQICQKQVKYLGYLLREGQRWLTEARKETVMGQPVPKTPRQLREFLGKAGFCRLFIPGFAEMAAPLYPLTKPGTLFSWGPDQQKAYQEIKQALLTAPALGLPDLTKPFELFVDEKQGYAKGVLTQKLGPWRRPVAYLSKKLDPVAAGWPPCLRMVAAIAVLTKDAGKLTMGQPLVILAPHAVEALVKQPPDRWLSNARMTHYQAMLLDTDRVQFGPVVALNPATLLPLPEEGAPHDCLEILAETHGTRPDLTDQPIPDADHTWYTDGSSFLQEGQRKAGAAVTTETEVIWAGALPAGTSAQRAELIALTQALKMAEGKRLNVYTDSRYAFATAHIHGEIYRRRGWLTSEGREIKNKSEILALLKALFLPKRLSIIHCLGHQKGDSAEARGNRLADQAAREAAIKTPPDTSTLLIAGKRTADGSEFEKRTADGSEFESPKKKAKVE

SEQ ID NO: 2170 - protein, 2091 aa, synthetic construct
MPAAKRVKLDGGDKKYSIGLDIGTNSVGWAVITDEYKVPSKKFKVLGNTDRHSIKKNLIGALLFDSGETAEATRLKRTARRRYTRRKNRICYLQEIFSNEMAKVDDSFFHRLEESFLVEEDKKHERHPIFGNIVDEVAYHEKYPTIYHLRKKLVDSTDKADLRLIYLALAHMIKFRGHFLIEGDLNPDNSDVDKLFIQLVQTYNQLFEENPINASGVDAKAILSARLSKSRRLENLIAQLPGEKKNGLFGNLIALSLGLTPNFKSNFDLAEDAKLQLSKDTYDDDLDNLLAQIGDQYADLFLAAKNLSDAILLSDILRVNTEITKAPLSASMIKRYDEHHQDLTLLKALVRQQLPEKYKEIFFDQSKNGYAGYIDGGASQEEFYKFIKPILEKMDGTEELLVKLNREDLLRKQRTFDNGSIPHQIHLGELHAILRRQEDFYPFLKDNREKIEKILTFRIPYYVGPLARGNSRFAWMTRKSEETITPWNFEEVVDKGASAQSFIERMTNFDKNLPNEKVLPKHSLLYEYFTVYNELTKVKYVTEGMRKPAFLSGEQKKAIVDLLFKTNRKVTVKQLKEDYFKKIECFDSVEISGVEDRFNASLGTYHDLLKIIKDKDFLDNEENEDILEDIVLTLTLFEDREMIEERLKTYAHLFDDKVMKQLKRRRYTGWGRLSRKLINGIRDKQSGKTILDFLKSDGFANRNFMQLIHDDSLTFKEDIQKAQVSGQGDSLHEHIANLAGSPAIKKGILQTVKVVDELVKVMGRHKPENIVIEMARENQTTQKGQKNSRERMKRIEEGIKELGSQILKEHPVENTQLQNEKLYLYYLQNGRDMYVDQELDINRLSDYDVDHIVPQSFLKDDSIDNKVLTRSDKARGKSDNVPSEEVVKKMKNYWRQLLNAKLITQRKFDNLTKAERGGLSELDKAGFIKRQLVETRQITKHVAQILDSRMNTKYDENDKLIREVKVITLKSKLVSDFRKDFQFYKVREINNYHHAHDAYLNAVVGTALIKKYPKLESEFVYGDYKVYDVRKMIAKSEQEIGKATAKYFFYSNIMNFFKTEITLANGEIRKRPLIETNGETGEIVWDKGRDFATVRKVLSMPQVNIVKKTEVQTGGFSKESILPKRNSDKLIARKKDWDPKKYGGFDSPTVAYSVLVVAKVEKGKSKKLKSVKELLGITIMERSSFEKNPIDFLEAKGYKEVKKDLIIKLPKYSLFELENGRKRMLASAGELQKGNELALPSKYVNFLYLASHYEKLKGSPEDNEQKQLFVEQHKHYLDEIIEQISEFSKRVILADANLDKVLSAYNKHRDKPIREQAENIIHLFTLTNLGAPAAFKYFDTTIDRKRYTSTKEVLDATLIHQSITGLYETRIDLSQLGGDGGGSSGGGGGLGIEDEYRLHETSTEPDVSLGSTWLSDFPQAWAETGGMGLAVRQAPLIIPLKATSTPVSIQQYPMSHEARLGIKPHIQRLLDQGILVPCQSPWNTPLLPVKKPGTNDYRPVQDLREVNKRVEDIHPTVPNPYNLLSGLPPSHQWYTVLDLKDAFFCLRLHPTSQPLFAFEWRDPGMGISGQLTWTRLPQGFKNSPTLFNEALHRDLADFRIQHPDLILLQYVDDILLAATSELDCQQGTRALLQTLGDLGYRASAKKAQICQKQVKYLGYLLREGQRWLTEARKETVMGQPVPKTPRQLREFLGKAGFCRLFIPGFAEMAAPLYPLTKPGTLFSWGPDQQKAYQEIKQALLTAPALGLPDLTKPFELFVDEKQGYAKGVLTQKLGPWRRPVAYLSKKLDPVAAGWPPCLRMVAAIAVLTKDAGKLTMGQPLVILAPHAVEALVKQPPDRWLSNARMTHYQAMLLDTDRVQFGPVVALNPATLLPLPEEGAPHDCLEILAETHGTRPDLTDQPIPDADHTWYTDGSSFLQEGQRKAGAAVTTETEVIWAGALPAGTSAQRAELIALTQALKMAEGKRLNVYTDSRYAFATAHIHGEIYRRRGWLTSEGREIKNKSEILALLKALFLPKRLSIIHCLGHQKGDSAEARGNRLADQAAREAAIKTPPDTSTLLIAGKRTADGSEFEKRTADGSEFESPKKKAKVE

SEQ ID NO: 2171 - protein, 2091 aa, synthetic construct
MPAAKRVKLDGGDKKYSIGLDIGTNSVGWAVITDEYKVPSKKFKVLGNTDRHSIKKNLIGALLFDSGETAEATRLKRTARRRYTRRKNRICYLQEIFSNEMAKVDDSFFHRLEESFLVEEDKKHERHPIFGNIVDEVAYHEKYPTIYHLRKKLVDSTDKADLRLIYLALAHMIKFRGHFLIEGDLNPDNSDVDKLFIQLVQTYNQLFEENPINASGVDAKAILSARLSKSRRLENLIAQLPGEKKNGLFGNLIALSLGLTPNFKSNFDLAEDAKLQLSKDTYDDDLDNLLAQIGDQYADLFLAAKNLSDAILLSDILRVNTEITKAPLSASMIKRYDEHHQDLTLLKALVRQQLPEKYKEIFFDQSKNGYAGYIDGGASQEEFYKFIKPILEKMDGTEELLVKLNREDLLRKQRTFDNGSIPHQIHLGELHAILRRQEDFYPFLKDNREKIEKILTFRIPYYVGPLARGNSRFAWMTRKSEETITPWNFEEVVDKGASAQSFIERMTNFDKNLPNEKVLPKHSLLYEYFTVYNELTKVKYVTEGMRKPAFLSGEQKKAIVDLLFKTNRKVTVKQLKEDYFKKIECFDSVEISGVEDRFNASLGTYHDLLKIIKDKDFLDNEENEDILEDIVLTLTLFEDREMIEERLKTYAHLFDDKVMKQLKRRRYTGWGRLSRKLINGIRDKQSGKTILDFLKSDGFANRNFMQLIHDDSLTFKEDIQKAQVSGQGDSLHEHIANLAGSPAIKKGILQTVKVVDELVKVMGRHKPENIVIEMARENQTTQKGQKNSRERMKRIEEGIKELGSQILKEHPVENTQLQNEKLYLYYLQNGRDMYVDQELDINRLSDYDVDHIVPQSFLKDDSIDNKVLTRSDKARGKSDNVPSEEVVKKMKNYWRQLLNAKLITQRKFDNLTKAERGGLSELDKAGFIKRQLVETRQITKHVAQILDSRMNTKYDENDKLIREVKVITLKSKLVSDFRKDFQFYKVREINNYHHAHDAYLNAVVGTALIKKYPKLESEFVYGDYKVYDVRKMIAKSEQEIGKATAKYFFYSNIMNFFKTEITLANGEIRKRPLIETNGETGEIVWDKGRDFATVRKVLSMPQVNIVKKTEVQTGGFSKESILPKRNSDKLIARKKDWDPKKYGGFDSPTVAYSVLVVAKVEKGKSKKLKSVKELLGITIMERSSFEKNPIDFLEAKGYKEVKKDLIIKLPKYSLFELENGRKRMLASAGELQKGNELALPSKYVNFLYLASHYEKLKGSPEDNEQKQLFVEQHKHYLDEIIEQISEFSKRVILADANLDKVLSAYNKHRDKPIREQAENIIHLFTLTNLGAPAAFKYFDTTIDRKRYTSTKEVLDATLIHQSITGLYETRIDLSQLGGDGGGSSGGSGGLGIEDEYRLHETSTEPDVSLGSTWLSDFPQAWAETGGMGLAVRQAPLIIPLKATSTPVSIQQYPMSHEARLGIKPHIQRLLDQGILVPCQSPWNTPLLPVKKPGTNDYRPVQDLREVNKRVEDIHPTVPNPYNLLSGLPPSHQWYTVLDLKDAFFCLRLHPTSQPLFAFEWRDPGMGISGQLTWTRLPQGFKNSPTLFNEALHRDLADFRIQHPDLILLQYVDDILLAATSELDCQQGTRALLQTLGDLGYRASAKKAQICQKQVKYLGYLLREGQRWLTEARKETVMGQPVPKTPRQLREFLGKAGFCRLFIPGFAEMAAPLYPLTKPGTLFSWGPDQQKAYQEIKQALLTAPALGLPDLTKPFELFVDEKQGYAKGVLTQKLGPWRRPVAYLSKKLDPVAAGWPPCLRMVAAIAVLTKDAGKLTMGQPLVILAPHAVEALVKQPPDRWLSNARMTHYQAMLLDTDRVQFGPVVALNPATLLPLPEEGAPHDCLEILAETHGTRPDLTDQPIPDADHTWYTDGSSFLQEGQRKAGAAVTTETEVIWAGALPAGTSAQRAELIALTQALKMAEGKRLNVYTDSRYAFATAHIHGEIYRRRGWLTSEGREIKNKSEILALLKALFLPKRLSIIHCLGHQKGDSAEARGNRLADQAAREAAIKTPPDTSTLLIAGKRTADGSEFEKRTADGSEFESPKKKAKVE

SEQ ID NO: 2172 - protein, 2094 aa, synthetic construct
MPAAKRVKLDGGDKKYSIGLDIGTNSVGWAVITDEYKVPSKKFKVLGNTDRHSIKKNLIGALLFDSGETAEATRLKRTARRRYTRRKNRICYLQEIFSNEMAKVDDSFFHRLEESFLVEEDKKHERHPIFGNIVDEVAYHEKYPTIYHLRKKLVDSTDKADLRLIYLALAHMIKFRGHFLIEGDLNPDNSDVDKLFIQLVQTYNQLFEENPINASGVDAKAILSARLSKSRRLENLIAQLPGEKKNGLFGNLIALSLGLTPNFKSNFDLAEDAKLQLSKDTYDDDLDNLLAQIGDQYADLFLAAKNLSDAILLSDILRVNTEITKAPLSASMIKRYDEHHQDLTLLKALVRQQLPEKYKEIFFDQSKNGYAGYIDGGASQEEFYKFIKPILEKMDGTEELLVKLNREDLLRKQRTFDNGSIPHQIHLGELHAILRRQEDFYPFLKDNREKIEKILTFRIPYYVGPLARGNSRFAWMTRKSEETITPWNFEEVVDKGASAQSFIERMTNFDKNLPNEKVLPKHSLLYEYFTVYNELTKVKYVTEGMRKPAFLSGEQKKAIVDLLFKTNRKVTVKQLKEDYFKKIECFDSVEISGVEDRFNASLGTYHDLLKIIKDKDFLDNEENEDILEDIVLTLTLFEDREMIEERLKTYAHLFDDKVMKQLKRRRYTGWGRLSRKLINGIRDKQSGKTILDFLKSDGFANRNFMQLIHDDSLTFKEDIQKAQVSGQGDSLHEHIANLAGSPAIKKGILQTVKVVDELVKVMGRHKPENIVIEMARENQTTQKGQKNSRERMKRIEEGIKELGSQILKEHPVENTQLQNEKLYLYYLQNGRDMYVDQELDINRLSDYDVDHIVPQSFLKDDSIDNKVLTRSDKARGKSDNVPSEEVVKKMKNYWRQLLNAKLITQRKFDNLTKAERGGLSELDKAGFIKRQLVETRQITKHVAQILDSRMNTKYDENDKLIREVKVITLKSKLVSDFRKDFQFYKVREINNYHHAHDAYLNAVVGTALIKKYPKLESEFVYGDYKVYDVRKMIAKSEQEIGKATAKYFFYSNIMNFFKTEITLANGEIRKRPLIETNGETGEIVWDKGRDFATVRKVLSMPQVNIVKKTEVQTGGFSKESILPKRNSDKLIARKKDWDPKKYGGFDSPTVAYSVLVVAKVEKGKSKKLKSVKELLGITIMERSSFEKNPIDFLEAKGYKEVKKDLIIKLPKYSLFELENGRKRMLASAGELQKGNELALPSKYVNFLYLASHYEKLKGSPEDNEQKQLFVEQHKHYLDEIIEQISEFSKRVILADANLDKVLSAYNKHRDKPIREQAENIIHLFTLTNLGAPAAFKYFDTTIDRKRYTSTKEVLDATLIHQSITGLYETRIDLSQLGGDGGGGSGGGGSSGGLGIEDEYRLHETSTEPDVSLGSTWLSDFPQAWAETGGMGLAVRQAPLIIPLKATSTPVSIQQYPMSHEARLGIKPHIQRLLDQGILVPCQSPWNTPLLPVKKPGTNDYRPVQDLREVNKRVEDIHPTVPNPYNLLSGLPPSHQWYTVLDLKDAFFCLRLHPTSQPLFAFEWRDPGMGISGQLTWTRLPQGFKNSPTLFNEALHRDLADFRIQHPDLILLQYVDDILLAATSELDCQQGTRALLQTLGDLGYRASAKKAQICQKQVKYLGYLLREGQRWLTEARKETVMGQPVPKTPRQLREFLGKAGFCRLFIPGFAEMAAPLYPLTKPGTLFSWGPDQQKAYQEIKQALLTAPALGLPDLTKPFELFVDEKQGYAKGVLTQKLGPWRRPVAYLSKKLDPVAAGWPPCLRMVAAIAVLTKDAGKLTMGQPLVILAPHAVEALVKQPPDRWLSNARMTHYQAMLLDTDRVQFGPVVALNPATLLPLPEEGAPHDCLEILAETHGTRPDLTDQPIPDADHTWYTDGSSFLQEGQRKAGAAVTTETEVIWAGALPAGTSAQRAELIALTQALKMAEGKRLNVYTDSRYAFATAHIHGEIYRRRGWLTSEGREIKNKSEILALLKALFLPKRLSIIHCLGHQKGDSAEARGNRLADQAAREAAIKTPPDTSTLLIAGKRTADGSEFEKRTADGSEFESPKKKAKVE

SEQ ID NO: 2173 - protein, 2096 aa, synthetic construct
MPAAKRVKLDGGDKKYSIGLDIGTNSVGWAVITDEYKVPSKKFKVLGNTDRHSIKKNLIGALLFDSGETAEATRLKRTARRRYTRRKNRICYLQEIFSNEMAKVDDSFFHRLEESFLVEEDKKHERHPIFGNIVDEVAYHEKYPTIYHLRKKLVDSTDKADLRLIYLALAHMIKFRGHFLIEGDLNPDNSDVDKLFIQLVQTYNQLFEENPINASGVDAKAILSARLSKSRRLENLIAQLPGEKKNGLFGNLIALSLGLTPNFKSNFDLAEDAKLQLSKDTYDDDLDNLLAQIGDQYADLFLAAKNLSDAILLSDILRVNTEITKAPLSASMIKRYDEHHQDLTLLKALVRQQLPEKYKEIFFDQSKNGYAGYIDGGASQEEFYKFIKPILEKMDGTEELLVKLNREDLLRKQRTFDNGSIPHQIHLGELHAILRRQEDFYPFLKDNREKIEKILTFRIPYYVGPLARGNSRFAWMTRKSEETITPWNFEEVVDKGASAQSFIERMTNFDKNLPNEKVLPKHSLLYEYFTVYNELTKVKYVTEGMRKPAFLSGEQKKAIVDLLFKTNRKVTVKQLKEDYFKKIECFDSVEISGVEDRFNASLGTYHDLLKIIKDKDFLDNEENEDILEDIVLTLTLFEDREMIEERLKTYAHLFDDKVMKQLKRRRYTGWGRLSRKLINGIRDKQSGKTILDFLKSDGFANRNFMQLIHDDSLTFKEDIQKAQVSGQGDSLHEHIANLAGSPAIKKGILQTVKVVDELVKVMGRHKPENIVIEMARENQTTQKGQKNSRERMKRIEEGIKELGSQILKEHPVENTQLQNEKLYLYYLQNGRDMYVDQELDINRLSDYDVDHIVPQSFLKDDSIDNKVLTRSDKARGKSDNVPSEEVVKKMKNYWRQLLNAKLITQRKFDNLTKAERGGLSELDKAGFIKRQLVETRQITKHVAQILDSRMNTKYDENDKLIREVKVITLKSKLVSDFRKDFQFYKVREINNYHHAHDAYLNAVVGTALIKKYPKLESEFVYGDYKVYDVRKMIAKSEQEIGKATAKYFFYSNIMNFFKTEITLANGEIRKRPLIETNGETGEIVWDKGRDFATVRKVLSMPQVNIVKKTEVQTGGFSKESILPKRNSDKLIARKKDWDPKKYGGFDSPTVAYSVLVVAKVEKGKSKKLKSVKELLGITIMERSSFEKNPIDFLEAKGYKEVKKDLIIKLPKYSLFELENGRKRMLASAGELQKGNELALPSKYVNFLYLASHYEKLKGSPEDNEQKQLFVEQHKHYLDEIIEQISEFSKRVILADANLDKVLSAYNKHRDKPIREQAENIIHLFTLTNLGAPAAFKYFDTTIDRKRYTSTKEVLDATLIHQSITGLYETRIDLSQLGGDGGEAAAKGGGGSSGGLGIEDEYRLHETSTEPDVSLGSTWLSDFPQAWAETGGMGLAVRQAPLIIPLKATSTPVSIQQYPMSHEARLGIKPHIQRLLDQGILVPCQSPWNTPLLPVKKPGTNDYRPVQDLREVNKRVEDIHPTVPNPYNLLSGLPPSHQWYTVLDLKDAFFCLRLHPTSQPLFAFEWRDPGMGISGQLTWTRLPQGFKNSPTLFNEALHRDLADFRIQHPDLILLQYVDDILLAATSELDCQQGTRALLQTLGDLGYRASAKKAQICQKQVKYLGYLLREGQRWLTEARKETVMGQPVPKTPRQLREFLGKAGFCRLFIPGFAEMAAPLYPLTKPGTLFSWGPDQQKAYQEIKQALLTAPALGLPDLTKPFELFVDEKQGYAKGVLTQKLGPWRRPVAYLSKKLDPVAAGWPPCLRMVAAIAVLTKDAGKLTMGQPLVILAPHAVEALVKQPPDRWLSNARMTHYQAMLLDTDRVQFGPVVALNPATLLPLPEEGAPHDCLEILAETHGTRPDLTDQPIPDADHTWYTDGSSFLQEGQRKAGAAVTTETEVIWAGALPAGTSAQRAELIALTQALKMAEGKRLNVYTDSRYAFATAHIHGEIYRRRGWLTSEGREIKNKSEILALLKALFLPKRLSIIHCLGHQKGDSAEARGNRLADQAAREAAIKTPPDTSTLLIAGKRTADGSEFEKRTADGSEFESPKKKAKVE

SEQ ID NO: 2174 - protein, 2096 aa, synthetic construct
MPAAKRVKLDGGDKKYSIGLDIGTNSVGWAVITDEYKVPSKKFKVLGNTDRHSIKKNLIGALLFDSGETAEATRLKRTARRRYTRRKNRICYLQEIFSNEMAKVDDSFFHRLEESFLVEEDKKHERHPIFGNIVDEVAYHEKYPTIYHLRKKLVDSTDKADLRLIYLALAHMIKFRGHFLIEGDLNPDNSDVDKLFIQLVQTYNQLFEENPINASGVDAKAILSARLSKSRRLENLIAQLPGEKKNGLFGNLIALSLGLTPNFKSNFDLAEDAKLQLSKDTYDDDLDNLLAQIGDQYADLFLAAKNLSDAILLSDILRVNTEITKAPLSASMIKRYDEHHQDLTLLKALVRQQLPEKYKEIFFDQSKNGYAGYIDGGASQEEFYKFIKPILEKMDGTEELLVKLNREDLLRKQRTFDNGSIPHQIHLGELHAILRRQEDFYPFLKDNREKIEKILTFRIPYYVGPLARGNSRFAWMTRKSEETITPWNFEEVVDKGASAQSFIERMTNFDKNLPNEKVLPKHSLLYEYFTVYNELTKVKYVTEGMRKPAFLSGEQKKAIVDLLFKTNRKVTVKQLKEDYFKKIECFDSVEISGVEDRFNASLGTYHDLLKIIKDKDFLDNEENEDILEDIVLTLTLFEDREMIEERLKTYAHLFDDKVMKQLKRRRYTGWGRLSRKLINGIRDKQSGKTILDFLKSDGFANRNFMQLIHDDSLTFKEDIQKAQVSGQGDSLHEHIANLAGSPAIKKGILQTVKVVDELVKVMGRHKPENIVIEMARENQTTQKGQKNSRERMKRIEEGIKELGSQILKEHPVENTQLQNEKLYLYYLQNGRDMYVDQELDINRLSDYDVDHIVPQSFLKDDSIDNKVLTRSDKARGKSDNVPSEEVVKKMKNYWRQLLNAKLITQRKFDNLTKAERGGLSELDKAGFIKRQLVETRQITKHVAQILDSRMNTKYDENDKLIREVKVITLKSKLVSDFRKDFQFYKVREINNYHHAHDAYLNAVVGTALIKKYPKLESEFVYGDYKVYDVRKMIAKSEQEIGKATAKYFFYSNIMNFFKTEITLANGEIRKRPLIETNGETGEIVWDKGRDFATVRKVLSMPQVNIVKKTEVQTGGFSKESILPKRNSDKLIARKKDWDPKKYGGFDSPTVAYSVLVVAKVEKGKSKKLKSVKELLGITIMERSSFEKNPIDFLEAKGYKEVKKDLIIKLPKYSLFELENGRKRMLASAGELQKGNELALPSKYVNFLYLASHYEKLKGSPEDNEQKQLFVEQHKHYLDEIIEQISEFSKRVILADANLDKVLSAYNKHRDKPIREQAENIIHLFTLTNLGAPAAFKYFDTTIDRKRYTSTKEVLDATLIHQSITGLYETRIDLSQLGGDGGGGGEAAAKGSSGGLGIEDEYRLHETSTEPDVSLGSTWLSDFPQAWAETGGMGLAVRQAPLIIPLKATSTPVSIQQYPMSHEARLGIKPHIQRLLDQGILVPCQSPWNTPLLPVKKPGTNDYRPVQDLREVNKRVEDIHPTVPNPYNLLSGLPPSHQWYTVLDLKDAFFCLRLHPTSQPLFAFEWRDPGMGISGQLTWTRLPQGFKNSPTLFNEALHRDLADFRIQHPDLILLQYVDDILLAATSELDCQQGTRALLQTLGDLGYRASAKKAQICQKQVKYLGYLLREGQRWLTEARKETVMGQPVPKTPRQLREFLGKAGFCRLFIPGFAEMAAPLYPLTKPGTLFSWGPDQQKAYQEIKQALLTAPALGLPDLTKPFELFVDEKQGYAKGVLTQKLGPWRRPVAYLSKKLDPVAAGWPPCLRMVAAIAVLTKDAGKLTMGQPLVILAPHAVEALVKQPPDRWLSNARMTHYQAMLLDTDRVQFGPVVALNPATLLPLPEEGAPHDCLEILAETHGTRPDLTDQPIPDADHTWYTDGSSFLQEGQRKAGAAVTTETEVIWAGALPAGTSAQRAELIALTQALKMAEGKRLNVYTDSRYAFATAHIHGEIYRRRGWLTSEGREIKNKSEILALLKALFLPKRLSIIHCLGHQKGDSAEARGNRLADQAAREAAIKTPPDTSTLLIAGKRTADGSEFEKRTADGSEFESPKKKAKVE

SEQ ID NO: 2175 - protein, 2096 aa, synthetic construct
MPAAKRVKLDGGDKKYSIGLDIGTNSVGWAVITDEYKVPSKKFKVLGNTDRHSIKKNLIGALLFDSGETAEATRLKRTARRRYTRRKNRICYLQEIFSNEMAKVDDSFFHRLEESFLVEEDKKHERHPIFGNIVDEVAYHEKYPTIYHLRKKLVDSTDKADLRLIYLALAHMIKFRGHFLIEGDLNPDNSDVDKLFIQLVQTYNQLFEENPINASGVDAKAILSARLSKSRRLENLIAQLPGEKKNGLFGNLIALSLGLTPNFKSNFDLAEDAKLQLSKDTYDDDLDNLLAQIGDQYADLFLAAKNLSDAILLSDILRVNTEITKAPLSASMIKRYDEHHQDLTLLKALVRQQLPEKYKEIFFDQSKNGYAGYIDGGASQEEFYKFIKPILEKMDGTEELLVKLNREDLLRKQRTFDNGSIPHQIHLGELHAILRRQEDFYPFLKDNREKIEKILTFRIPYYVGPLARGNSRFAWMTRKSEETITPWNFEEVVDKGASAQSFIERMTNFDKNLPNEKVLPKHSLLYEYFTVYNELTKVKYVTEGMRKPAFLSGEQKKAIVDLLFKTNRKVTVKQLKEDYFKKIECFDSVEISGVEDRFNASLGTYHDLLKIIKDKDFLDNEENEDILEDIVLTLTLFEDREMIEERLKTYAHLFDDKVMKQLKRRRYTGWGRLSRKLINGIRDKQSGKTILDFLKSDGFANRNFMQLIHDDSLTFKEDIQKAQVSGQGDSLHEHIANLAGSPAIKKGILQTVKVVDELVKVMGRHKPENIVIEMARENQTTQKGQKNSRERMKRIEEGIKELGSQILKEHPVENTQLQNEKLYLYYLQNGRDMYVDQELDINRLSDYDVDHIVPQSFLKDDSIDNKVLTRSDKARGKSDNVPSEEVVKKMKNYWRQLLNAKLITQRKFDNLTKAERGGLSELDKAGFIKRQLVETRQITKHVAQILDSRMNTKYDENDKLIREVKVITLKSKLVSDFRKDFQFYKVREINNYHHAHDAYLNAVVGTALIKKYPKLESEFVYGDYKVYDVRKMIAKSEQEIGKATAKYFFYSNIMNFFKTEITLANGEIRKRPLIETNGETGEIVWDKGRDFATVRKVLSMPQVNIVKKTEVQTGGFSKESILPKRNSDKLIARKKDWDPKKYGGFDSPTVAYSVLVVAKVEKGKSKKLKSVKELLGITIMERSSFEKNPIDFLEAKGYKEVKKDLIIKLPKYSLFELENGRKRMLASAGELQKGNELALPSKYVNFLYLASHYEKLKGSPEDNEQKQLFVEQHKHYLDEIIEQISEFSKRVILADANLDKVLSAYNKHRDKPIREQAENIIHLFTLTNLGAPAAFKYFDTTIDRKRYTSTKEVLDATLIHQSITGLYETRIDLSQLGGDGGGGSGGGEAAAKGGLGIEDEYRLHETSTEPDVSLGSTWLSDFPQAWAETGGMGLAVRQAPLIIPLKATSTPVSIQQYPMSHEARLGIKPHIQRLLDQGILVPCQSPWNTPLLPVKKPGTNDYRPVQDLREVNKRVEDIHPTVPNPYNLLSGLPPSHQWYTVLDLKDAFFCLRLHPTSQPLFAFEWRDPGMGISGQLTWTRLPQGFKNSPTLFNEALHRDLADFRIQHPDLILLQYVDDILLAATSELDCQQGTRALLQTLGDLGYRASAKKAQICQKQVKYLGYLLREGQRWLTEARKETVMGQPVPKTPRQLREFLGKAGFCRLFIPGFAEMAAPLYPLTKPGTLFSWGPDQQKAYQEIKQALLTAPALGLPDLTKPFELFVDEKQGYAKGVLTQKLGPWRRPVAYLSKKLDPVAAGWPPCLRMVAAIAVLTKDAGKLTMGQPLVILAPHAVEALVKQPPDRWLSNARMTHYQAMLLDTDRVQFGPVVALNPATLLPLPEEGAPHDCLEILAETHGTRPDLTDQPIPDADHTWYTDGSSFLQEGQRKAGAAVTTETEVIWAGALPAGTSAQRAELIALTQALKMAEGKRLNVYTDSRYAFATAHIHGEIYRRRGWLTSEGREIKNKSEILALLKALFLPKRLSIIHCLGHQKGDSAEARGNRLADQAAREAAIKTPPDTSTLLIAGKRTADGSEFEKRTADGSEFESPKKKAKVE

SEQ ID NO: 2176 - protein, 2091 aa, synthetic construct
MPAAKRVKLDGGDKKYSIGLDIGTNSVGWAVITDEYKVPSKKFKVLGNTDRHSIKKNLIGALLFDSGETAEATRLKRTARRRYTRRKNRICYLQEIFSNEMAKVDDSFFHRLEESFLVEEDKKHERHPIFGNIVDEVAYHEKYPTIYHLRKKLVDSTDKADLRLIYLALAHMIKFRGHFLIEGDLNPDNSDVDKLFIQLVQTYNQLFEENPINASGVDAKAILSARLSKSRRLENLIAQLPGEKKNGLFGNLIALSLGLTPNFKSNFDLAEDAKLQLSKDTYDDDLDNLLAQIGDQYADLFLAAKNLSDAILLSDILRVNTEITKAPLSASMIKRYDEHHQDLTLLKALVRQQLPEKYKEIFFDQSKNGYAGYIDGGASQEEFYKFIKPILEKMDGTEELLVKLNREDLLRKQRTFDNGSIPHQIHLGELHAILRRQEDFYPFLKDNREKIEKILTFRIPYYVGPLARGNSRFAWMTRKSEETITPWNFEEVVDKGASAQSFIERMTNFDKNLPNEKVLPKHSLLYEYFTVYNELTKVKYVTEGMRKPAFLSGEQKKAIVDLLFKTNRKVTVKQLKEDYFKKIECFDSVEISGVEDRFNASLGTYHDLLKIIKDKDFLDNEENEDILEDIVLTLTLFEDREMIEERLKTYAHLFDDKVMKQLKRRRYTGWGRLSRKLINGIRDKQSGKTILDFLKSDGFANRNFMQLIHDDSLTFKEDIQKAQVSGQGDSLHEHIANLAGSPAIKKGILQTVKVVDELVKVMGRHKPENIVIEMARENQTTQKGQKNSRERMKRIEEGIKELGSQILKEHPVENTQLQNEKLYLYYLQNGRDMYVDQELDINRLSDYDVDHIVPQSFLKDDSIDNKVLTRSDKARGKSDNVPSEEVVKKMKNYWRQLLNAKLITQRKFDNLTKAERGGLSELDKAGFIKRQLVETRQITKHVAQILDSRMNTKYDENDKLIREVKVITLKSKLVSDFRKDFQFYKVREINNYHHAHDAYLNAVVGTALIKKYPKLESEFVYGDYKVYDVRKMIAKSEQEIGKATAKYFFYSNIMNFFKTEITLANGEIRKRPLIETNGETGEIVWDKGRDFATVRKVLSMPQVNIVKKTEVQTGGFSKESILPKRNSDKLIARKKDWDPKKYGGFDSPTVAYSVLVVAKVEKGKSKKLKSVKELLGITIMERSSFEKNPIDFLEAKGYKEVKKDLIIKLPKYSLFELENGRKRMLASAGELQKGNELALPSKYVNFLYLASHYEKLKGSPEDNEQKQLFVEQHKHYLDEIIEQISEFSKRVILADANLDKVLSAYNKHRDKPIREQAENIIHLFTLTNLGAPAAFKYFDTTIDRKRYTSTKEVLDATLIHQSITGLYETRIDLSQLGGDGGGSSGSSGGLGIEDEYRLHETSTEPDVSLGSTWLSDFPQAWAETGGMGLAVRQAPLIIPLKATSTPVSIQQYPMSHEARLGIKPHIQRLLDQGILVPCQSPWNTPLLPVKKPGTNDYRPVQDLREVNKRVEDIHPTVPNPYNLLSGLPPSHQWYTVLDLKDAFFCLRLHPTSQPLFAFEWRDPGMGISGQLTWTRLPQGFKNSPTLFNEALHRDLADFRIQHPDLILLQYVDDILLAATSELDCQQGTRALLQTLGDLGYRASAKKAQICQKQVKYLGYLLREGQRWLTEARKETVMGQPVPKTPRQLREFLGKAGFCRLFIPGFAEMAAPLYPLTKPGTLFSWGPDQQKAYQEIKQALLTAPALGLPDLTKPFELFVDEKQGYAKGVLTQKLGPWRRPVAYLSKKLDPVAAGWPPCLRMVAAIAVLTKDAGKLTMGQPLVILAPHAVEALVKQPPDRWLSNARMTHYQAMLLDTDRVQFGPVVALNPATLLPLPEEGAPHDCLEILAETHGTRPDLTDQPIPDADHTWYTDGSSFLQEGQRKAGAAVTTETEVIWAGALPAGTSAQRAELIALTQALKMAEGKRLNVYTDSRYAFATAHIHGEIYRRRGWLTSEGREIKNKSEILALLKALFLPKRLSIIHCLGHQKGDSAEARGNRLADQAAREAAIKTPPDTSTLLIAGKRTADGSEFEKRTADGSEFESPKKKAKVE

SEQ ID NO: 2177 - protein, 2096 aa, synthetic construct
MPAAKRVKLDGGDKKYSIGLDIGTNSVGWAVITDEYKVPSKKFKVLGNTDRHSIKKNLIGALLFDSGETAEATRLKRTARRRYTRRKNRICYLQEIFSNEMAKVDDSFFHRLEESFLVEEDKKHERHPIFGNIVDEVAYHEKYPTIYHLRKKLVDSTDKADLRLIYLALAHMIKFRGHFLIEGDLNPDNSDVDKLFIQLVQTYNQLFEENPINASGVDAKAILSARLSKSRRLENLIAQLPGEKKNGLFGNLIALSLGLTPNFKSNFDLAEDAKLQLSKDTYDDDLDNLLAQIGDQYADLFLAAKNLSDAILLSDILRVNTEITKAPLSASMIKRYDEHHQDLTLLKALVRQQLPEKYKEIFFDQSKNGYAGYIDGGASQEEFYKFIKPILEKMDGTEELLVKLNREDLLRKQRTFDNGSIPHQIHLGELHAILRRQEDFYPFLKDNREKIEKILTFRIPYYVGPLARGNSRFAWMTRKSEETITPWNFEEVVDKGASAQSFIERMTNFDKNLPNEKVLPKHSLLYEYFTVYNELTKVKYVTEGMRKPAFLSGEQKKAIVDLLFKTNRKVTVKQLKEDYFKKIECFDSVEISGVEDRFNASLGTYHDLLKIIKDKDFLDNEENEDILEDIVLTLTLFEDREMIEERLKTYAHLFDDKVMKQLKRRRYTGWGRLSRKLINGIRDKQSGKTILDFLKSDGFANRNFMQLIHDDSLTFKEDIQKAQVSGQGDSLHEHIANLAGSPAIKKGILQTVKVVDELVKVMGRHKPENIVIEMARENQTTQKGQKNSRERMKRIEEGIKELGSQILKEHPVENTQLQNEKLYLYYLQNGRDMYVDQELDINRLSDYDVDHIVPQSFLKDDSIDNKVLTRSDKARGKSDNVPSEEVVKKMKNYWRQLLNAKLITQRKFDNLTKAERGGLSELDKAGFIKRQLVETRQITKHVAQILDSRMNTKYDENDKLIREVKVITLKSKLVSDFRKDFQFYKVREINNYHHAHDAYLNAVVGTALIKKYPKLESEFVYGDYKVYDVRKMIAKSEQEIGKATAKYFFYSNIMNFFKTEITLANGEIRKRPLIETNGETGEIVWDKGRDFATVRKVLSMPQVNIVKKTEVQTGGFSKESILPKRNSDKLIARKKDWDPKKYGGFDSPTVAYSVLVVAKVEKGKSKKLKSVKELLGITIMERSSFEKNPIDFLEAKGYKEVKKDLIIKLPKYSLFELENGRKRMLASAGELQKGNELALPSKYVNFLYLASHYEKLKGSPEDNEQKQLFVEQHKHYLDEIIEQISEFSKRVILADANLDKVLSAYNKHRDKPIREQAENIIHLFTLTNLGAPAAFKYFDTTIDRKRYTSTKEVLDATLIHQSITGLYETRIDLSQLGGDGGGSSEAAAKGGSGGLGIEDEYRLHETSTEPDVSLGSTWLSDFPQAWAETGGMGLAVRQAPLIIPLKATSTPVSIQQYPMSHEARLGIKPHIQRLLDQGILVPCQSPWNTPLLPVKKPGTNDYRPVQDLREVNKRVEDIHPTVPNPYNLLSGLPPSHQWYTVLDLKDAFFCLRLHPTSQPLFAFEWRDPGMGISGQLTWTRLPQGFKNSPTLFNEALHRDLADFRIQHPDLILLQYVDDILLAATSELDCQQGTRALLQTLGDLGYRASAKKAQICQKQVKYLGYLLREGQRWLTEARKETVMGQPVPKTPRQLREFLGKAGFCRLFIPGFAEMAAPLYPLTKPGTLFSWGPDQQKAYQEIKQALLTAPALGLPDLTKPFELFVDEKQGYAKGVLTQKLGPWRRPVAYLSKKLDPVAAGWPPCLRMVAAIAVLTKDAGKLTMGQPLVILAPHAVEALVKQPPDRWLSNARMTHYQAMLLDTDRVQFGPVVALNPATLLPLPEEGAPHDCLEILAETHGTRPDLTDQPIPDADHTWYTDGSSFLQEGQRKAGAAVTTETEVIWAGALPAGTSAQRAELIALTQALKMAEGKRLNVYTDSRYAFATAHIHGEIYRRRGWLTSEGREIKNKSEILALLKALFLPKRLSIIHCLGHQKGDSAEARGNRLADQAAREAAIKTPPDTSTLLIAGKRTADGSEFEKRTADGSEFESPKKKAKVE

SEQ ID NO: 2178 - protein, 2096 aa, synthetic construct
MPAAKRVKLDGGDKKYSIGLDIGTNSVGWAVITDEYKVPSKKFKVLGNTDRHSIKKNLIGALLFDSGETAEATRLKRTARRRYTRRKNRICYLQEIFSNEMAKVDDSFFHRLEESFLVEEDKKHERHPIFGNIVDEVAYHEKYPTIYHLRKKLVDSTDKADLRLIYLALAHMIKFRGHFLIEGDLNPDNSDVDKLFIQLVQTYNQLFEENPINASGVDAKAILSARLSKSRRLENLIAQLPGEKKNGLFGNLIALSLGLTPNFKSNFDLAEDAKLQLSKDTYDDDLDNLLAQIGDQYADLFLAAKNLSDAILLSDILRVNTEITKAPLSASMIKRYDEHHQDLTLLKALVRQQLPEKYKEIFFDQSKNGYAGYIDGGASQEEFYKFIKPILEKMDGTEELLVKLNREDLLRKQRTFDNGSIPHQIHLGELHAILRRQEDFYPFLKDNREKIEKILTFRIPYYVGPLARGNSRFAWMTRKSEETITPWNFEEVVDKGASAQSFIERMTNFDKNLPNEKVLPKHSLLYEYFTVYNELTKVKYVTEGMRKPAFLSGEQKKAIVDLLFKTNRKVTVKQLKEDYFKKIECFDSVEISGVEDRFNASLGTYHDLLKIIKDKDFLDNEENEDILEDIVLTLTLFEDREMIEERLKTYAHLFDDKVMKQLKRRRYTGWGRLSRKLINGIRDKQSGKTILDFLKSDGFANRNFMQLIHDDSLTFKEDIQKAQVSGQGDSLHEHIANLAGSPAIKKGILQTVKVVDELVKVMGRHKPENIVIEMARENQTTQKGQKNSRERMKRIEEGIKELGSQILKEHPVENTQLQNEKLYLYYLQNGRDMYVDQELDINRLSDYDVDHIVPQSFLKDDSIDNKVLTRSDKARGKSDNVPSEEVVKKMKNYWRQLLNAKLITQRKFDNLTKAERGGLSELDKAGFIKRQLVETRQITKHVAQILDSRMNTKYDENDKLIREVKVITLKSKLVSDFRKDFQFYKVREINNYHHAHDAYLNAVVGTALIKKYPKLESEFVYGDYKVYDVRKMIAKSEQEIGKATAKYFFYSNIMNFFKTEITLANGEIRKRPLIETNGETGEIVWDKGRDFATVRKVLSMPQVNIVKKTEVQTGGFSKESILPKRNSDKLIARKKDWDPKKYGGFDSPTVAYSVLVVAKVEKGKSKKLKSVKELLGITIMERSSFEKNPIDFLEAKGYKEVKKDLIIKLPKYSLFELENGRKRMLASAGELQKGNELALPSKYVNFLYLASHYEKLKGSPEDNEQKQLFVEQHKHYLDEIIEQISEFSKRVILADANLDKVLSAYNKHRDKPIREQAENIIHLFTLTNLGAPAAFKYFDTTIDRKRYTSTKEVLDATLIHQSITGLYETRIDLSQLGGDGGPAPGGGEAAAKGGLGIEDEYRLHETSTEPDVSLGSTWLSDFPQAWAETGGMGLAVRQAPLIIPLKATSTPVSIQQYPMSHEARLGIKPHIQRLLDQGILVPCQSPWNTPLLPVKKPGTNDYRPVQDLREVNKRVEDIHPTVPNPYNLLSGLPPSHQWYTVLDLKDAFFCLRLHPTSQPLFAFEWRDPGMGISGQLTWTRLPQGFKNSPTLFNEALHRDLADFRIQHPDLILLQYVDDILLAATSELDCQQGTRALLQTLGDLGYRASAKKAQICQKQVKYLGYLLREGQRWLTEARKETVMGQPVPKTPRQLREFLGKAGFCRLFIPGFAEMAAPLYPLTKPGTLFSWGPDQQKAYQEIKQALLTAPALGLPDLTKPFELFVDEKQGYAKGVLTQKLGPWRRPVAYLSKKLDPVAAGWPPCLRMVAAIAVLTKDAGKLTMGQPLVILAPHAVEALVKQPPDRWLSNARMTHYQAMLLDTDRVQFGPVVALNPATLLPLPEEGAPHDCLEILAETHGTRPDLTDQPIPDADHTWYTDGSSFLQEGQRKAGAAVTTETEVIWAGALPAGTSAQRAELIALTQALKMAEGKRLNVYTDSRYAFATAHIHGEIYRRRGWLTSEGREIKNKSEILALLKALFLPKRLSIIHCLGHQKGDSAEARGNRLADQAAREAAIKTPPDTSTLLIAGKRTADGSEFEKRTADGSEFESPKKKAKVE

SEQ ID NO: 2179 - protein, 2091 aa, synthetic construct
MPAAKRVKLDGGDKKYSIGLDIGTNSVGWAVITDEYKVPSKKFKVLGNTDRHSIKKNLIGALLFDSGETAEATRLKRTARRRYTRRKNRICYLQEIFSNEMAKVDDSFFHRLEESFLVEEDKKHERHPIFGNIVDEVAYHEKYPTIYHLRKKLVDSTDKADLRLIYLALAHMIKFRGHFLIEGDLNPDNSDVDKLFIQLVQTYNQLFEENPINASGVDAKAILSARLSKSRRLENLIAQLPGEKKNGLFGNLIALSLGLTPNFKSNFDLAEDAKLQLSKDTYDDDLDNLLAQIGDQYADLFLAAKNLSDAILLSDILRVNTEITKAPLSASMIKRYDEHHQDLTLLKALVRQQLPEKYKEIFFDQSKNGYAGYIDGGASQEEFYKFIKPILEKMDGTEELLVKLNREDLLRKQRTFDNGSIPHQIHLGELHAILRRQEDFYPFLKDNREKIEKILTFRIPYYVGPLARGNSRFAWMTRKSEETITPWNFEEVVDKGASAQSFIERMTNFDKNLPNEKVLPKHSLLYEYFTVYNELTKVKYVTEGMRKPAFLSGEQKKAIVDLLFKTNRKVTVKQLKEDYFKKIECFDSVEISGVEDRFNASLGTYHDLLKIIKDKDFLDNEENEDILEDIVLTLTLFEDREMIEERLKTYAHLFDDKVMKQLKRRRYTGWGRLSRKLINGIRDKQSGKTILDFLKSDGFANRNFMQLIHDDSLTFKEDIQKAQVSGQGDSLHEHIANLAGSPAIKKGILQTVKVVDELVKVMGRHKPENIVIEMARENQTTQKGQKNSRERMKRIEEGIKELGSQILKEHPVENTQLQNEKLYLYYLQNGRDMYVDQELDINRLSDYDVDHIVPQSFLKDDSIDNKVLTRSDKARGKSDNVPSEEVVKKMKNYWRQLLNAKLITQRKFDNLTKAERGGLSELDKAGFIKRQLVETRQITKHVAQILDSRMNTKYDENDKLIREVKVITLKSKLVSDFRKDFQFYKVREINNYHHAHDAYLNAVVGTALIKKYPKLESEFVYGDYKVYDVRKMIAKSEQEIGKATAKYFFYSNIMNFFKTEITLANGEIRKRPLIETNGETGEIVWDKGRDFATVRKVLSMPQVNIVKKTEVQTGGFSKESILPKRNSDKLIARKKDWDPKKYGGFDSPTVAYSVLVVAKVEKGKSKKLKSVKELLGITIMERSSFEKNPIDFLEAKGYKEVKKDLIIKLPKYSLFELENGRKRMLASAGELQKGNELALPSKYVNFLYLASHYEKLKGSPEDNEQKQLFVEQHKHYLDEIIEQISEFSKRVILADANLDKVLSAYNKHRDKPIREQAENIIHLFTLTNLGAPAAFKYFDTTIDRKRYTSTKEVLDATLIHQSITGLYETRIDLSQLGGDGGGGGGSSGGLGIEDEYRLHETSTEPDVSLGSTWLSDFPQAWAETGGMGLAVRQAPLIIPLKATSTPVSIQQYPMSHEARLGIKPHIQRLLDQGILVPCQSPWNTPLLPVKKPGTNDYRPVQDLREVNKRVEDIHPTVPNPYNLLSGLPPSHQWYTVLDLKDAFFCLRLHPTSQPLFAFEWRDPGMGISGQLTWTRLPQGFKNSPTLFNEALHRDLADFRIQHPDLILLQYVDDILLAATSELDCQQGTRALLQTLGDLGYRASAKKAQICQKQVKYLGYLLREGQRWLTEARKETVMGQPVPKTPRQLREFLGKAGFCRLFIPGFAEMAAPLYPLTKPGTLFSWGPDQQKAYQEIKQALLTAPALGLPDLTKPFELFVDEKQGYAKGVLTQKLGPWRRPVAYLSKKLDPVAAGWPPCLRMVAAIAVLTKDAGKLTMGQPLVILAPHAVEALVKQPPDRWLSNARMTHYQAMLLDTDRVQFGPVVALNPATLLPLPEEGAPHDCLEILAETHGTRPDLTDQPIPDADHTWYTDGSSFLQEGQRKAGAAVTTETEVIWAGALPAGTSAQRAELIALTQALKMAEGKRLNVYTDSRYAFATAHIHGEIYRRRGWLTSEGREIKNKSEILALLKALFLPKRLSIIHCLGHQKGDSAEARGNRLADQAAREAAIKTPPDTSTLLIAGKRTADGSEFEKRTADGSEFESPKKKAKVE

SEQ ID NO: 2180 - protein, 2094 aa, synthetic construct
MPAAKRVKLDGGDKKYSIGLDIGTNSVGWAVITDEYKVPSKKFKVLGNTDRHSIKKNLIGALLFDSGETAEATRLKRTARRRYTRRKNRICYLQEIFSNEMAKVDDSFFHRLEESFLVEEDKKHERHPIFGNIVDEVAYHEKYPTIYHLRKKLVDSTDKADLRLIYLALAHMIKFRGHFLIEGDLNPDNSDVDKLFIQLVQTYNQLFEENPINASGVDAKAILSARLSKSRRLENLIAQLPGEKKNGLFGNLIALSLGLTPNFKSNFDLAEDAKLQLSKDTYDDDLDNLLAQIGDQYADLFLAAKNLSDAILLSDILRVNTEITKAPLSASMIKRYDEHHQDLTLLKALVRQQLPEKYKEIFFDQSKNGYAGYIDGGASQEEFYKFIKPILEKMDGTEELLVKLNREDLLRKQRTFDNGSIPHQIHLGELHAILRRQEDFYPFLKDNREKIEKILTFRIPYYVGPLARGNSRFAWMTRKSEETITPWNFEEVVDKGASAQSFIERMTNFDKNLPNEKVLPKHSLLYEYFTVYNELTKVKYVTEGMRKPAFLSGEQKKAIVDLLFKTNRKVTVKQLKEDYFKKIECFDSVEISGVEDRFNASLGTYHDLLKIIKDKDFLDNEENEDILEDIVLTLTLFEDREMIEERLKTYAHLFDDKVMKQLKRRRYTGWGRLSRKLINGIRDKQSGKTILDFLKSDGFANRNFMQLIHDDSLTFKEDIQKAQVSGQGDSLHEHIANLAGSPAIKKGILQTVKVVDELVKVMGRHKPENIVIEMARENQTTQKGQKNSRERMKRIEEGIKELGSQILKEHPVENTQLQNEKLYLYYLQNGRDMYVDQELDINRLSDYDVDHIVPQSFLKDDSIDNKVLTRSDKARGKSDNVPSEEVVKKMKNYWRQLLNAKLITQRKFDNLTKAERGGLSELDKAGFIKRQLVETRQITKHVAQILDSRMNTKYDENDKLIREVKVITLKSKLVSDFRKDFQFYKVREINNYHHAHDAYLNAVVGTALIKKYPKLESEFVYGDYKVYDVRKMIAKSEQEIGKATAKYFFYSNIMNFFKTEITLANGEIRKRPLIETNGETGEIVWDKGRDFATVRKVLSMPQVNIVKKTEVQTGGFSKESILPKRNSDKLIARKKDWDPKKYGGFDSPTVAYSVLVVAKVEKGKSKKLKSVKELLGITIMERSSFEKNPIDFLEAKGYKEVKKDLIIKLPKYSLFELENGRKRMLASAGELQKGNELALPSKYVNFLYLASHYEKLKGSPEDNEQKQLFVEQHKHYLDEIIEQISEFSKRVILADANLDKVLSAYNKHRDKPIREQAENIIHLFTLTNLGAPAAFKYFDTTIDRKRYTSTKEVLDATLIHQSITGLYETRIDLSQLGGDGGGGGPAPGSSGGLGIEDEYRLHETSTEPDVSLGSTWLSDFPQAWAETGGMGLAVRQAPLIIPLKATSTPVSIQQYPMSHEARLGIKPHIQRLLDQGILVPCQSPWNTPLLPVKKPGTNDYRPVQDLREVNKRVEDIHPTVPNPYNLLSGLPPSHQWYTVLDLKDAFFCLRLHPTSQPLFAFEWRDPGMGISGQLTWTRLPQGFKNSPTLFNEALHRDLADFRIQHPDLILLQYVDDILLAATSELDCQQGTRALLQTLGDLGYRASAKKAQICQKQVKYLGYLLREGQRWLTEARKETVMGQPVPKTPRQLREFLGKAGFCRLFIPGFAEMAAPLYPLTKPGTLFSWGPDQQKAYQEIKQALLTAPALGLPDLTKPFELFVDEKQGYAKGVLTQKLGPWRRPVAYLSKKLDPVAAGWPPCLRMVAAIAVLTKDAGKLTMGQPLVILAPHAVEALVKQPPDRWLSNARMTHYQAMLLDTDRVQFGPVVALNPATLLPLPEEGAPHDCLEILAETHGTRPDLTDQPIPDADHTWYTDGSSFLQEGQRKAGAAVTTETEVIWAGALPAGTSAQRAELIALTQALKMAEGKRLNVYTDSRYAFATAHIHGEIYRRRGWLTSEGREIKNKSEILALLKALFLPKRLSIIHCLGHQKGDSAEARGNRLADQAAREAAIKTPPDTSTLLIAGKRTADGSEFEKRTADGSEFESPKKKAKVE

SEQ ID NO: 2181 - protein, 2118 aa, synthetic construct
MPAAKRVKLDGGDKKYSIGLDIGTNSVGWAVITDEYKVPSKKFKVLGNTDRHSIKKNLIGALLFDSGETAEATRLKRTARRRYTRRKNRICYLQEIFSNEMAKVDDSFFHRLEESFLVEEDKKHERHPIFGNIVDEVAYHEKYPTIYHLRKKLVDSTDKADLRLIYLALAHMIKFRGHFLIEGDLNPDNSDVDKLFIQLVQTYNQLFEENPINASGVDAKAILSARLSKSRRLENLIAQLPGEKKNGLFGNLIALSLGLTPNFKSNFDLAEDAKLQLSKDTYDDDLDNLLAQIGDQYADLFLAAKNLSDAILLSDILRVNTEITKAPLSASMIKRYDEHHQDLTLLKALVRQQLPEKYKEIFFDQSKNGYAGYIDGGASQEEFYKFIKPILEKMDGTEELLVKLNREDLLRKQRTFDNGSIPHQIHLGELHAILRRQEDFYPFLKDNREKIEKILTFRIPYYVGPLARGNSRFAWMTRKSEETITPWNFEEVVDKGASAQSFIERMTNFDKNLPNEKVLPKHSLLYEYFTVYNELTKVKYVTEGMRKPAFLSGEQKKAIVDLLFKTNRKVTVKQLKEDYFKKIECFDSVEISGVEDRFNASLGTYHDLLKIIKDKDFLDNEENEDILEDIVLTLTLFEDREMIEERLKTYAHLFDDKVMKQLKRRRYTGWGRLSRKLINGIRDKQSGKTILDFLKSDGFANRNFMQLIHDDSLTFKEDIQKAQVSGQGDSLHEHIANLAGSPAIKKGILQTVKVVDELVKVMGRHKPENIVIEMARENQTTQKGQKNSRERMKRIEEGIKELGSQILKEHPVENTQLQNEKLYLYYLQNGRDMYVDQELDINRLSDYDVDHIVPQSFLKDDSIDNKVLTRSDKARGKSDNVPSEEVVKKMKNYWRQLLNAKLITQRKFDNLTKAERGGLSELDKAGFIKRQLVETRQITKHVAQILDSRMNTKYDENDKLIREVKVITLKSKLVSDFRKDFQFYKVREINNYHHAHDAYLNAVVGTALIKKYPKLESEFVYGDYKVYDVRKMIAKSEQEIGKATAKYFFYSNIMNFFKTEITLANGEIRKRPLIETNGETGEIVWDKGRDFATVRKVLSMPQVNIVKKTEVQTGGFSKESILPKRNSDKLIARKKDWDPKKYGGFDSPTVAYSVLVVAKVEKGKSKKLKSVKELLGITIMERSSFEKNPIDFLEAKGYKEVKKDLIIKLPKYSLFELENGRKRMLASAGELQKGNELALPSKYVNFLYLASHYEKLKGSPEDNEQKQLFVEQHKHYLDEIIEQISEFSKRVILADANLDKVLSAYNKHRDKPIREQAENIIHLFTLTNLGAPAAFKYFDTTIDRKRYTSTKEVLDATLIHQSITGLYETRIDLSQLGGDGGSGGSSGGSSGSETPGTSESATPESSGGSSGGSSGGLGIEDEYRLHETSTEPDVSLGSTWLSDFPQAWAETGGMGLAVRQAPLIIPLKATSTPVSIQQYPMSHEARLGIKPHIQRLLDQGILVPCQSPWNTPLLPVKKPGTNDYRPVQDLREVNKRVEDIHPTVPNPYNLLSGLPPSHQWYTVLDLKDAFFCLRLHPTSQPLFAFEWRDPGMGISGQLTWTRLPQGFKNSPTLFNEALHRDLADFRIQHPDLILLQYVDDILLAATSELDCQQGTRALLQTLGDLGYRASAKKAQICQKQVKYLGYLLREGQRWLTEARKETVMGQPVPKTPRQLREFLGKAGFCRLFIPGFAEMAAPLYPLTKPGTLFSWGPDQQKAYQEIKQALLTAPALGLPDLTKPFELFVDEKQGYAKGVLTQKLGPWRRPVAYLSKKLDPVAAGWPPCLRMVAAIAVLTKDAGKLTMGQPLVILAPHAVEALVKQPPDRWLSNARMTHYQAMLLDTDRVQFGPVVALNPATLLPLPEEGAPHDCLEILAETHGTRPDLTDQPIPDADHTWYTDGSSFLQEGQRKAGAAVTTETEVIWAGALPAGTSAQRAELIALTQALKMAEGKRLNVYTDSRYAFATAHIHGEIYRRRGWLTSEGREIKNKSEILALLKALFLPKRLSIIHCLGHQKGDSAEARGNRLADQAAREAAIKTPPDTSTLLIAGKRTADGSEFEKRTADGSEFESPKKKAKVE

SEQ ID NO: 2182 - protein, 2096 aa, synthetic construct
MPAAKRVKLDGGDKKYSIGLDIGTNSVGWAVITDEYKVPSKKFKVLGNTDRHSIKKNLIGALLFDSGETAEATRLKRTARRRYTRRKNRICYLQEIFSNEMAKVDDSFFHRLEESFLVEEDKKHERHPIFGNIVDEVAYHEKYPTIYHLRKKLVDSTDKADLRLIYLALAHMIKFRGHFLIEGDLNPDNSDVDKLFIQLVQTYNQLFEENPINASGVDAKAILSARLSKSRRLENLIAQLPGEKKNGLFGNLIALSLGLTPNFKSNFDLAEDAKLQLSKDTYDDDLDNLLAQIGDQYADLFLAAKNLSDAILLSDILRVNTEITKAPLSASMIKRYDEHHQDLTLLKALVRQQLPEKYKEIFFDQSKNGYAGYIDGGASQEEFYKFIKPILEKMDGTEELLVKLNREDLLRKQRTFDNGSIPHQIHLGELHAILRRQEDFYPFLKDNREKIEKILTFRIPYYVGPLARGNSRFAWMTRKSEETITPWNFEEVVDKGASAQSFIERMTNFDKNLPNEKVLPKHSLLYEYFTVYNELTKVKYVTEGMRKPAFLSGEQKKAIVDLLFKTNRKVTVKQLKEDYFKKIECFDSVEISGVEDRFNASLGTYHDLLKIIKDKDFLDNEENEDILEDIVLTLTLFEDREMIEERLKTYAHLFDDKVMKQLKRRRYTGWGRLSRKLINGIRDKQSGKTILDFLKSDGFANRNFMQLIHDDSLTFKEDIQKAQVSGQGDSLHEHIANLAGSPAIKKGILQTVKVVDELVKVMGRHKPENIVIEMARENQTTQKGQKNSRERMKRIEEGIKELGSQILKEHPVENTQLQNEKLYLYYLQNGRDMYVDQELDINRLSDYDVDHIVPQSFLKDDSIDNKVLTRSDKARGKSDNVPSEEVVKKMKNYWRQLLNAKLITQRKFDNLTKAERGGLSELDKAGFIKRQLVETRQITKHVAQILDSRMNTKYDENDKLIREVKVITLKSKLVSDFRKDFQFYKVREINNYHHAHDAYLNAVVGTALIKKYPKLESEFVYGDYKVYDVRKMIAKSEQEIGKATAKYFFYSNIMNFFKTEITLANGEIRKRPLIETNGETGEIVWDKGRDFATVRKVLSMPQVNIVKKTEVQTGGFSKESILPKRNSDKLIARKKDWDPKKYGGFDSPTVAYSVLVVAKVEKGKSKKLKSVKELLGITIMERSSFEKNPIDFLEAKGYKEVKKDLIIKLPKYSLFELENGRKRMLASAGELQKGNELALPSKYVNFLYLASHYEKLKGSPEDNEQKQLFVEQHKHYLDEIIEQISEFSKRVILADANLDKVLSAYNKHRDKPIREQAENIIHLFTLTNLGAPAAFKYFDTTIDRKRYTSTKEVLDATLIHQSITGLYETRIDLSQLGGDGGGSSGGGEAAAKGGTLGIEDEYRLHETSTEPDVSLGSTWLSDFPQAWAETGGMGLAVRQAPLIIPLKATSTPVSIQQYPMSHEARLGIKPHIQRLLDQGILVPCQSPWNTPLLPVKKPGTNDYRPVQDLREVNKRVEDIHPTVPNPYNLLSGLPPSHQWYTVLDLKDAFFCLRLHPTSQPLFAFEWRDPGMGISGQLTWTRLPQGFKNSPTLFDEALHRDLADFRIQHPDLILLQYVDDILLAATSELDCQQGTRALLQTLGDLGYRASAKKAQICQKQVKYLGYLLREGQRWLTEARKETVMGQPVPKTPRQLREFLGTAGFCRLWIPGFAEMAAPLYPLTKTGTLFSWGPDQQKAYQEIKQALLTAPALGLPDLTKPFELFVDEKQGYAKGVLTQKLGPWRRPVAYLSKKLDPVAAGWPPCLRMVAAIAVLTKDAGKLTMGQPLVILAPHAVEALVKQPPDRWLSNARMTHYQAMLLDTDRVQFGPVVALNPATLLPLPEEGAPHDCLEILAETHGTRPDLTDQPIPDADHTWYTDGSSFLQEGQRKAGAAVTTETEVIWAGALPAGTSAQRAELIALTQALKMAEGKRLNVYTDSRYAFATAHIHGEIYRRRGLLTSEGREIKNKSEILALLKALFLPKRLSIIHCLGHQKGDSAEARGNRLADQAAREAAIKTPPDTSTLLAGKRTADGSEFEKRTADGSEFESPKKKAKVE

SEQ ID NO: 2183 - protein, 2091 aa, synthetic construct
MPAAKRVKLDGGDKKYSIGLDIGTNSVGWAVITDEYKVPSKKFKVLGNTDRHSIKKNLIGALLFDSGETAEATRLKRTARRRYTRRKNRICYLQEIFSNEMAKVDDSFFHRLEESFLVEEDKKHERHPIFGNIVDEVAYHEKYPTIYHLRKKLVDSTDKADLRLIYLALAHMIKFRGHFLIEGDLNPDNSDVDKLFIQLVQTYNQLFEENPINASGVDAKAILSARLSKSRRLENLIAQLPGEKKNGLFGNLIALSLGLTPNFKSNFDLAEDAKLQLSKDTYDDDLDNLLAQIGDQYADLFLAAKNLSDAILLSDILRVNTEITKAPLSASMIKRYDEHHQDLTLLKALVRQQLPEKYKEIFFDQSKNGYAGYIDGGASQEEFYKFIKPILEKMDGTEELLVKLNREDLLRKQRTFDNGSIPHQIHLGELHAILRRQEDFYPFLKDNREKIEKILTFRIPYYVGPLARGNSRFAWMTRKSEETITPWNFEEVVDKGASAQSFIERMTNFDKNLPNEKVLPKHSLLYEYFTVYNELTKVKYVTEGMRKPAFLSGEQKKAIVDLLFKTNRKVTVKQLKEDYFKKIECFDSVEISGVEDRFNASLGTYHDLLKIIKDKDFLDNEENEDILEDIVLTLTLFEDREMIEERLKTYAHLFDDKVMKQLKRRRYTGWGRLSRKLINGIRDKQSGKTILDFLKSDGFANRNFMQLIHDDSLTFKEDIQKAQVSGQGDSLHEHIANLAGSPAIKKGILQTVKVVDELVKVMGRHKPENIVIEMARENQTTQKGQKNSRERMKRIEEGIKELGSQILKEHPVENTQLQNEKLYLYYLQNGRDMYVDQELDINRLSDYDVDHIVPQSFLKDDSIDNKVLTRSDKARGKSDNVPSEEVVKKMKNYWRQLLNAKLITQRKFDNLTKAERGGLSELDKAGFIKRQLVETRQITKHVAQILDSRMNTKYDENDKLIREVKVITLKSKLVSDFRKDFQFYKVREINNYHHAHDAYLNAVVGTALIKKYPKLESEFVYGDYKVYDVRKMIAKSEQEIGKATAKYFFYSNIMNFFKTEITLANGEIRKRPLIETNGETGEIVWDKGRDFATVRKVLSMPQVNIVKKTEVQTGGFSKESILPKRNSDKLIARKKDWDPKKYGGFDSPTVAYSVLVVAKVEKGKSKKLKSVKELLGITIMERSSFEKNPIDFLEAKGYKEVKKDLIIKLPKYSLFELENGRKRMLASAGELQKGNELALPSKYVNFLYLASHYEKLKGSPEDNEQKQLFVEQHKHYLDEIIEQISEFSKRVILADANLDKVLSAYNKHRDKPIREQAENIIHLFTLTNLGAPAAFKYFDTTIDRKRYTSTKEVLDATLIHQSITGLYETRIDLSQLGGDGGGSSPAPGGTLGIEDEYRLHETSTEPDVSLGSTWLSDFPQAWAETGGMGLAVRQAPLIIPLKATSTPVSIQQYPMSHEARLGIKPHIQRLLDQGILVPCQSPWNTPLLPVKKPGTNDYRPVQDLREVNKRVEDIHPTVPNPYNLLSGLPPSHQWYTVLDLKDAFFCLRLHPTSQPLFAFEWRDPGMGISGQLTWTRLPQGFKNSPTLFDEALHRDLADFRIQHPDLILLQYVDDILLAATSELDCQQGTRALLQTLGDLGYRASAKKAQICQKQVKYLGYLLREGQRWLTEARKETVMGQPVPKTPRQLREFLGTAGFCRLWIPGFAEMAAPLYPLTKTGTLFSWGPDQQKAYQEIKQALLTAPALGLPDLTKPFELFVDEKQGYAKGVLTQKLGPWRRPVAYLSKKLDPVAAGWPPCLRMVAAIAVLTKDAGKLTMGQPLVILAPHAVEALVKQPPDRWLSNARMTHYQAMLLDTDRVQFGPVVALNPATLLPLPEEGAPHDCLEILAETHGTRPDLTDQPIPDADHTWYTDGSSFLQEGQRKAGAAVTTETEVIWAGALPAGTSAQRAELIALTQALKMAEGKRLNVYTDSRYAFATAHIHGEIYRRRGLLTSEGREIKNKSEILALLKALFLPKRLSIIHCLGHQKGDSAEARGNRLADQAAREAAIKTPPDTSTLLAGKRTADGSEFEKRTADGSEFESPKKKAKVE

SEQ ID NO: 2184 - protein, 2096 aa, synthetic construct
MPAAKRVKLDGGDKKYSIGLDIGTNSVGWAVITDEYKVPSKKFKVLGNTDRHSIKKNLIGALLFDSGETAEATRLKRTARRRYTRRKNRICYLQEIFSNEMAKVDDSFFHRLEESFLVEEDKKHERHPIFGNIVDEVAYHEKYPTIYHLRKKLVDSTDKADLRLIYLALAHMIKFRGHFLIEGDLNPDNSDVDKLFIQLVQTYNQLFEENPINASGVDAKAILSARLSKSRRLENLIAQLPGEKKNGLFGNLIALSLGLTPNFKSNFDLAEDAKLQLSKDTYDDDLDNLLAQIGDQYADLFLAAKNLSDAILLSDILRVNTEITKAPLSASMIKRYDEHHQDLTLLKALVRQQLPEKYKEIFFDQSKNGYAGYIDGGASQEEFYKFIKPILEKMDGTEELLVKLNREDLLRKQRTFDNGSIPHQIHLGELHAILRRQEDFYPFLKDNREKIEKILTFRIPYYVGPLARGNSRFAWMTRKSEETITPWNFEEVVDKGASAQSFIERMTNFDKNLPNEKVLPKHSLLYEYFTVYNELTKVKYVTEGMRKPAFLSGEQKKAIVDLLFKTNRKVTVKQLKEDYFKKIECFDSVEISGVEDRFNASLGTYHDLLKIIKDKDFLDNEENEDILEDIVLTLTLFEDREMIEERLKTYAHLFDDKVMKQLKRRRYTGWGRLSRKLINGIRDKQSGKTILDFLKSDGFANRNFMQLIHDDSLTFKEDIQKAQVSGQGDSLHEHIANLAGSPAIKKGILQTVKVVDELVKVMGRHKPENIVIEMARENQTTQKGQKNSRERMKRIEEGIKELGSQILKEHPVENTQLQNEKLYLYYLQNGRDMYVDQELDINRLSDYDVDHIVPQSFLKDDSIDNKVLTRSDKARGKSDNVPSEEVVKKMKNYWRQLLNAKLITQRKFDNLTKAERGGLSELDKAGFIKRQLVETRQITKHVAQILDSRMNTKYDENDKLIREVKVITLKSKLVSDFRKDFQFYKVREINNYHHAHDAYLNAVVGTALIKKYPKLESEFVYGDYKVYDVRKMIAKSEQEIGKATAKYFFYSNIMNFFKTEITLANGEIRKRPLIETNGETGEIVWDKGRDFATVRKVLSMPQVNIVKKTEVQTGGFSKESILPKRNSDKLIARKKDWDPKKYGGFDSPTVAYSVLVVAKVEKGKSKKLKSVKELLGITIMERSSFEKNPIDFLEAKGYKEVKKDLIIKLPKYSLFELENGRKRMLASAGELQKGNELALPSKYVNFLYLASHYEKLKGSPEDNEQKQLFVEQHKHYLDEIIEQISEFSKRVILADANLDKVLSAYNKHRDKPIREQAENIIHLFTLTNLGAPAAFKYFDTTIDRKRYTSTKEVLDATLIHQSITGLYETRIDLSQLGGDGGGGGEAAAKGGSGGTLGIEDEYRLHETSTEPDVSLGSTWLSDFPQAWAETGGMGLAVRQAPLIIPLKATSTPVSIQQYPMSHEARLGIKPHIQRLLDQGILVPCQSPWNTPLLPVKKPGTNDYRPVQDLREVNKRVEDIHPTVPNPYNLLSGLPPSHQWYTVLDLKDAFFCLRLHPTSQPLFAFEWRDPGMGISGQLTWTRLPQGFKNSPTLFDEALHRDLADFRIQHPDLILLQYVDDILLAATSELDCQQGTRALLQTLGDLGYRASAKKAQICQKQVKYLGYLLREGQRWLTEARKETVMGQPVPKTPRQLREFLGTAGFCRLWIPGFAEMAAPLYPLTKTGTLFSWGPDQQKAYQEIKQALLTAPALGLPDLTKPFELFVDEKQGYAKGVLTQKLGPWRRPVAYLSKKLDPVAAGWPPCLRMVAAIAVLTKDAGKLTMGQPLVILAPHAVEALVKQPPDRWLSNARMTHYQAMLLDTDRVQFGPVVALNPATLLPLPEEGAPHDCLEILAETHGTRPDLTDQPIPDADHTWYTDGSSFLQEGQRKAGAAVTTETEVIWAGALPAGTSAQRAELIALTQALKMAEGKRLNVYTDSRYAFATAHIHGEIYRRRGLLTSEGREIKNKSEILALLKALFLPKRLSIIHCLGHQKGDSAEARGNRLADQAAREAAIKTPPDTSTLLAGKRTADGSEFEKRTADGSEFESPKKKAKVE

SEQ ID NO: 2185 - protein, 2096 aa, synthetic construct
MPAAKRVKLDGGDKKYSIGLDIGTNSVGWAVITDEYKVPSKKFKVLGNTDRHSIKKNLIGALLFDSGETAEATRLKRTARRRYTRRKNRICYLQEIFSNEMAKVDDSFFHRLEESFLVEEDKKHERHPIFGNIVDEVAYHEKYPTIYHLRKKLVDSTDKADLRLIYLALAHMIKFRGHFLIEGDLNPDNSDVDKLFIQLVQTYNQLFEENPINASGVDAKAILSARLSKSRRLENLIAQLPGEKKNGLFGNLIALSLGLTPNFKSNFDLAEDAKLQLSKDTYDDDLDNLLAQIGDQYADLFLAAKNLSDAILLSDILRVNTEITKAPLSASMIKRYDEHHQDLTLLKALVRQQLPEKYKEIFFDQSKNGYAGYIDGGASQEEFYKFIKPILEKMDGTEELLVKLNREDLLRKQRTFDNGSIPHQIHLGELHAILRRQEDFYPFLKDNREKIEKILTFRIPYYVGPLARGNSRFAWMTRKSEETITPWNFEEVVDKGASAQSFIERMTNFDKNLPNEKVLPKHSLLYEYFTVYNELTKVKYVTEGMRKPAFLSGEQKKAIVDLLFKTNRKVTVKQLKEDYFKKIECFDSVEISGVEDRFNASLGTYHDLLKIIKDKDFLDNEENEDILEDIVLTLTLFEDREMIEERLKTYAHLFDDKVMKQLKRRRYTGWGRLSRKLINGIRDKQSGKTILDFLKSDGFANRNFMQLIHDDSLTFKEDIQKAQVSGQGDSLHEHIANLAGSPAIKKGILQTVKVVDELVKVMGRHKPENIVIEMARENQTTQKGQKNSRERMKRIEEGIKELGSQILKEHPVENTQLQNEKLYLYYLQNGRDMYVDQELDINRLSDYDVDHIVPQSFLKDDSIDNKVLTRSDKARGKSDNVPSEEVVKKMKNYWRQLLNAKLITQRKFDNLTKAERGGLSELDKAGFIKRQLVETRQITKHVAQILDSRMNTKYDENDKLIREVKVITLKSKLVSDFRKDFQFYKVREINNYHHAHDAYLNAVVGTALIKKYPKLESEFVYGDYKVYDVRKMIAKSEQEIGKATAKYFFYSNIMNFFKTEITLANGEIRKRPLIETNGETGEIVWDKGRDFATVRKVLSMPQVNIVKKTEVQTGGFSKESILPKRNSDKLIARKKDWDPKKYGGFDSPTVAYSVLVVAKVEKGKSKKLKSVKELLGITIMERSSFEKNPIDFLEAKGYKEVKKDLIIKLPKYSLFELENGRKRMLASAGELQKGNELALPSKYVNFLYLASHYEKLKGSPEDNEQKQLFVEQHKHYLDEIIEQISEFSKRVILADANLDKVLSAYNKHRDKPIREQAENIIHLFTLTNLGAPAAFKYFDTTIDRKRYTSTKEVLDATLIHQSITGLYETRIDLSQLGGDGGEAAAKPAPGSSGGTLGIEDEYRLHETSTEPDVSLGSTWLSDFPQAWAETGGMGLAVRQAPLIIPLKATSTPVSIQQYPMSHEARLGIKPHIQRLLDQGILVPCQSPWNTPLLPVKKPGTNDYRPVQDLREVNKRVEDIHPTVPNPYNLLSGLPPSHQWYTVLDLKDAFFCLRLHPTSQPLFAFEWRDPGMGISGQLTWTRLPQGFKNSPTLFDEALHRDLADFRIQHPDLILLQYVDDILLAATSELDCQQGTRALLQTLGDLGYRASAKKAQICQKQVKYLGYLLREGQRWLTEARKETVMGQPVPKTPRQLREFLGTAGFCRLWIPGFAEMAAPLYPLTKTGTLFSWGPDQQKAYQEIKQALLTAPALGLPDLTKPFELFVDEKQGYAKGVLTQKLGPWRRPVAYLSKKLDPVAAGWPPCLRMVAAIAVLTKDAGKLTMGQPLVILAPHAVEALVKQPPDRWLSNARMTHYQAMLLDTDRVQFGPVVALNPATLLPLPEEGAPHDCLEILAETHGTRPDLTDQPIPDADHTWYTDGSSFLQEGQRKAGAAVTTETEVIWAGALPAGTSAQRAELIALTQALKMAEGKRLNVYTDSRYAFATAHIHGEIYRRRGLLTSEGREIKNKSEILALLKALFLPKRLSIIHCLGHQKGDSAEARGNRLADQAAREAAIKTPPDTSTLLAGKRTADGSEFEKRTADGSEFESPKKKAKVE

SEQ ID NO: 2186 - protein, 2096 aa, synthetic construct; identical to SEQ ID NO: 2069

SEQ ID NO: 2187 - protein, 2096 aa, synthetic construct
MPAAKRVKLDGGDKKYSIGLDIGTNSVGWAVITDEYKVPSKKFKVLGNTDRHSIKKNLIGALLFDSGETAEATRLKRTARRRYTRRKNRICYLQEIFSNEMAKVDDSFFHRLEESFLVEEDKKHERHPIFGNIVDEVAYHEKYPTIYHLRKKLVDSTDKADLRLIYLALAHMIKFRGHFLIEGDLNPDNSDVDKLFIQLVQTYNQLFEENPINASGVDAKAILSARLSKSRRLENLIAQLPGEKKNGLFGNLIALSLGLTPNFKSNFDLAEDAKLQLSKDTYDDDLDNLLAQIGDQYADLFLAAKNLSDAILLSDILRVNTEITKAPLSASMIKRYDEHHQDLTLLKALVRQQLPEKYKEIFFDQSKNGYAGYIDGGASQEEFYKFIKPILEKMDGTEELLVKLNREDLLRKQRTFDNGSIPHQIHLGELHAILRRQEDFYPFLKDNREKIEKILTFRIPYYVGPLARGNSRFAWMTRKSEETITPWNFEEVVDKGASAQSFIERMTNFDKNLPNEKVLPKHSLLYEYFTVYNELTKVKYVTEGMRKPAFLSGEQKKAIVDLLFKTNRKVTVKQLKEDYFKKIECFDSVEISGVEDRFNASLGTYHDLLKIIKDKDFLDNEENEDILEDIVLTLTLFEDREMIEERLKTYAHLFDDKVMKQLKRRRYTGWGRLSRKLINGIRDKQSGKTILDFLKSDGFANRNFMQLIHDDSLTFKEDIQKAQVSGQGDSLHEHIANLAGSPAIKKGILQTVKVVDELVKVMGRHKPENIVIEMARENQTTQKGQKNSRERMKRIEEGIKELGSQILKEHPVENTQLQNEKLYLYYLQNGRDMYVDQELDINRLSDYDVDHIVPQSFLKDDSIDNKVLTRSDKARGKSDNVPSEEVVKKMKNYWRQLLNAKLITQRKFDNLTKAERGGLSELDKAGFIKRQLVETRQITKHVAQILDSRMNTKYDENDKLIREVKVITLKSKLVSDFRKDFQFYKVREINNYHHAHDAYLNAVVGTALIKKYPKLESEFVYGDYKVYDVRKMIAKSEQEIGKATAKYFFYSNIMNFFKTEITLANGEIRKRPLIETNGETGEIVWDKGRDFATVRKVLSMPQVNIVKKTEVQTGGFSKESILPKRNSDKLIARKKDWDPKKYGGFDSPTVAYSVLVVAKVEKGKSKKLKSVKELLGITIMERSSFEKNPIDFLEAKGYKEVKKDLIIKLPKYSLFELENGRKRMLASAGELQKGNELALPSKYVNFLYLASHYEKLKGSPEDNEQKQLFVEQHKHYLDEIIEQISEFSKRVILADANLDKVLSAYNKHRDKPIREQAENIIHLFTLTNLGAPAAFKYFDTTIDRKRYTSTKEVLDATLIHQSITGLYETRIDLSQLGGDGGPAPAPAPAPAPGGTLGIEDEYRLHETSTEPDVSLGSTWLSDFPQAWAETGGMGLAVRQAPLIIPLKATSTPVSIQQYPMSHEARLGIKPHIQRLLDQGILVPCQSPWNTPLLPVKKPGTNDYRPVQDLREVNKRVEDIHPTVPNPYNLLSGLPPSHQWYTVLDLKDAFFCLRLHPTSQPLFAFEWRDPGMGISGQLTWTRLPQGFKNSPTLFNEALHRDLADFRIQHPDLILLQYVDDILLAATSELDCQQGTRALLQTLGDLGYRASAKKAQICQKQVKYLGYLLREGQRWLTEARKETVMGQPVPKTPRQLREFLGTAGFCRLWIPGFAEMAAPLYPLTKPGTLFSWGPDQQKAYQEIKQALLTAPALGLPDLTKPFELFVDEKQGYAKGVLTQKLGPWRRPVAYLSKKLDPVAAGWPPCLRMVAAIAVLTKDAGKLTMGQPLVILAPHAVEALVKQPPDRWLSNARMTHYQAMLLDTDRVQFGPVVALNPATLLPLPEEGAPHDCLEILAETHGTRPDLTDQPIPDADHTWYTDGSSFLQEGQRKAGAAVTTETEVIWAGALPAGTSAQRAELIALTQALKMAEGKRLNVYTDSRYAFATAHIHGEIYRRRGWLTSEGREIKNKSEILALLKALFLPKRLSIIHCLGHQKGDSAEARGNRLADQAAREAAIKTPPDTSTLLAGKRTADGSEFEKRTADGSEFESPKKKAKVE

SEQ ID NO: 2188 - protein, 2110 aa, synthetic construct
MPAAKRVKLDGGDKKYSIGLDIGTNSVGWAVITDEYKVPSKKFKVLGNTDRHSIKKNLIGALLFDSGETAEATRLKRTARRRYTRRKNRICYLQEIFSNEMAKVDDSFFHRLEESFLVEEDKKHERHPIFGNIVDEVAYHEKYPTIYHLRKKLVDSTDKADLRLIYLALAHMIKFRGHFLIEGDLNPDNSDVDKLFIQLVQTYNQLFEENPINASGVDAKAILSARLSKSRRLENLIAQLPGEKKNGLFGNLIALSLGLTPNFKSNFDLAEDAKLQLSKDTYDDDLDNLLAQIGDQYADLFLAAKNLSDAILLSDILRVNTEITKAPLSASMIKRYDEHHQDLTLLKALVRQQLPEKYKEIFFDQSKNGYAGYIDGGASQEEFYKFIKPILEKMDGTEELLVKLNREDLLRKQRTFDNGSIPHQIHLGELHAILRRQEDFYPFLKDNREKIEKILTFRIPYYVGPLARGNSRFAWMTRKSEETITPWNFEEVVDKGASAQSFIERMTNFDKNLPNEKVLPKHSLLYEYFTVYNELTKVKYVTEGMRKPAFLSGEQKKAIVDLLFKTNRKVTVKQLKEDYFKKIECFDSVEISGVEDRFNASLGTYHDLLKIIKDKDFLDNEENEDILEDIVLTLTLFEDREMIEERLKTYAHLFDDKVMKQLKRRRYTGWGRLSRKLINGIRDKQSGKTILDFLKSDGFANRNFMQLIHDDSLTFKEDIQKAQVSGQGDSLHEHIANLAGSPAIKKGILQTVKVVDELVKVMGRHKPENIVIEMARENQTTQKGQKNSRERMKRIEEGIKELGSQILKEHPVENTQLQNEKLYLYYLQNGRDMYVDQELDINRLSDYDVDHIVPQSFLKDDSIDNKVLTRSDKARGKSDNVPSEEVVKKMKNYWRQLLNAKLITQRKFDNLTKAERGGLSELDKAGFIKRQLVETRQITKHVAQILDSRMNTKYDENDKLIREVKVITLKSKLVSDFRKDFQFYKVREINNYHHAHDAYLNAVVGTALIKKYPKLESEFVYGDYKVYDVRKMIAKSEQEIGKATAKYFFYSNIMNFFKTEITLANGEIRKRPLIETNGETGEIVWDKGRDFATVRKVLSMPQVNIVKKTEVQTGGFSKESILPKRNSDKLIARKKDWDPKKYGGFDSPTVAYSVLVVAKVEKGKSKKLKSVKELLGITIMERSSFEKNPIDFLEAKGYKEVKKDLIIKLPKYSLFELENGRKRMLASAGELQKGNELALPSKYVNFLYLASHYEKLKGSPEDNEQKQLFVEQHKHYLDEIIEQISEFSKRVILADANLDKVLSAYNKHRDKPIREQAENIIHLFTLTNLGAPAAFKYFDTTIDRKRYTSTKEVLDATLIHQSITGLYETRIDLSQLGGDGGEAAAKEAAAKEAAAKEAAAKEAAAKGGTLGIEDEYRLHETSTEPDVSLGSTWLSDFPQAWAETGGMGLAVRQAPLIIPLKATSTPVSIQQYPMSHEARLGIKPHIQRLLDQGILVPCQSPWNTPLLPVKKPGTNDYRPVQDLREVNKRVEDIHPTVPNPYNLLSGLPPSHQWYTVLDLKDAFFCLRLHPTSQPLFAFEWRDPGMGISGQLTWTRLPQGFKNSPTLFNEALHRDLADFRIQHPDLILLQYVDDILLAATSELDCQQGTRALLQTLGDLGYRASAKKAQICQKQVKYLGYLLREGQRWLTEARKETVMGQPVPKTPRQLREFLGTAGFCRLWIPGFAEMAAPLYPLTKPGTLFSWGPDQQKAYQEIKQALLTAPALGLPDLTKPFELFVDEKQGYAKGVLTQKLGPWRRPVAYLSKKLDPVAAGWPPCLRMVAAIAVLTKDAGKLTMGQPLVILAPHAVEALVKQPPDRWLSNARMTHYQAMLLDTDRVQFGPVVALNPATLLPLPEEGAPHDCLEILAETHGTRPDLTDQPIPDADHTWYTDGSSFLQEGQRKAGAAVTTETEVIWAGALPAGTSAQRAELIALTQALKMAEGKRLNVYTDSRYAFATAHIHGEIYRRRGWLTSEGREIKNKSEILALLKALFLPKRLSIIHCLGHQKGDSAEARGNRLADQAAREAAIKTPPDTSTLLAGKRTADGSEFEKRTADGSEFESPKKKAKVE

SEQ ID NO: 2189 - protein, 2115 aa, synthetic construct
MPAAKRVKLDGGDKKYSIGLDIGTNSVGWAVITDEYKVPSKKFKVLGNTDRHSIKKNLIGALLFDSGETAEATRLKRTARRRYTRRKNRICYLQEIFSNEMAKVDDSFFHRLEESFLVEEDKKHERHPIFGNIVDEVAYHEKYPTIYHLRKKLVDSTDKADLRLIYLALAHMIKFRGHFLIEGDLNPDNSDVDKLFIQLVQTYNQLFEENPINASGVDAKAILSARLSKSRRLENLIAQLPGEKKNGLFGNLIALSLGLTPNFKSNFDLAEDAKLQLSKDTYDDDLDNLLAQIGDQYADLFLAAKNLSDAILLSDILRVNTEITKAPLSASMIKRYDEHHQDLTLLKALVRQQLPEKYKEIFFDQSKNGYAGYIDGGASQEEFYKFIKPILEKMDGTEELLVKLNREDLLRKQRTFDNGSIPHQIHLGELHAILRRQEDFYPFLKDNREKIEKILTFRIPYYVGPLARGNSRFAWMTRKSEETITPWNFEEVVDKGASAQSFIERMTNFDKNLPNEKVLPKHSLLYEYFTVYNELTKVKYVTEGMRKPAFLSGEQKKAIVDLLFKTNRKVTVKQLKEDYFKKIECFDSVEISGVEDRFNASLGTYHDLLKIIKDKDFLDNEENEDILEDIVLTLTLFEDREMIEERLKTYAHLFDDKVMKQLKRRRYTGWGRLSRKLINGIRDKQSGKTILDFLKSDGFANRNFMQLIHDDSLTFKEDIQKAQVSGQGDSLHEHIANLAGSPAIKKGILQTVKVVDELVKVMGRHKPENIVIEMARENQTTQKGQKNSRERMKRIEEGIKELGSQILKEHPVENTQLQNEKLYLYYLQNGRDMYVDQELDINRLSDYDVDHIVPQSFLKDDSIDNKVLTRSDKARGKSDNVPSEEVVKKMKNYWRQLLNAKLITQRKFDNLTKAERGGLSELDKAGFIKRQLVETRQITKHVAQILDSRMNTKYDENDKLIREVKVITLKSKLVSDFRKDFQFYKVREINNYHHAHDAYLNAVVGTALIKKYPKLESEFVYGDYKVYDVRKMIAKSEQEIGKATAKYFFYSNIMNFFKTEITLANGEIRKRPLIETNGETGEIVWDKGRDFATVRKVLSMPQVNIVKKTEVQTGGFSKESILPKRNSDKLIARKKDWDPKKYGGFDSPTVAYSVLVVAKVEKGKSKKLKSVKELLGITIMERSSFEKNPIDFLEAKGYKEVKKDLIIKLPKYSLFELENGRKRMLASAGELQKGNELALPSKYVNFLYLASHYEKLKGSPEDNEQKQLFVEQHKHYLDEIIEQISEFSKRVILADANLDKVLSAYNKHRDKPIREQAENIIHLFTLTNLGAPAAFKYFDTTIDRKRYTSTKEVLDATLIHQSITGLYETRIDLSQLGGDGGEAAAKEAAAKEAAAKEAAAKEAAAKEAAAKGGTLGIEDEYRLHETSTEPDVSLGSTWLSDFPQAWAETGGMGLAVRQAPLIIPLKATSTPVSIQQYPMSHEARLGIKPHIQRLLDQGILVPCQSPWNTPLLPVKKPGTNDYRPVQDLREVNKRVEDIHPTVPNPYNLLSGLPPSHQWYTVLDLKDAFFCLRLHPTSQPLFAFEWRDPGMGISGQLTWTRLPQGFKNSPTLFNEALHRDLADFRIQHPDLILLQYVDDILLAATSELDCQQGTRALLQTLGDLGYRASAKKAQICQKQVKYLGYLLREGQRWLTEARKETVMGQPVPKTPRQLREFLGTAGFCRLWIPGFAEMAAPLYPLTKPGTLFSWGPDQQKAYQEIKQALLTAPALGLPDLTKPFELFVDEKQGYAKGVLTQKLGPWRRPVAYLSKKLDPVAAGWPPCLRMVAAIAVLTKDAGKLTMGQPLVILAPHAVEALVKQPPDRWLSNARMTHYQAMLLDTDRVQFGPVVALNPATLLPLPEEGAPHDCLEILAETHGTRPDLTDQPIPDADHTWYTDGSSFLQEGQRKAGAAVTTETEVIWAGALPAGTSAQRAELIALTQALKMAEGKRLNVYTDSRYAFATAHIHGEIYRRRGWLTSEGREIKNKSEILALLKALFLPKRLSIIHCLGHQKGDSAEARGNRLADQAAREAAIKTPPDTSTLLAGKRTADGSEFEKRTADGSEFESPKKKAKVE

SEQ ID NO: 2190 - protein, 2096 aa, synthetic construct
MPAAKRVKLDGGDKKYSIGLDIGTNSVGWAVITDEYKVPSKKFKVLGNTDRHSIKKNLIGALLFDSGETAEATRLKRTARRRYTRRKNRICYLQEIFSNEMAKVDDSFFHRLEESFLVEEDKKHERHPIFGNIVDEVAYHEKYPTIYHLRKKLVDSTDKADLRLIYLALAHMIKFRGHFLIEGDLNPDNSDVDKLFIQLVQTYNQLFEENPINASGVDAKAILSARLSKSRRLENLIAQLPGEKKNGLFGNLIALSLGLTPNFKSNFDLAEDAKLQLSKDTYDDDLDNLLAQIGDQYADLFLAAKNLSDAILLSDILRVNTEITKAPLSASMIKRYDEHHQDLTLLKALVRQQLPEKYKEIFFDQSKNGYAGYIDGGASQEEFYKFIKPILEKMDGTEELLVKLNREDLLRKQRTFDNGSIPHQIHLGELHAILRRQEDFYPFLKDNREKIEKILTFRIPYYVGPLARGNSRFAWMTRKSEETITPWNFEEVVDKGASAQSFIERMTNFDKNLPNEKVLPKHSLLYEYFTVYNELTKVKYVTEGMRKPAFLSGEQKKAIVDLLFKTNRKVTVKQLKEDYFKKIECFDSVEISGVEDRFNASLGTYHDLLKIIKDKDFLDNEENEDILEDIVLTLTLFEDREMIEERLKTYAHLFDDKVMKQLKRRRYTGWGRLSRKLINGIRDKQSGKTILDFLKSDGFANRNFMQLIHDDSLTFKEDIQKAQVSGQGDSLHEHIANLAGSPAIKKGILQTVKVVDELVKVMGRHKPENIVIEMARENQTTQKGQKNSRERMKRIEEGIKELGSQILKEHPVENTQLQNEKLYLYYLQNGRDMYVDQELDINRLSDYDVDHIVPQSFLKDDSIDNKVLTRSDKARGKSDNVPSEEVVKKMKNYWRQLLNAKLITQRKFDNLTKAERGGLSELDKAGFIKRQLVETRQITKHVAQILDSRMNTKYDENDKLIREVKVITLKSKLVSDFRKDFQFYKVREINNYHHAHDAYLNAVVGTALIKKYPKLESEFVYGDYKVYDVRKMIAKSEQEIGKATAKYFFYSNIMNFFKTEITLANGEIRKRPLIETNGETGEIVWDKGRDFATVRKVLSMPQVNIVKKTEVQTGGFSKESILPKRNSDKLIARKKDWDPKKYGGFDSPTVAYSVLVVAKVEKGKSKKLKSVKELLGITIMERSSFEKNPIDFLEAKGYKEVKKDLIIKLPKYSLFELENGRKRMLASAGELQKGNELALPSKYVNFLYLASHYEKLKGSPEDNEQKQLFVEQHKHYLDEIIEQISEFSKRVILADANLDKVLSAYNKHRDKPIREQAENIIHLFTLTNLGAPAAFKYFDTTIDRKRYTSTKEVLDATLIHQSITGLYETRIDLSQLGGDGGEAAAKGSSGGSGGTLGIEDEYRLHETSTEPDVSLGSTWLSDFPQAWAETGGMGLAVRQAPLIIPLKATSTPVSIQQYPMSHEARLGIKPHIQRLLDQGILVPCQSPWNTPLLPVKKPGTNDYRPVQDLREVNKRVEDIHPTVPNPYNLLSGLPPSHQWYTVLDLKDAFFCLRLHPTSQPLFAFEWRDPGMGISGQLTWTRLPQGFKNSPTLFNEALHRDLADFRIQHPDLILLQYVDDILLAATSELDCQQGTRALLQTLGDLGYRASAKKAQICQKQVKYLGYLLREGQRWLTEARKETVMGQPVPKTPRQLREFLGTAGFCRLWIPGFAEMAAPLYPLTKPGTLFSWGPDQQKAYQEIKQALLTAPALGLPDLTKPFELFVDEKQGYAKGVLTQKLGPWRRPVAYLSKKLDPVAAGWPPCLRMVAAIAVLTKDAGKLTMGQPLVILAPHAVEALVKQPPDRWLSNARMTHYQAMLLDTDRVQFGPVVALNPATLLPLPEEGAPHDCLEILAETHGTRPDLTDQPIPDADHTWYTDGSSFLQEGQRKAGAAVTTETEVIWAGALPAGTSAQRAELIALTQALKMAEGKRLNVYTDSRYAFATAHIHGEIYRRRGWLTSEGREIKNKSEILALLKALFLPKRLSIIHCLGHQKGDSAEARGNRLADQAAREAAIKTPPDTSTLLAGKRTADGSEFEKRTADGSEFESPKKKAKVE

SEQ ID NO: 2191 - protein, 2105 aa, synthetic construct; identical to SEQ ID NO: 2070

SEQ ID NO: 2192 - protein, 2096 aa, synthetic construct
MPAAKRVKLDGGDKKYSIGLDIGTNSVGWAVITDEYKVPSKKFKVLGNTDRHSIKKNLIGALLFDSGETAEATRLKRTARRRYTRRKNRICYLQEIFSNEMAKVDDSFFHRLEESFLVEEDKKHERHPIFGNIVDEVAYHEKYPTIYHLRKKLVDSTDKADLRLIYLALAHMIKFRGHFLIEGDLNPDNSDVDKLFIQLVQTYNQLFEENPINASGVDAKAILSARLSKSRRLENLIAQLPGEKKNGLFGNLIALSLGLTPNFKSNFDLAEDAKLQLSKDTYDDDLDNLLAQIGDQYADLFLAAKNLSDAILLSDILRVNTEITKAPLSASMIKRYDEHHQDLTLLKALVRQQLPEKYKEIFFDQSKNGYAGYIDGGASQEEFYKFIKPILEKMDGTEELLVKLNREDLLRKQRTFDNGSIPHQIHLGELHAILRRQEDFYPFLKDNREKIEKILTFRIPYYVGPLARGNSRFAWMTRKSEETITPWNFEEVVDKGASAQSFIERMTNFDKNLPNEKVLPKHSLLYEYFTVYNELTKVKYVTEGMRKPAFLSGEQKKAIVDLLFKTNRKVTVKQLKEDYFKKIECFDSVEISGVEDRFNASLGTYHDLLKIIKDKDFLDNEENEDILEDIVLTLTLFEDREMIEERLKTYAHLFDDKVMKQLKRRRYTGWGRLSRKLINGIRDKQSGKTILDFLKSDGFANRNFMQLIHDDSLTFKEDIQKAQVSGQGDSLHEHIANLAGSPAIKKGILQTVKVVDELVKVMGRHKPENIVIEMARENQTTQKGQKNSRERMKRIEEGIKELGSQILKEHPVENTQLQNEKLYLYYLQNGRDMYVDQELDINRLSDYDVDHIVPQSFLKDDSIDNKVLTRSDKARGKSDNVPSEEVVKKMKNYWRQLLNAKLITQRKFDNLTKAERGGLSELDKAGFIKRQLVETRQITKHVAQILDSRMNTKYDENDKLIREVKVITLKSKLVSDFRKDFQFYKVREINNYHHAHDAYLNAVVGTALIKKYPKLESEFVYGDYKVYDVRKMIAKSEQEIGKATAKYFFYSNIMNFFKTEITLANGEIRKRPLIETNGETGEIVWDKGRDFATVRKVLSMPQVNIVKKTEVQTGGFSKESILPKRNSDKLIARKKDWDPKKYGGFDSPTVAYSVLVVAKVEKGKSKKLKSVKELLGITIMERSSFEKNPIDFLEAKGYKEVKKDLIIKLPKYSLFELENGRKRMLASAGELQKGNELALPSKYVNFLYLASHYEKLKGSPEDNEQKQLFVEQHKHYLDEIIEQISEFSKRVILADANLDKVLSAYNKHRDKPIREQAENIIHLFTLTNLGAPAAFKYFDTTIDRKRYTSTKEVLDATLIHQSITGLYETRIDLSQLGGDGGGGSPAPEAAAKGGTLGIEDEYRLHETSTEPDVSLGSTWLSDFPQAWAETGGMGLAVRQAPLIIPLKATSTPVSIQQYPMSHEARLGIKPHIQRLLDQGILVPCQSPWNTPLLPVKKPGTNDYRPVQDLREVNKRVEDIHPTVPNPYNLLSGLPPSHQWYTVLDLKDAFFCLRLHPTSQPLFAFEWRDPGMGISGQLTWTRLPQGFKNSPTLFNEALHRDLADFRIQHPDLILLQYVDDILLAATSELDCQQGTRALLQTLGDLGYRASAKKAQICQKQVKYLGYLLREGQRWLTEARKETVMGQPVPKTPRQLREFLGTAGFCRLWIPGFAEMAAPLYPLTKPGTLFSWGPDQQKAYQEIKQALLTAPALGLPDLTKPFELFVDEKQGYAKGVLTQKLGPWRRPVAYLSKKLDPVAAGWPPCLRMVAAIAVLTKDAGKLTMGQPLVILAPHAVEALVKQPPDRWLSNARMTHYQAMLLDTDRVQFGPVVALNPATLLPLPEEGAPHDCLEILAETHGTRPDLTDQPIPDADHTWYTDGSSFLQEGQRKAGAAVTTETEVIWAGALPAGTSAQRAELIALTQALKMAEGKRLNVYTDSRYAFATAHIHGEIYRRRGWLTSEGREIKNKSEILALLKALFLPKRLSIIHCLGHQKGDSAEARGNRLADQAAREAAIKTPPDTSTLLAGKRTADGSEFEKRTADGSEFESPKKKAKVE

SEQ ID NO: 2193 - protein, 2115 aa, synthetic construct
MPAAKRVKLDGGDKKYSIGLDIGTNSVGWAVITDEYKVPSKKFKVLGNTDRHSIKKNLIGALLFDSGETAEATRLKRTARRRYTRRKNRICYLQEIFSNEMAKVDDSFFHRLEESFLVEEDKKHERHPIFGNIVDEVAYHEKYPTIYHLRKKLVDSTDKADLRLIYLALAHMIKFRGHFLIEGDLNPDNSDVDKLFIQLVQTYNQLFEENPINASGVDAKAILSARLSKSRRLENLIAQLPGEKKNGLFGNLIALSLGLTPNFKSNFDLAEDAKLQLSKDTYDDDLDNLLAQIGDQYADLFLAAKNLSDAILLSDILRVNTEITKAPLSASMIKRYDEHHQDLTLLKALVRQQLPEKYKEIFFDQSKNGYAGYIDGGASQEEFYKFIKPILEKMDGTEELLVKLNREDLLRKQRTFDNGSIPHQIHLGELHAILRRQEDFYPFLKDNREKIEKILTFRIPYYVGPLARGNSRFAWMTRKSEETITPWNFEEVVDKGASAQSFIERMTNFDKNLPNEKVLPKHSLLYEYFTVYNELTKVKYVTEGMRKPAFLSGEQKKAIVDLLFKTNRKVTVKQLKEDYFKKIECFDSVEISGVEDRFNASLGTYHDLLKIIKDKDFLDNEENEDILEDIVLTLTLFEDREMIEERLKTYAHLFDDKVMKQLKRRRYTGWGRLSRKLINGIRDKQSGKTILDFLKSDGFANRNFMQLIHDDSLTFKEDIQKAQVSGQGDSLHEHIANLAGSPAIKKGILQTVKVVDELVKVMGRHKPENIVIEMARENQTTQKGQKNSRERMKRIEEGIKELGSQILKEHPVENTQLQNEKLYLYYLQNGRDMYVDQELDINRLSDYDVDHIVPQSFLKDDSIDNKVLTRSDKARGKSDNVPSEEVVKKMKNYWRQLLNAKLITQRKFDNLTKAERGGLSELDKAGFIKRQLVETRQITKHVAQILDSRMNTKYDENDKLIREVKVITLKSKLVSDFRKDFQFYKVREINNYHHAHDAYLNAVVGTALIKKYPKLESEFVYGDYKVYDVRKMIAKSEQEIGKATAKYFFYSNIMNFFKTEITLANGEIRKRPLIETNGETGEIVWDKGRDFATVRKVLSMPQVNIVKKTEVQTGGFSKESILPKRNSDKLIARKKDWDPKKYGGFDSPTVAYSVLVVAKVEKGKSKKLKSVKELLGITIMERSSFEKNPIDFLEAKGYKEVKKDLIIKLPKYSLFELENGRKRMLASAGELQKGNELALPSKYVNFLYLASHYEKLKGSPEDNEQKQLFVEQHKHYLDEIIEQISEFSKRVILADANLDKVLSAYNKHRDKPIREQAENIIHLFTLTNLGAPAAFKYFDTTIDRKRYTSTKEVLDATLIHQSITGLYETRIDLSQLGGDGGGGGGSGGGGSGGGGSGGGGSGGGGSGGGGSGGTLGIEDEYRLHETSTEPDVSLGSTWLSDFPQAWAETGGMGLAVRQAPLIIPLKATSTPVSIQQYPMSHEARLGIKPHIQRLLDQGILVPCQSPWNTPLLPVKKPGTNDYRPVQDLREVNKRVEDIHPTVPNPYNLLSGLPPSHQWYTVLDLKDAFFCLRLHPTSQPLFAFEWRDPGMGISGQLTWTRLPQGFKNSPTLFNEALHRDLADFRIQHPDLILLQYVDDILLAATSELDCQQGTRALLQTLGDLGYRASAKKAQICQKQVKYLGYLLREGQRWLTEARKETVMGQPVPKTPRQLREFLGTAGFCRLWIPGFAEMAAPLYPLTKPGTLFSWGPDQQKAYQEIKQALLTAPALGLPDLTKPFELFVDEKQGYAKGVLTQKLGPWRRPVAYLSKKLDPVAAGWPPCLRMVAAIAVLTKDAGKLTMGQPLVILAPHAVEALVKQPPDRWLSNARMTHYQAMLLDTDRVQFGPVVALNPATLLPLPEEGAPHDCLEILAETHGTRPDLTDQPIPDADHTWYTDGSSFLQEGQRKAGAAVTTETEVIWAGALPAGTSAQRAELIALTQALKMAEGKRLNVYTDSRYAFATAHIHGEIYRRRGWLTSEGREIKNKSEILALLKALFLPKRLSIIHCLGHQKGDSAEARGNRLADQAAREAAIKTPPDTSTLLAGKRTADGSEFEKRTADGSEFESPKKKAKVE

SEQ ID NO: 2194 - protein, 2131 aa, synthetic construct
MPAAKRVKLDGGDKKYSIGLDIGTNSVGWAVITDEYKVPSKKFKVLGNTDRHSIKKNLIGALLFDSGETAEATRLKRTARRRYTRRKNRICYLQEIFSNEMAKVDDSFFHRLEESFLVEEDKKHERHPIFGNIVDEVAYHEKYPTIYHLRKKLVDSTDKADLRLIYLALAHMIKFRGHFLIEGDLNPDNSDVDKLFIQLVQTYNQLFEENPINASGVDAKAILSARLSKSRRLENLIAQLPGEKKNGLFGNLIALSLGLTPNFKSNFDLAEDAKLQLSKDTYDDDLDNLLAQIGDQYADLFLAAKNLSDAILLSDILRVNTEITKAPLSASMIKRYDEHHQDLTLLKALVRQQLPEKYKEIFFDQSKNGYAGYIDGGASQEEFYKFIKPILEKMDGTEELLVKLNREDLLRKQRTFDNGSIPHQIHLGELHAILRRQEDFYPFLKDNREKIEKILTFRIPYYVGPLARGNSRFAWMTRKSEETITPWNFEEVVDKGASAQSFIERMTNFDKNLPNEKVLPKHSLLYEYFTVYNELTKVKYVTEGMRKPAFLSGEQKKAIVDLLFKTNRKVTVKQLKEDYFKKIECFDSVEISGVEDRFNASLGTYHDLLKIIKDKDFLDNEENEDILEDIVLTLTLFEDREMIEERLKTYAHLFDDKVMKQLKRRRYTGWGRLSRKLINGIRDKQSGKTILDFLKSDGFANRNFMQLIHDDSLTFKEDIQKAQVSGQGDSLHEHIANLAGSPAIKKGILQTVKVVDELVKVMGRHKPENIVIEMARENQTTQKGQKNSRERMKRIEEGIKELGSQILKEHPVENTQLQNEKLYLYYLQNGRDMYVDQELDINRLSDYDVDHIVPQSFLKDDSIDNKVLTRSDKARGKSDNVPSEEVVKKMKNYWRQLLNAKLITQRKFDNLTKAERGGLSELDKAGFIKRQLVETRQITKHVAQILDSRMNTKYDENDKLIREVKVITLKSKLVSDFRKDFQFYKVREINNYHHAHDAYLNAVVGTALIKKYPKLESEFVYGDYKVYDVRKMIAKSEQEIGKATAKYFFYSNIMNFFKTEITLANGEIRKRPLIETNGETGEIVWDKGRDFATVRKVLSMPQVNIVKKTEVQTGGFSKESILPKRNSDKLIARKKDWDPKKYGGFDSPTVAYSVLVVAKVEKGKSKKLKSVKELLGITIMERSSFEKNPIDFLEAKGYKEVKKDLIIKLPKYSLFELENGRKRMLASAGELQKGNELALPSKYVNFLYLASHYEKLKGSPEDNEQKQLFVEQHKHYLDEIIEQISEFSKRVILADANLDKVLSAYNKHRDKPIREQAENIIHLFTLTNLGAPAAFKYFDTTIDRKRYTSTKEVLDATLIHQSITGLYETRIDLSQLGGDGGAEAAAKEAAAKEAAAKEAAAKALEAEAAAKEAAAKEAAAKEAAAKAGGTLGIEDEYRLHETSTEPDVSLGSTWLSDFPQAWAETGGMGLAVRQAPLIIPLKATSTPVSIQQYPMSHEARLGIKPHIQRLLDQGILVPCQSPWNTPLLPVKKPGTNDYRPVQDLREVNKRVEDIHPTVPNPYNLLSGLPPSHQWYTVLDLKDAFFCLRLHPTSQPLFAFEWRDPGMGISGQLTWTRLPQGFKNSPTLFNEALHRDLADFRIQHPDLILLQYVDDILLAATSELDCQQGTRALLQTLGDLGYRASAKKAQICQKQVKYLGYLLREGQRWLTEARKETVMGQPVPKTPRQLREFLGTAGFCRLWIPGFAEMAAPLYPLTKPGTLFSWGPDQQKAYQEIKQALLTAPALGLPDLTKPFELFVDEKQGYAKGVLTQKLGPWRRPVAYLSKKLDPVAAGWPPCLRMVAAIAVLTKDAGKLTMGQPLVILAPHAVEALVKQPPDRWLSNARMTHYQAMLLDTDRVQFGPVVALNPATLLPLPEEGAPHDCLEILAETHGTRPDLTDQPIPDADHTWYTDGSSFLQEGQRKAGAAVTTETEVIWAGALPAGTSAQRAELIALTQALKMAEGKRLNVYTDSRYAFATAHIHGEIYRRRGWLTSEGREIKNKSEILALLKALFLPKRLSIIHCLGHQKGDSAEARGNRLADQAAREAAIKTPPDTSTLLAGKRTADGSEFEKRTADGSEFESPKKKAKVE

SEQ ID NO: 2195 - protein, 2096 aa, synthetic construct; identical to SEQ ID NO: 2076

SEQ ID NO: 2196 - protein, 2096 aa, synthetic construct
MPAAKRVKLDGGDKKYSIGLDIGTNSVGWAVITDEYKVPSKKFKVLGNTDRHSIKKNLIGALLFDSGETAEATRLKRTARRRYTRRKNRICYLQEIFSNEMAKVDDSFFHRLEESFLVEEDKKHERHPIFGNIVDEVAYHEKYPTIYHLRKKLVDSTDKADLRLIYLALAHMIKFRGHFLIEGDLNPDNSDVDKLFIQLVQTYNQLFEENPINASGVDAKAILSARLSKSRRLENLIAQLPGEKKNGLFGNLIALSLGLTPNFKSNFDLAEDAKLQLSKDTYDDDLDNLLAQIGDQYADLFLAAKNLSDAILLSDILRVNTEITKAPLSASMIKRYDEHHQDLTLLKALVRQQLPEKYKEIFFDQSKNGYAGYIDGGASQEEFYKFIKPILEKMDGTEELLVKLNREDLLRKQRTFDNGSIPHQIHLGELHAILRRQEDFYPFLKDNREKIEKILTFRIPYYVGPLARGNSRFAWMTRKSEETITPWNFEEVVDKGASAQSFIERMTNFDKNLPNEKVLPKHSLLYEYFTVYNELTKVKYVTEGMRKPAFLSGEQKKAIVDLLFKTNRKVTVKQLKEDYFKKIECFDSVEISGVEDRFNASLGTYHDLLKIIKDKDFLDNEENEDILEDIVLTLTLFEDREMIEERLKTYAHLFDDKVMKQLKRRRYTGWGRLSRKLINGIRDKQSGKTILDFLKSDGFANRNFMQLIHDDSLTFKEDIQKAQVSGQGDSLHEHIANLAGSPAIKKGILQTVKVVDELVKVMGRHKPENIVIEMARENQTTQKGQKNSRERMKRIEEGIKELGSQILKEHPVENTQLQNEKLYLYYLQNGRDMYVDQELDINRLSDYDVDHIVPQSFLKDDSIDNKVLTRSDKARGKSDNVPSEEVVKKMKNYWRQLLNAKLITQRKFDNLTKAERGGLSELDKAGFIKRQLVETRQITKHVAQILDSRMNTKYDENDKLIREVKVITLKSKLVSDFRKDFQFYKVREINNYHHAHDAYLNAVVGTALIKKYPKLESEFVYGDYKVYDVRKMIAKSEQEIGKATAKYFFYSNIMNFFKTEITLANGEIRKRPLIETNGETGEIVWDKGRDFATVRKVLSMPQVNIVKKTEVQTGGFSKESILPKRNSDKLIARKKDWDPKKYGGFDSPTVAYSVLVVAKVEKGKSKKLKSVKELLGITIMERSSFEKNPIDFLEAKGYKEVKKDLIIKLPKYSLFELENGRKRMLASAGELQKGNELALPSKYVNFLYLASHYEKLKGSPEDNEQKQLFVEQHKHYLDEIIEQISEFSKRVILADANLDKVLSAYNKHRDKPIREQAENIIHLFTLTNLGAPAAFKYFDTTIDRKRYTSTKEVLDATLIHQSITGLYETRIDLSQLGGDGGGGGGSSEAAAKGGTLGIEDEYRLHETSTEPDVSLGSTWLSDFPQAWAETGGMGLAVRQAPLIIPLKATSTPVSIQQYPMSHEARLGIKPHIQRLLDQGILVPCQSPWNTPLLPVKKPGTNDYRPVQDLREVNKRVEDIHPTVPNPYNLLSGLPPSHQWYTVLDLKDAFFCLRLHPTSQPLFAFEWRDPGMGISGQLTWTRLPQGFKNSPTLFNEALHRDLADFRIQHPDLILLQYVDDILLAATSELDCQQGTRALLQTLGDLGYRASAKKAQICQKQVKYLGYLLREGQRWLTEARKETVMGQPVPKTPRQLREFLGTAGFCRLWIPGFAEMAAPLYPLTKPGTLFSWGPDQQKAYQEIKQALLTAPALGLPDLTKPFELFVDEKQGYAKGVLTQKLGPWRRPVAYLSKKLDPVAAGWPPCLRMVAAIAVLTKDAGKLTMGQPLVILAPHAVEALVKQPPDRWLSNARMTHYQAMLLDTDRVQFGPVVALNPATLLPLPEEGAPHDCLEILAETHGTRPDLTDQPIPDADHTWYTDGSSFLQEGQRKAGAAVTTETEVIWAGALPAGTSAQRAELIALTQALKMAEGKRLNVYTDSRYAFATAHIHGEIYRRRGWLTSEGREIKNKSEILALLKALFLPKRLSIIHCLGHQKGDSAEARGNRLADQAAREAAIKTPPDTSTLLAGKRTADGSEFEKRTADGSEFESPKKKAKVE

SEQ ID NO: 2197 - protein, 2096 aa, synthetic construct
MPAAKRVKLDGGDKKYSIGLDIGTNSVGWAVITDEYKVPSKKFKVLGNTDRHSIKKNLIGALLFDSGETAEATRLKRTARRRYTRRKNRICYLQEIFSNEMAKVDDSFFHRLEESFLVEEDKKHERHPIFGNIVDEVAYHEKYPTIYHLRKKLVDSTDKADLRLIYLALAHMIKFRGHFLIEGDLNPDNSDVDKLFIQLVQTYNQLFEENPINASGVDAKAILSARLSKSRRLENLIAQLPGEKKNGLFGNLIALSLGLTPNFKSNFDLAEDAKLQLSKDTYDDDLDNLLAQIGDQYADLFLAAKNLSDAILLSDILRVNTEITKAPLSASMIKRYDEHHQDLTLLKALVRQQLPEKYKEIFFDQSKNGYAGYIDGGASQEEFYKFIKPILEKMDGTEELLVKLNREDLLRKQRTFDNGSIPHQIHLGELHAILRRQEDFYPFLKDNREKIEKILTFRIPYYVGPLARGNSRFAWMTRKSEETITPWNFEEVVDKGASAQSFIERMTNFDKNLPNEKVLPKHSLLYEYFTVYNELTKVKYVTEGMRKPAFLSGEQKKAIVDLLFKTNRKVTVKQLKEDYFKKIECFDSVEISGVEDRFNASLGTYHDLLKIIKDKDFLDNEENEDILEDIVLTLTLFEDREMIEERLKTYAHLFDDKVMKQLKRRRYTGWGRLSRKLINGIRDKQSGKTILDFLKSDGFANRNFMQLIHDDSLTFKEDIQKAQVSGQGDSLHEHIANLAGSPAIKKGILQTVKVVDELVKVMGRHKPENIVIEMARENQTTQKGQKNSRERMKRIEEGIKELGSQILKEHPVENTQLQNEKLYLYYLQNGRDMYVDQELDINRLSDYDVDHIVPQSFLKDDSIDNKVLTRSDKARGKSDNVPSEEVVKKMKNYWRQLLNAKLITQRKFDNLTKAERGGLSELDKAGFIKRQLVETRQITKHVAQILDSRMNTKYDENDKLIREVKVITLKSKLVSDFRKDFQFYKVREINNYHHAHDAYLNAVVGTALIKKYPKLESEFVYGDYKVYDVRKMIAKSEQEIGKATAKYFFYSNIMNFFKTEITLANGEIRKRPLIETNGETGEIVWDKGRDFATVRKVLSMPQVNIVKKTEVQTGGFSKESILPKRNSDKLIARKKDWDPKKYGGFDSPTVAYSVLVVAKVEKGKSKKLKSVKELLGITIMERSSFEKNPIDFLEAKGYKEVKKDLIIKLPKYSLFELENGRKRMLASAGELQKGNELALPSKYVNFLYLASHYEKLKGSPEDNEQKQLFVEQHKHYLDEIIEQISEFSKRVILADANLDKVLSAYNKHRDKPIREQAENIIHLFTLTNLGAPAAFKYFDTTIDRKRYTSTKEVLDATLIHQSITGLYETRIDLSQLGGDGGPAPEAAAKGGGGGTLGIEDEYRLHETSTEPDVSLGSTWLSDFPQAWAETGGMGLAVRQAPLIIPLKATSTPVSIQQYPMSHEARLGIKPHIQRLLDQGILVPCQSPWNTPLLPVKKPGTNDYRPVQDLREVNKRVEDIHPTVPNPYNLLSGLPPSHQWYTVLDLKDAFFCLRLHPTSQPLFAFEWRDPGMGISGQLTWTRLPQGFKNSPTLFNEALHRDLADFRIQHPDLILLQYVDDILLAATSELDCQQGTRALLQTLGDLGYRASAKKAQICQKQVKYLGYLLREGQRWLTEARKETVMGQPVPKTPRQLREFLGTAGFCRLWIPGFAEMAAPLYPLTKPGTLFSWGPDQQKAYQEIKQALLTAPALGLPDLTKPFELFVDEKQGYAKGVLTQKLGPWRRPVAYLSKKLDPVAAGWPPCLRMVAAIAVLTKDAGKLTMGQPLVILAPHAVEALVKQPPDRWLSNARMTHYQAMLLDTDRVQFGPVVALNPATLLPLPEEGAPHDCLEILAETHGTRPDLTDQPIPDADHTWYTDGSSFLQEGQRKAGAAVTTETEVIWAGALPAGTSAQRAELIALTQALKMAEGKRLNVYTDSRYAFATAHIHGEIYRRRGWLTSEGREIKNKSEILALLKALFLPKRLSIIHCLGHQKGDSAEARGNRLADQAAREAAIKTPPDTSTLLAGKRTADGSEFEKRTADGSEFESPKKKAKVE

SEQ ID NO: 2198 - protein, 2090 aa, synthetic construct
MPAAKRVKLDGGDKKYSIGLDIGTNSVGWAVITDEYKVPSKKFKVLGNTDRHSIKKNLIGALLFDSGETAEATRLKRTARRRYTRRKNRICYLQEIFSNEMAKVDDSFFHRLEESFLVEEDKKHERHPIFGNIVDEVAYHEKYPTIYHLRKKLVDSTDKADLRLIYLALAHMIKFRGHFLIEGDLNPDNSDVDKLFIQLVQTYNQLFEENPINASGVDAKAILSARLSKSRRLENLIAQLPGEKKNGLFGNLIALSLGLTPNFKSNFDLAEDAKLQLSKDTYDDDLDNLLAQIGDQYADLFLAAKNLSDAILLSDILRVNTEITKAPLSASMIKRYDEHHQDLTLLKALVRQQLPEKYKEIFFDQSKNGYAGYIDGGASQEEFYKFIKPILEKMDGTEELLVKLNREDLLRKQRTFDNGSIPHQIHLGELHAILRRQEDFYPFLKDNREKIEKILTFRIPYYVGPLARGNSRFAWMTRKSEETITPWNFEEVVDKGASAQSFIERMTNFDKNLPNEKVLPKHSLLYEYFTVYNELTKVKYVTEGMRKPAFLSGEQKKAIVDLLFKTNRKVTVKQLKEDYFKKIECFDSVEISGVEDRFNASLGTYHDLLKIIKDKDFLDNEENEDILEDIVLTLTLFEDREMIEERLKTYAHLFDDKVMKQLKRRRYTGWGRLSRKLINGIRDKQSGKTILDFLKSDGFANRNFMQLIHDDSLTFKEDIQKAQVSGQGDSLHEHIANLAGSPAIKKGILQTVKVVDELVKVMGRHKPENIVIEMARENQTTQKGQKNSRERMKRIEEGIKELGSQILKEHPVENTQLQNEKLYLYYLQNGRDMYVDQELDINRLSDYDVDHIVPQSFLKDDSIDNKVLTRSDKARGKSDNVPSEEVVKKMKNYWRQLLNAKLITQRKFDNLTKAERGGLSELDKAGFIKRQLVETRQITKHVAQILDSRMNTKYDENDKLIREVKVITLKSKLVSDFRKDFQFYKVREINNYHHAHDAYLNAVVGTALIKKYPKLESEFVYGDYKVYDVRKMIAKSEQEIGKATAKYFFYSNIMNFFKTEITLANGEIRKRPLIETNGETGEIVWDKGRDFATVRKVLSMPQVNIVKKTEVQTGGFSKESILPKRNSDKLIARKKDWDPKKYGGFDSPTVAYSVLVVAKVEKGKSKKLKSVKELLGITIMERSSFEKNPIDFLEAKGYKEVKKDLIIKLPKYSLFELENGRKRMLASAGELQKGNELALPSKYVNFLYLASHYEKLKGSPEDNEQKQLFVEQHKHYLDEIIEQISEFSKRVILADANLDKVLSAYNKHRDKPIREQAENIIHLFTLTNLGAPAAFKYFDTTIDRKRYTSTKEVLDATLIHQSITGLYETRIDLSQLGGDGGEAAAKGGTLGIEDEYRLHETSTEPDVSLGSTWLSDFPQAWAETGGMGLAVRQAPLIIPLKATSTPVSIQQYPMSHEARLGIKPHIQRLLDQGILVPCQSPWNTPLLPVKKPGTNDYRPVQDLREVNKRVEDIHPTVPNPYNLLSGLPPSHQWYTVLDLKDAFFCLRLHPTSQPLFAFEWRDPGMGISGQLTWTRLPQGFKNSPTLFNEALHRDLADFRIQHPDLILLQYVDDILLAATSELDCQQGTRALLQTLGDLGYRASAKKAQICQKQVKYLGYLLREGQRWLTEARKETVMGQPVPKTPRQLREFLGTAGFCRLWIPGFAEMAAPLYPLTKPGTLFSWGPDQQKAYQEIKQALLTAPALGLPDLTKPFELFVDEKQGYAKGVLTQKLGPWRRPVAYLSKKLDPVAAGWPPCLRMVAAIAVLTKDAGKLTMGQPLVILAPHAVEALVKQPPDRWLSNARMTHYQAMLLDTDRVQFGPVVALNPATLLPLPEEGAPHDCLEILAETHGTRPDLTDQPIPDADHTWYTDGSSFLQEGQRKAGAAVTTETEVIWAGALPAGTSAQRAELIALTQALKMAEGKRLNVYTDSRYAFATAHIHGEIYRRRGWLTSEGREIKNKSEILALLKALFLPKRLSIIHCLGHQKGDSAEARGNRLADQAAREAAIKTPPDTSTLLAGKRTADGSEFEKRTADGSEFESPKKKAKVE

SEQ ID NO: 2199 - protein, 2096 aa, synthetic construct
MPAAKRVKLDGGDKKYSIGLDIGTNSVGWAVITDEYKVPSKKFKVLGNTDRHSIKKNLIGALLFDSGETAEATRLKRTARRRYTRRKNRICYLQEIFSNEMAKVDDSFFHRLEESFLVEEDKKHERHPIFGNIVDEVAYHEKYPTIYHLRKKLVDSTDKADLRLIYLALAHMIKFRGHFLIEGDLNPDNSDVDKLFIQLVQTYNQLFEENPINASGVDAKAILSARLSKSRRLENLIAQLPGEKKNGLFGNLIALSLGLTPNFKSNFDLAEDAKLQLSKDTYDDDLDNLLAQIGDQYADLFLAAKNLSDAILLSDILRVNTEITKAPLSASMIKRYDEHHQDLTLLKALVRQQLPEKYKEIFFDQSKNGYAGYIDGGASQEEFYKFIKPILEKMDGTEELLVKLNREDLLRKQRTFDNGSIPHQIHLGELHAILRRQEDFYPFLKDNREKIEKILTFRIPYYVGPLARGNSRFAWMTRKSEETITPWNFEEVVDKGASAQSFIERMTNFDKNLPNEKVLPKHSLLYEYFTVYNELTKVKYVTEGMRKPAFLSGEQKKAIVDLLFKTNRKVTVKQLKEDYFKKIECFDSVEISGVEDRFNASLGTYHDLLKIIKDKDFLDNEENEDILEDIVLTLTLFEDREMIEERLKTYAHLFDDKVMKQLKRRRYTGWGRLSRKLINGIRDKQSGKTILDFLKSDGFANRNFMQLIHDDSLTFKEDIQKAQVSGQGDSLHEHIANLAGSPAIKKGILQTVKVVDELVKVMGRHKPENIVIEMARENQTTQKGQKNSRERMKRIEEGIKELGSQILKEHPVENTQLQNEKLYLYYLQNGRDMYVDQELDINRLSDYDVDHIVPQSFLKDDSIDNKVLTRSDKARGKSDNVPSEEVVKKMKNYWRQLLNAKLITQRKFDNLTKAERGGLSELDKAGFIKRQLVETRQITKHVAQILDSRMNTKYDENDKLIREVKVITLKSKLVSDFRKDFQFYKVREINNYHHAHDAYLNAVVGTALIKKYPKLESEFVYGDYKVYDVRKMIAKSEQEIGKATAKYFFYSNIMNFFKTEITLANGEIRKRPLIETNGETGEIVWDKGRDFATVRKVLSMPQVNIVKKTEVQTGGFSKESILPKRNSDKLIARKKDWDPKKYGGFDSPTVAYSVLVVAKVEKGKSKKLKSVKELLGITIMERSSFEKNPIDFLEAKGYKEVKKDLIIKLPKYSLFELENGRKRMLASAGELQKGNELALPSKYVNFLYLASHYEKLKGSPEDNEQKQLFVEQHKHYLDEIIEQISEFSKRVILADANLDKVLSAYNKHRDKPIREQAENIIHLFTLTNLGAPAAFKYFDTTIDRKRYTSTKEVLDATLIHQSITGLYETRIDLSQLGGDGGGGSEAAAKGSSGGTLGIEDEYRLHETSTEPDVSLGSTWLSDFPQAWAETGGMGLAVRQAPLIIPLKATSTPVSIQQYPMSHEARLGIKPHIQRLLDQGILVPCQSPWNTPLLPVKKPGTNDYRPVQDLREVNKRVEDIHPTVPNPYNLLSGLPPSHQWYTVLDLKDAFFCLRLHPTSQPLFAFEWRDPGMGISGQLTWTRLPQGFKNSPTLFNEALHRDLADFRIQHPDLILLQYVDDILLAATSELDCQQGTRALLQTLGDLGYRASAKKAQICQKQVKYLGYLLREGQRWLTEARKETVMGQPVPKTPRQLREFLGTAGFCRLWIPGFAEMAAPLYPLTKPGTLFSWGPDQQKAYQEIKQALLTAPALGLPDLTKPFELFVDEKQGYAKGVLTQKLGPWRRPVAYLSKKLDPVAAGWPPCLRMVAAIAVLTKDAGKLTMGQPLVILAPHAVEALVKQPPDRWLSNARMTHYQAMLLDTDRVQFGPVVALNPATLLPLPEEGAPHDCLEILAETHGTRPDLTDQPIPDADHTWYTDGSSFLQEGQRKAGAAVTTETEVIWAGALPAGTSAQRAELIALTQALKMAEGKRLNVYTDSRYAFATAHIHGEIYRRRGWLTSEGREIKNKSEILALLKALFLPKRLSIIHCLGHQKGDSAEARGNRLADQAAREAAIKTPPDTSTLLAGKRTADGSEFEKRTADGSEFESPKKKAKVE

SEQ ID NO: 2200 - protein, 2096 aa, synthetic construct
MPAAKRVKLDGGDKKYSIGLDIGTNSVGWAVITDEYKVPSKKFKVLGNTDRHSIKKNLIGALLFDSGETAEATRLKRTARRRYTRRKNRICYLQEIFSNEMAKVDDSFFHRLEESFLVEEDKKHERHPIFGNIVDEVAYHEKYPTIYHLRKKLVDSTDKADLRLIYLALAHMIKFRGHFLIEGDLNPDNSDVDKLFIQLVQTYNQLFEENPINASGVDAKAILSARLSKSRRLENLIAQLPGEKKNGLFGNLIALSLGLTPNFKSNFDLAEDAKLQLSKDTYDDDLDNLLAQIGDQYADLFLAAKNLSDAILLSDILRVNTEITKAPLSASMIKRYDEHHQDLTLLKALVRQQLPEKYKEIFFDQSKNGYAGYIDGGASQEEFYKFIKPILEKMDGTEELLVKLNREDLLRKQRTFDNGSIPHQIHLGELHAILRRQEDFYPFLKDNREKIEKILTFRIPYYVGPLARGNSRFAWMTRKSEETITPWNFEEVVDKGASAQSFIERMTNFDKNLPNEKVLPKHSLLYEYFTVYNELTKVKYVTEGMRKPAFLSGEQKKAIVDLLFKTNRKVTVKQLKEDYFKKIECFDSVEISGVEDRFNASLGTYHDLLKIIKDKDFLDNEENEDILEDIVLTLTLFEDREMIEERLKTYAHLFDDKVMKQLKRRRYTGWGRLSRKLINGIRDKQSGKTILDFLKSDGFANRNFMQLIHDDSLTFKEDIQKAQVSGQGDSLHEHIANLAGSPAIKKGILQTVKVVDELVKVMGRHKPENIVIEMARENQTTQKGQKNSRERMKRIEEGIKELGSQILKEHPVENTQLQNEKLYLYYLQNGRDMYVDQELDINRLSDYDVDHIVPQSFLKDDSIDNKVLTRSDKARGKSDNVPSEEVVKKMKNYWRQLLNAKLITQRKFDNLTKAERGGLSELDKAGFIKRQLVETRQITKHVAQILDSRMNTKYDENDKLIREVKVITLKSKLVSDFRKDFQFYKVREINNYHHAHDAYLNAVVGTALIKKYPKLESEFVYGDYKVYDVRKMIAKSEQEIGKATAKYFFYSNIMNFFKTEITLANGEIRKRPLIETNGETGEIVWDKGRDFATVRKVLSMPQVNIVKKTEVQTGGFSKESILPKRNSDKLIARKKDWDPKKYGGFDSPTVAYSVLVVAKVEKGKSKKLKSVKELLGITIMERSSFEKNPIDFLEAKGYKEVKKDLIIKLPKYSLFELENGRKRMLASAGELQKGNELALPSKYVNFLYLASHYEKLKGSPEDNEQKQLFVEQHKHYLDEIIEQISEFSKRVILADANLDKVLSAYNKHRDKPIREQAENIIHLFTLTNLGAPAAFKYFDTTIDRKRYTSTKEVLDATLIHQSITGLYETRIDLSQLGGDGGEAAAKGGSGSSGGTLGIEDEYRLHETSTEPDVSLGSTWLSDFPQAWAETGGMGLAVRQAPLIIPLKATSTPVSIQQYPMSHEARLGIKPHIQRLLDQGILVPCQSPWNTPLLPVKKPGTNDYRPVQDLREVNKRVEDIHPTVPNPYNLLSGLPPSHQWYTVLDLKDAFFCLRLHPTSQPLFAFEWRDPGMGISGQLTWTRLPQGFKNSPTLFNEALHRDLADFRIQHPDLILLQYVDDILLAATSELDCQQGTRALLQTLGDLGYRASAKKAQICQKQVKYLGYLLREGQRWLTEARKETVMGQPVPKTPRQLREFLGTAGFCRLWIPGFAEMAAPLYPLTKPGTLFSWGPDQQKAYQEIKQALLTAPALGLPDLTKPFELFVDEKQGYAKGVLTQKLGPWRRPVAYLSKKLDPVAAGWPPCLRMVAAIAVLTKDAGKLTMGQPLVILAPHAVEALVKQPPDRWLSNARMTHYQAMLLDTDRVQFGPVVALNPATLLPLPEEGAPHDCLEILAETHGTRPDLTDQPIPDADHTWYTDGSSFLQEGQRKAGAAVTTETEVIWAGALPAGTSAQRAELIALTQALKMAEGKRLNVYTDSRYAFATAHIHGEIYRRRGWLTSEGREIKNKSEILALLKALFLPKRLSIIHCLGHQKGDSAEARGNRLADQAAREAAIKTPPDTSTLLAGKRTADGSEFEKRTADGSEFESPKKKAKVE

SEQ ID NO: 2201 - protein, 2096 aa, synthetic construct; identical to SEQ ID NO: 2071

SEQ ID NO: 2202 - protein, 2096 aa, synthetic construct; identical to SEQ ID NO: 2075

SEQ ID NO: 2203 - protein, 2091 aa, synthetic construct
MPAAKRVKLDGGDKKYSIGLDIGTNSVGWAVITDEYKVPSKKFKVLGNTDRHSIKKNLIGALLFDSGETAEATRLKRTARRRYTRRKNRICYLQEIFSNEMAKVDDSFFHRLEESFLVEEDKKHERHPIFGNIVDEVAYHEKYPTIYHLRKKLVDSTDKADLRLIYLALAHMIKFRGHFLIEGDLNPDNSDVDKLFIQLVQTYNQLFEENPINASGVDAKAILSARLSKSRRLENLIAQLPGEKKNGLFGNLIALSLGLTPNFKSNFDLAEDAKLQLSKDTYDDDLDNLLAQIGDQYADLFLAAKNLSDAILLSDILRVNTEITKAPLSASMIKRYDEHHQDLTLLKALVRQQLPEKYKEIFFDQSKNGYAGYIDGGASQEEFYKFIKPILEKMDGTEELLVKLNREDLLRKQRTFDNGSIPHQIHLGELHAILRRQEDFYPFLKDNREKIEKILTFRIPYYVGPLARGNSRFAWMTRKSEETITPWNFEEVVDKGASAQSFIERMTNFDKNLPNEKVLPKHSLLYEYFTVYNELTKVKYVTEGMRKPAFLSGEQKKAIVDLLFKTNRKVTVKQLKEDYFKKIECFDSVEISGVEDRFNASLGTYHDLLKIIKDKDFLDNEENEDILEDIVLTLTLFEDREMIEERLKTYAHLFDDKVMKQLKRRRYTGWGRLSRKLINGIRDKQSGKTILDFLKSDGFANRNFMQLIHDDSLTFKEDIQKAQVSGQGDSLHEHIANLAGSPAIKKGILQTVKVVDELVKVMGRHKPENIVIEMARENQTTQKGQKNSRERMKRIEEGIKELGSQILKEHPVENTQLQNEKLYLYYLQNGRDMYVDQELDINRLSDYDVDHIVPQSFLKDDSIDNKVLTRSDKARGKSDNVPSEEVVKKMKNYWRQLLNAKLITQRKFDNLTKAERGGLSELDKAGFIKRQLVETRQITKHVAQILDSRMNTKYDENDKLIREVKVITLKSKLVSDFRKDFQFYKVREINNYHHAHDAYLNAVVGTALIKKYPKLESEFVYGDYKVYDVRKMIAKSEQEIGKATAKYFFYSNIMNFFKTEITLANGEIRKRPLIETNGETGEIVWDKGRDFATVRKVLSMPQVNIVKKTEVQTGGFSKESILPKRNSDKLIARKKDWDPKKYGGFDSPTVAYSVLVVAKVEKGKSKKLKSVKELLGITIMERSSFEKNPIDFLEAKGYKEVKKDLIIKLPKYSLFELENGRKRMLASAGELQKGNELALPSKYVNFLYLASHYEKLKGSPEDNEQKQLFVEQHKHYLDEIIEQISEFSKRVILADANLDKVLSAYNKHRDKPIREQAENIIHLFTLTNLGAPAAFKYFDTTIDRKRYTSTKEVLDATLIHQSITGLYETRIDLSQLGGDGGGSSGGGGGTLGIEDEYRLHETSTEPDVSLGSTWLSDFPQAWAETGGMGLAVRQAPLIIPLKATSTPVSIQQYPMSHEARLGIKPHIQRLLDQGILVPCQSPWNTPLLPVKKPGTNDYRPVQDLREVNKRVEDIHPTVPNPYNLLSGLPPSHQWYTVLDLKDAFFCLRLHPTSQPLFAFEWRDPGMGISGQLTWTRLPQGFKNSPTLFNEALHRDLADFRIQHPDLILLQYVDDILLAATSELDCQQGTRALLQTLGDLGYRASAKKAQICQKQVKYLGYLLREGQRWLTEARKETVMGQPVPKTPRQLREFLGTAGFCRLWIPGFAEMAAPLYPLTKPGTLFSWGPDQQKAYQEIKQALLTAPALGLPDLTKPFELFVDEKQGYAKGVLTQKLGPWRRPVAYLSKKLDPVAAGWPPCLRMVAAIAVLTKDAGKLTMGQPLVILAPHAVEALVKQPPDRWLSNARMTHYQAMLLDTDRVQFGPVVALNPATLLPLPEEGAPHDCLEILAETHGTRPDLTDQPIPDADHTWYTDGSSFLQEGQRKAGAAVTTETEVIWAGALPAGTSAQRAELIALTQALKMAEGKRLNVYTDSRYAFATAHIHGEIYRRRGWLTSEGREIKNKSEILALLKALFLPKRLSIIHCLGHQKGDSAEARGNRLADQAAREAAIKTPPDTSTLLAGKRTADGSEFEKRTADGSEFESPKKKAKVE

SEQ ID NO: 2204 - protein, 2098 aa, synthetic construct
MPAAKRVKLDGGDKKYSIGLDIGTNSVGWAVITDEYKVPSKKFKVLGNTDRHSIKKNLIGALLFDSGETAEATRLKRTARRRYTRRKNRICYLQEIFSNEMAKVDDSFFHRLEESFLVEEDKKHERHPIFGNIVDEVAYHEKYPTIYHLRKKLVDSTDKADLRLIYLALAHMIKFRGHFLIEGDLNPDNSDVDKLFIQLVQTYNQLFEENPINASGVDAKAILSARLSKSRRLENLIAQLPGEKKNGLFGNLIALSLGLTPNFKSNFDLAEDAKLQLSKDTYDDDLDNLLAQIGDQYADLFLAAKNLSDAILLSDILRVNTEITKAPLSASMIKRYDEHHQDLTLLKALVRQQLPEKYKEIFFDQSKNGYAGYIDGGASQEEFYKFIKPILEKMDGTEELLVKLNREDLLRKQRTFDNGSIPHQIHLGELHAILRRQEDFYPFLKDNREKIEKILTFRIPYYVGPLARGNSRFAWMTRKSEETITPWNFEEVVDKGASAQSFIERMTNFDKNLPNEKVLPKHSLLYEYFTVYNELTKVKYVTEGMRKPAFLSGEQKKAIVDLLFKTNRKVTVKQLKEDYFKKIECFDSVEISGVEDRFNASLGTYHDLLKIIKDKDFLDNEENEDILEDIVLTLTLFEDREMIEERLKTYAHLFDDKVMKQLKRRRYTGWGRLSRKLINGIRDKQSGKTILDFLKSDGFANRNFMQLIHDDSLTFKEDIQKAQVSGQGDSLHEHIANLAGSPAIKKGILQTVKVVDELVKVMGRHKPENIVIEMARENQTTQKGQKNSRERMKRIEEGIKELGSQILKEHPVENTQLQNEKLYLYYLQNGRDMYVDQELDINRLSDYDVDHIVPQSFLKDDSIDNKVLTRSDKARGKSDNVPSEEVVKKMKNYWRQLLNAKLITQRKFDNLTKAERGGLSELDKAGFIKRQLVETRQITKHVAQILDSRMNTKYDENDKLIREVKVITLKSKLVSDFRKDFQFYKVREINNYHHAHDAYLNAVVGTALIKKYPKLESEFVYGDYKVYDVRKMIAKSEQEIGKATAKYFFYSNIMNFFKTEITLANGEIRKRPLIETNGETGEIVWDKGRDFATVRKVLSMPQVNIVKKTEVQTGGFSKESILPKRNSDKLIARKKDWDPKKYGGFDSPTVAYSVLVVAKVEKGKSKKLKSVKELLGITIMERSSFEKNPIDFLEAKGYKEVKKDLIIKLPKYSLFELENGRKRMLASAGELQKGNELALPSKYVNFLYLASHYEKLKGSPEDNEQKQLFVEQHKHYLDEIIEQISEFSKRVILADANLDKVLSAYNKHRDKPIREQAENIIHLFTLTNLGAPAAFKYFDTTIDRKRYTSTKEVLDATLIHQSITGLYETRIDLSQLGGDGGPAPAPAPAPAPAPGGTLGIEDEYRLHETSTEPDVSLGSTWLSDFPQAWAETGGMGLAVRQAPLIIPLKATSTPVSIQQYPMSHEARLGIKPHIQRLLDQGILVPCQSPWNTPLLPVKKPGTNDYRPVQDLREVNKRVEDIHPTVPNPYNLLSGLPPSHQWYTVLDLKDAFFCLRLHPTSQPLFAFEWRDPGMGISGQLTWTRLPQGFKNSPTLFNEALHRDLADFRIQHPDLILLQYVDDILLAATSELDCQQGTRALLQTLGDLGYRASAKKAQICQKQVKYLGYLLREGQRWLTEARKETVMGQPVPKTPRQLREFLGTAGFCRLWIPGFAEMAAPLYPLTKPGTLFSWGPDQQKAYQEIKQALLTAPALGLPDLTKPFELFVDEKQGYAKGVLTQKLGPWRRPVAYLSKKLDPVAAGWPPCLRMVAAIAVLTKDAGKLTMGQPLVILAPHAVEALVKQPPDRWLSNARMTHYQAMLLDTDRVQFGPVVALNPATLLPLPEEGAPHDCLEILAETHGTRPDLTDQPIPDADHTWYTDGSSFLQEGQRKAGAAVTTETEVIWAGALPAGTSAQRAELIALTQALKMAEGKRLNVYTDSRYAFATAHIHGEIYRRRGWLTSEGREIKNKSEILALLKALFLPKRLSIIHCLGHQKGDSAEARGNRLADQAAREAAIKTPPDTSTLLAGKRTADGSEFEKRTADGSEFESPKKKAKVE

SEQ ID NO: 2205 - protein, 2094 aa, synthetic construct
MPAAKRVKLDGGDKKYSIGLDIGTNSVGWAVITDEYKVPSKKFKVLGNTDRHSIKKNLIGALLFDSGETAEATRLKRTARRRYTRRKNRICYLQEIFSNEMAKVDDSFFHRLEESFLVEEDKKHERHPIFGNIVDEVAYHEKYPTIYHLRKKLVDSTDKADLRLIYLALAHMIKFRGHFLIEGDLNPDNSDVDKLFIQLVQTYNQLFEENPINASGVDAKAILSARLSKSRRLENLIAQLPGEKKNGLFGNLIALSLGLTPNFKSNFDLAEDAKLQLSKDTYDDDLDNLLAQIGDQYADLFLAAKNLSDAILLSDILRVNTEITKAPLSASMIKRYDEHHQDLTLLKALVRQQLPEKYKEIFFDQSKNGYAGYIDGGASQEEFYKFIKPILEKMDGTEELLVKLNREDLLRKQRTFDNGSIPHQIHLGELHAILRRQEDFYPFLKDNREKIEKILTFRIPYYVGPLARGNSRFAWMTRKSEETITPWNFEEVVDKGASAQSFIERMTNFDKNLPNEKVLPKHSLLYEYFTVYNELTKVKYVTEGMRKPAFLSGEQKKAIVDLLFKTNRKVTVKQLKEDYFKKIECFDSVEISGVEDRFNASLGTYHDLLKIIKDKDFLDNEENEDILEDIVLTLTLFEDREMIEERLKTYAHLFDDKVMKQLKRRRYTGWGRLSRKLINGIRDKQSGKTILDFLKSDGFANRNFMQLIHDDSLTFKEDIQKAQVSGQGDSLHEHIANLAGSPAIKKGILQTVKVVDELVKVMGRHKPENIVIEMARENQTTQKGQKNSRERMKRIEEGIKELGSQILKEHPVENTQLQNEKLYLYYLQNGRDMYVDQELDINRLSDYDVDHIVPQSFLKDDSIDNKVLTRSDKARGKSDNVPSEEVVKKMKNYWRQLLNAKLITQRKFDNLTKAERGGLSELDKAGFIKRQLVETRQITKHVAQILDSRMNTKYDENDKLIREVKVITLKSKLVSDFRKDFQFYKVREINNYHHAHDAYLNAVVGTALIKKYPKLESEFVYGDYKVYDVRKMIAKSEQEIGKATAKYFFYSNIMNFFKTEITLANGEIRKRPLIETNGETGEIVWDKGRDFATVRKVLSMPQVNIVKKTEVQTGGFSKESILPKRNSDKLIARKKDWDPKKYGGFDSPTVAYSVLVVAKVEKGKSKKLKSVKELLGITIMERSSFEKNPIDFLEAKGYKEVKKDLIIKLPKYSLFELENGRKRMLASAGELQKGNELALPSKYVNFLYLASHYEKLKGSPEDNEQKQLFVEQHKHYLDEIIEQISEFSKRVILADANLDKVLSAYNKHRDKPIREQAENIIHLFTLTNLGAPAAFKYFDTTIDRKRYTSTKEVLDATLIHQSITGLYETRIDLSQLGGDGGGGSGSSGGGGGTLGIEDEYRLHETSTEPDVSLGSTWLSDFPQAWAETGGMGLAVRQAPLIIPLKATSTPVSIQQYPMSHEARLGIKPHIQRLLDQGILVPCQSPWNTPLLPVKKPGTNDYRPVQDLREVNKRVEDIHPTVPNPYNLLSGLPPSHQWYTVLDLKDAFFCLRLHPTSQPLFAFEWRDPGMGISGQLTWTRLPQGFKNSPTLFNEALHRDLADFRIQHPDLILLQYVDDILLAATSELDCQQGTRALLQTLGDLGYRASAKKAQICQKQVKYLGYLLREGQRWLTEARKETVMGQPVPKTPRQLREFLGTAGFCRLWIPGFAEMAAPLYPLTKPGTLFSWGPDQQKAYQEIKQALLTAPALGLPDLTKPFELFVDEKQGYAKGVLTQKLGPWRRPVAYLSKKLDPVAAGWPPCLRMVAAIAVLTKDAGKLTMGQPLVILAPHAVEALVKQPPDRWLSNARMTHYQAMLLDTDRVQFGPVVALNPATLLPLPEEGAPHDCLEILAETHGTRPDLTDQPIPDADHTWYTDGSSFLQEGQRKAGAAVTTETEVIWAGALPAGTSAQRAELIALTQALKMAEGKRLNVYTDSRYAFATAHIHGEIYRRRGWLTSEGREIKNKSEILALLKALFLPKRLSIIHCLGHQKGDSAEARGNRLADQAAREAAIKTPPDTSTLLAGKRTADGSEFEKRTADGSEFESPKKKAKVE

SEQ ID NO: 2206 - protein, 2093 aa, synthetic construct
MPAAKRVKLDGGDKKYSIGLDIGTNSVGWAVITDEYKVPSKKFKVLGNTDRHSIKKNLIGALLFDSGETAEATRLKRTARRRYTRRKNRICYLQEIFSNEMAKVDDSFFHRLEESFLVEEDKKHERHPIFGNIVDEVAYHEKYPTIYHLRKKLVDSTDKADLRLIYLALAHMIKFRGHFLIEGDLNPDNSDVDKLFIQLVQTYNQLFEENPINASGVDAKAILSARLSKSRRLENLIAQLPGEKKNGLFGNLIALSLGLTPNFKSNFDLAEDAKLQLSKDTYDDDLDNLLAQIGDQYADLFLAAKNLSDAILLSDILRVNTEITKAPLSASMIKRYDEHHQDLTLLKALVRQQLPEKYKEIFFDQSKNGYAGYIDGGASQEEFYKFIKPILEKMDGTEELLVKLNREDLLRKQRTFDNGSIPHQIHLGELHAILRRQEDFYPFLKDNREKIEKILTFRIPYYVGPLARGNSRFAWMTRKSEETITPWNFEEVVDKGASAQSFIERMTNFDKNLPNEKVLPKHSLLYEYFTVYNELTKVKYVTEGMRKPAFLSGEQKKAIVDLLFKTNRKVTVKQLKEDYFKKIECFDSVEISGVEDRFNASLGTYHDLLKIIKDKDFLDNEENEDILEDIVLTLTLFEDREMIEERLKTYAHLFDDKVMKQLKRRRYTGWGRLSRKLINGIRDKQSGKTILDFLKSDGFANRNFMQLIHDDSLTFKEDIQKAQVSGQGDSLHEHIANLAGSPAIKKGILQTVKVVDELVKVMGRHKPENIVIEMARENQTTQKGQKNSRERMKRIEEGIKELGSQILKEHPVENTQLQNEKLYLYYLQNGRDMYVDQELDINRLSDYDVDHIVPQSFLKDDSIDNKVLTRSDKARGKSDNVPSEEVVKKMKNYWRQLLNAKLITQRKFDNLTKAERGGLSELDKAGFIKRQLVETRQITKHVAQILDSRMNTKYDENDKLIREVKVITLKSKLVSDFRKDFQFYKVREINNYHHAHDAYLNAVVGTALIKKYPKLESEFVYGDYKVYDVRKMIAKSEQEIGKATAKYFFYSNIMNFFKTEITLANGEIRKRPLIETNGETGEIVWDKGRDFATVRKVLSMPQVNIVKKTEVQTGGFSKESILPKRNSDKLIARKKDWDPKKYGGFDSPTVAYSVLVVAKVEKGKSKKLKSVKELLGITIMERSSFEKNPIDFLEAKGYKEVKKDLIIKLPKYSLFELENGRKRMLASAGELQKGNELALPSKYVNFLYLASHYEKLKGSPEDNEQKQLFVEQHKHYLDEIIEQISEFSKRVILADANLDKVLSAYNKHRDKPIREQAENIIHLFTLTNLGAPAAFKYFDTTIDRKRYTSTKEVLDATLIHQSITGLYETRIDLSQLGGDGGPAPEAAAKGGTLGIEDEYRLHETSTEPDVSLGSTWLSDFPQAWAETGGMGLAVRQAPLIIPLKATSTPVSIQQYPMSHEARLGIKPHIQRLLDQGILVPCQSPWNTPLLPVKKPGTNDYRPVQDLREVNKRVEDIHPTVPNPYNLLSGLPPSHQWYTVLDLKDAFFCLRLHPTSQPLFAFEWRDPGMGISGQLTWTRLPQGFKNSPTLFNEALHRDLADFRIQHPDLILLQYVDDILLAATSELDCQQGTRALLQTLGDLGYRASAKKAQICQKQVKYLGYLLREGQRWLTEARKETVMGQPVPKTPRQLREFLGTAGFCRLWIPGFAEMAAPLYPLTKPGTLFSWGPDQQKAYQEIKQALLTAPALGLPDLTKPFELFVDEKQGYAKGVLTQKLGPWRRPVAYLSKKLDPVAAGWPPCLRMVAAIAVLTKDAGKLTMGQPLVILAPHAVEALVKQPPDRWLSNARMTHYQAMLLDTDRVQFGPVVALNPATLLPLPEEGAPHDCLEILAETHGTRPDLTDQPIPDADHTWYTDGSSFLQEGQRKAGAAVTTETEVIWAGALPAGTSAQRAELIALTQALKMAEGKRLNVYTDSRYAFATAHIHGEIYRRRGWLTSEGREIKNKSEILALLKALFLPKRLSIIHCLGHQKGDSAEARGNRLADQAAREAAIKTPPDTSTLLAGKRTADGSEFEKRTADGSEFESPKKKAKVE

SEQ ID NO: 2207 - protein, 2096 aa, synthetic construct; identical to SEQ ID NO: 2074

SEQ ID NO: 2208 - protein, 2093 aa, synthetic construct
MPAAKRVKLDGGDKKYSIGLDIGTNSVGWAVITDEYKVPSKKFKVLGNTDRHSIKKNLIGALLFDSGETAEATRLKRTARRRYTRRKNRICYLQEIFSNEMAKVDDSFFHRLEESFLVEEDKKHERHPIFGNIVDEVAYHEKYPTIYHLRKKLVDSTDKADLRLIYLALAHMIKFRGHFLIEGDLNPDNSDVDKLFIQLVQTYNQLFEENPINASGVDAKAILSARLSKSRRLENLIAQLPGEKKNGLFGNLIALSLGLTPNFKSNFDLAEDAKLQLSKDTYDDDLDNLLAQIGDQYADLFLAAKNLSDAILLSDILRVNTEITKAPLSASMIKRYDEHHQDLTLLKALVRQQLPEKYKEIFFDQSKNGYAGYIDGGASQEEFYKFIKPILEKMDGTEELLVKLNREDLLRKQRTFDNGSIPHQIHLGELHAILRRQEDFYPFLKDNREKIEKILTFRIPYYVGPLARGNSRFAWMTRKSEETITPWNFEEVVDKGASAQSFIERMTNFDKNLPNEKVLPKHSLLYEYFTVYNELTKVKYVTEGMRKPAFLSGEQKKAIVDLLFKTNRKVTVKQLKEDYFKKIECFDSVEISGVEDRFNASLGTYHDLLKIIKDKDFLDNEENEDILEDIVLTLTLFEDREMIEERLKTYAHLFDDKVMKQLKRRRYTGWGRLSRKLINGIRDKQSGKTILDFLKSDGFANRNFMQLIHDDSLTFKEDIQKAQVSGQGDSLHEHIANLAGSPAIKKGILQTVKVVDELVKVMGRHKPENIVIEMARENQTTQKGQKNSRERMKRIEEGIKELGSQILKEHPVENTQLQNEKLYLYYLQNGRDMYVDQELDINRLSDYDVDHIVPQSFLKDDSIDNKVLTRSDKARGKSDNVPSEEVVKKMKNYWRQLLNAKLITQRKFDNLTKAERGGLSELDKAGFIKRQLVETRQITKHVAQILDSRMNTKYDENDKLIREVKVITLKSKLVSDFRKDFQFYKVREINNYHHAHDAYLNAVVGTALIKKYPKLESEFVYGDYKVYDVRKMIAKSEQEIGKATAKYFFYSNIMNFFKTEITLANGEIRKRPLIETNGETGEIVWDKGRDFATVRKVLSMPQVNIVKKTEVQTGGFSKESILPKRNSDKLIARKKDWDPKKYGGFDSPTVAYSVLVVAKVEKGKSKKLKSVKELLGITIMERSSFEKNPIDFLEAKGYKEVKKDLIIKLPKYSLFELENGRKRMLASAGELQKGNELALPSKYVNFLYLASHYEKLKGSPEDNEQKQLFVEQHKHYLDEIIEQISEFSKRVILADANLDKVLSAYNKHRDKPIREQAENIIHLFTLTNLGAPAAFKYFDTTIDRKRYTSTKEVLDATLIHQSITGLYETRIDLSQLGGDGGGGGEAAAKGGTLGIEDEYRLHETSTEPDVSLGSTWLSDFPQAWAETGGMGLAVRQAPLIIPLKATSTPVSIQQYPMSHEARLGIKPHIQRLLDQGILVPCQSPWNTPLLPVKKPGTNDYRPVQDLREVNKRVEDIHPTVPNPYNLLSGLPPSHQWYTVLDLKDAFFCLRLHPTSQPLFAFEWRDPGMGISGQLTWTRLPQGFKNSPTLFNEALHRDLADFRIQHPDLILLQYVDDILLAATSELDCQQGTRALLQTLGDLGYRASAKKAQICQKQVKYLGYLLREGQRWLTEARKETVMGQPVPKTPRQLREFLGTAGFCRLWIPGFAEMAAPLYPLTKPGTLFSWGPDQQKAYQEIKQALLTAPALGLPDLTKPFELFVDEKQGYAKGVLTQKLGPWRRPVAYLSKKLDPVAAGWPPCLRMVAAIAVLTKDAGKLTMGQPLVILAPHAVEALVKQPPDRWLSNARMTHYQAMLLDTDRVQFGPVVALNPATLLPLPEEGAPHDCLEILAETHGTRPDLTDQPIPDADHTWYTDGSSFLQEGQRKAGAAVTTETEVIWAGALPAGTSAQRAELIALTQALKMAEGKRLNVYTDSRYAFATAHIHGEIYRRRGWLTSEGREIKNKSEILALLKALFLPKRLSIIHCLGHQKGDSAEARGNRLADQAAREAAIKTPPDTSTLLAGKRTADGSEFEKRTADGSEFESPKKKAKVE

SEQ ID NO: 2209 - protein, 2096 aa, synthetic construct
MPAAKRVKLDGGDKKYSIGLDIGTNSVGWAVITDEYKVPSKKFKVLGNTDRHSIKKNLIGALLFDSGETAEATRLKRTARRRYTRRKNRICYLQEIFSNEMAKVDDSFFHRLEESFLVEEDKKHERHPIFGNIVDEVAYHEKYPTIYHLRKKLVDSTDKADLRLIYLALAHMIKFRGHFLIEGDLNPDNSDVDKLFIQLVQTYNQLFEENPINASGVDAKAILSARLSKSRRLENLIAQLPGEKKNGLFGNLIALSLGLTPNFKSNFDLAEDAKLQLSKDTYDDDLDNLLAQIGDQYADLFLAAKNLSDAILLSDILRVNTEITKAPLSASMIKRYDEHHQDLTLLKALVRQQLPEKYKEIFFDQSKNGYAGYIDGGASQEEFYKFIKPILEKMDGTEELLVKLNREDLLRKQRTFDNGSIPHQIHLGELHAILRRQEDFYPFLKDNREKIEKILTFRIPYYVGPLARGNSRFAWMTRKSEETITPWNFEEVVDKGASAQSFIERMTNFDKNLPNEKVLPKHSLLYEYFTVYNELTKVKYVTEGMRKPAFLSGEQKKAIVDLLFKTNRKVTVKQLKEDYFKKIECFDSVEISGVEDRFNASLGTYHDLLKIIKDKDFLDNEENEDILEDIVLTLTLFEDREMIEERLKTYAHLFDDKVMKQLKRRRYTGWGRLSRKLINGIRDKQSGKTILDFLKSDGFANRNFMQLIHDDSLTFKEDIQKAQVSGQGDSLHEHIANLAGSPAIKKGILQTVKVVDELVKVMGRHKPENIVIEMARENQTTQKGQKNSRERMKRIEEGIKELGSQILKEHPVENTQLQNEKLYLYYLQNGRDMYVDQELDINRLSDYDVDHIVPQSFLKDDSIDNKVLTRSDKARGKSDNVPSEEVVKKMKNYWRQLLNAKLITQRKFDNLTKAERGGLSELDKAGFIKRQLVETRQITKHVAQILDSRMNTKYDENDKLIREVKVITLKSKLVSDFRKDFQFYKVREINNYHHAHDAYLNAVVGTALIKKYPKLESEFVYGDYKVYDVRKMIAKSEQEIGKATAKYFFYSNIMNFFKTEITLANGEIRKRPLIETNGETGEIVWDKGRDFATVRKVLSMPQVNIVKKTEVQTGGFSKESILPKRNSDKLIARKKDWDPKKYGGFDSPTVAYSVLVVAKVEKGKSKKLKSVKELLGITIMERSSFEKNPIDFLEAKGYKEVKKDLIIKLPKYSLFELENGRKRMLASAGELQKGNELALPSKYVNFLYLASHYEKLKGSPEDNEQKQLFVEQHKHYLDEIIEQISEFSKRVILADANLDKVLSAYNKHRDKPIREQAENIIHLFTLTNLGAPAAFKYFDTTIDRKRYTSTKEVLDATLIHQSITGLYETRIDLSQLGGDGGEAAAKGGGGGSGGTLGIEDEYRLHETSTEPDVSLGSTWLSDFPQAWAETGGMGLAVRQAPLIIPLKATSTPVSIQQYPMSHEARLGIKPHIQRLLDQGILVPCQSPWNTPLLPVKKPGTNDYRPVQDLREVNKRVEDIHPTVPNPYNLLSGLPPSHQWYTVLDLKDAFFCLRLHPTSQPLFAFEWRDPGMGISGQLTWTRLPQGFKNSPTLFNEALHRDLADFRIQHPDLILLQYVDDILLAATSELDCQQGTRALLQTLGDLGYRASAKKAQICQKQVKYLGYLLREGQRWLTEARKETVMGQPVPKTPRQLREFLGTAGFCRLWIPGFAEMAAPLYPLTKPGTLFSWGPDQQKAYQEIKQALLTAPALGLPDLTKPFELFVDEKQGYAKGVLTQKLGPWRRPVAYLSKKLDPVAAGWPPCLRMVAAIAVLTKDAGKLTMGQPLVILAPHAVEALVKQPPDRWLSNARMTHYQAMLLDTDRVQFGPVVALNPATLLPLPEEGAPHDCLEILAETHGTRPDLTDQPIPDADHTWYTDGSSFLQEGQRKAGAAVTTETEVIWAGALPAGTSAQRAELIALTQALKMAEGKRLNVYTDSRYAFATAHIHGEIYRRRGWLTSEGREIKNKSEILALLKALFLPKRLSIIHCLGHQKGDSAEARGNRLADQAAREAAIKTPPDTSTLLAGKRTADGSEFEKRTADGSEFESPKKKAKVE

SEQ ID NO: 2210 - protein, 2110 aa, synthetic construct
MPAAKRVKLDGGDKKYSIGLDIGTNSVGWAVITDEYKVPSKKFKVLGNTDRHSIKKNLIGALLFDSGETAEATRLKRTARRRYTRRKNRICYLQEIFSNEMAKVDDSFFHRLEESFLVEEDKKHERHPIFGNIVDEVAYHEKYPTIYHLRKKLVDSTDKADLRLIYLALAHMIKFRGHFLIEGDLNPDNSDVDKLFIQLVQTYNQLFEENPINASGVDAKAILSARLSKSRRLENLIAQLPGEKKNGLFGNLIALSLGLTPNFKSNFDLAEDAKLQLSKDTYDDDLDNLLAQIGDQYADLFLAAKNLSDAILLSDILRVNTEITKAPLSASMIKRYDEHHQDLTLLKALVRQQLPEKYKEIFFDQSKNGYAGYIDGGASQEEFYKFIKPILEKMDGTEELLVKLNREDLLRKQRTFDNGSIPHQIHLGELHAILRRQEDFYPFLKDNREKIEKILTFRIPYYVGPLARGNSRFAWMTRKSEETITPWNFEEVVDKGASAQSFIERMTNFDKNLPNEKVLPKHSLLYEYFTVYNELTKVKYVTEGMRKPAFLSGEQKKAIVDLLFKTNRKVTVKQLKEDYFKKIECFDSVEISGVEDRFNASLGTYHDLLKIIKDKDFLDNEENEDILEDIVLTLTLFEDREMIEERLKTYAHLFDDKVMKQLKRRRYTGWGRLSRKLINGIRDKQSGKTILDFLKSDGFANRNFMQLIHDDSLTFKEDIQKAQVSGQGDSLHEHIANLAGSPAIKKGILQTVKVVDELVKVMGRHKPENIVIEMARENQTTQKGQKNSRERMKRIEEGIKELGSQILKEHPVENTQLQNEKLYLYYLQNGRDMYVDQELDINRLSDYDVDHIVPQSFLKDDSIDNKVLTRSDKARGKSDNVPSEEVVKKMKNYWRQLLNAKLITQRKFDNLTKAERGGLSELDKAGFIKRQLVETRQITKHVAQILDSRMNTKYDENDKLIREVKVITLKSKLVSDFRKDFQFYKVREINNYHHAHDAYLNAVVGTALIKKYPKLESEFVYGDYKVYDVRKMIAKSEQEIGKATAKYFFYSNIMNFFKTEITLANGEIRKRPLIETNGETGEIVWDKGRDFATVRKVLSMPQVNIVKKTEVQTGGFSKESILPKRNSDKLIARKKDWDPKKYGGFDSPTVAYSVLVVAKVEKGKSKKLKSVKELLGITIMERSSFEKNPIDFLEAKGYKEVKKDLIIKLPKYSLFELENGRKRMLASAGELQKGNELALPSKYVNFLYLASHYEKLKGSPEDNEQKQLFVEQHKHYLDEIIEQISEFSKRVILADANLDKVLSAYNKHRDKPIREQAENIIHLFTLTNLGAPAAFKYFDTTIDRKRYTSTKEVLDATLIHQSITGLYETRIDLSQLGGDGGGGGGSGGGGSGGGGSGGGGSGGGGSGGTLGIEDEYRLHETSTEPDVSLGSTWLSDFPQAWAETGGMGLAVRQAPLIIPLKATSTPVSIQQYPMSHEARLGIKPHIQRLLDQGILVPCQSPWNTPLLPVKKPGTNDYRPVQDLREVNKRVEDIHPTVPNPYNLLSGLPPSHQWYTVLDLKDAFFCLRLHPTSQPLFAFEWRDPGMGISGQLTWTRLPQGFKNSPTLFNEALHRDLADFRIQHPDLILLQYVDDILLAATSELDCQQGTRALLQTLGDLGYRASAKKAQICQKQVKYLGYLLREGQRWLTEARKETVMGQPVPKTPRQLREFLGTAGFCRLWIPGFAEMAAPLYPLTKPGTLFSWGPDQQKAYQEIKQALLTAPALGLPDLTKPFELFVDEKQGYAKGVLTQKLGPWRRPVAYLSKKLDPVAAGWPPCLRMVAAIAVLTKDAGKLTMGQPLVILAPHAVEALVKQPPDRWLSNARMTHYQAMLLDTDRVQFGPVVALNPATLLPLPEEGAPHDCLEILAETHGTRPDLTDQPIPDADHTWYTDGSSFLQEGQRKAGAAVTTETEVIWAGALPAGTSAQRAELIALTQALKMAEGKRLNVYTDSRYAFATAHIHGEIYRRRGWLTSEGREIKNKSEILALLKALFLPKRLSIIHCLGHQKGDSAEARGNRLADQAAREAAIKTPPDTSTLLAGKRTADGSEFEKRTADGSEFESPKKKAKVE

SEQ ID NO: 2211 - protein, 2096 aa, synthetic construct
MPAAKRVKLDGGDKKYSIGLDIGTNSVGWAVITDEYKVPSKKFKVLGNTDRHSIKKNLIGALLFDSGETAEATRLKRTARRRYTRRKNRICYLQEIFSNEMAKVDDSFFHRLEESFLVEEDKKHERHPIFGNIVDEVAYHEKYPTIYHLRKKLVDSTDKADLRLIYLALAHMIKFRGHFLIEGDLNPDNSDVDKLFIQLVQTYNQLFEENPINASGVDAKAILSARLSKSRRLENLIAQLPGEKKNGLFGNLIALSLGLTPNFKSNFDLAEDAKLQLSKDTYDDDLDNLLAQIGDQYADLFLAAKNLSDAILLSDILRVNTEITKAPLSASMIKRYDEHHQDLTLLKALVRQQLPEKYKEIFFDQSKNGYAGYIDGGASQEEFYKFIKPILEKMDGTEELLVKLNREDLLRKQRTFDNGSIPHQIHLGELHAILRRQEDFYPFLKDNREKIEKILTFRIPYYVGPLARGNSRFAWMTRKSEETITPWNFEEVVDKGASAQSFIERMTNFDKNLPNEKVLPKHSLLYEYFTVYNELTKVKYVTEGMRKPAFLSGEQKKAIVDLLFKTNRKVTVKQLKEDYFKKIECFDSVEISGVEDRFNASLGTYHDLLKIIKDKDFLDNEENEDILEDIVLTLTLFEDREMIEERLKTYAHLFDDKVMKQLKRRRYTGWGRLSRKLINGIRDKQSGKTILDFLKSDGFANRNFMQLIHDDSLTFKEDIQKAQVSGQGDSLHEHIANLAGSPAIKKGILQTVKVVDELVKVMGRHKPENIVIEMARENQTTQKGQKNSRERMKRIEEGIKELGSQILKEHPVENTQLQNEKLYLYYLQNGRDMYVDQELDINRLSDYDVDHIVPQSFLKDDSIDNKVLTRSDKARGKSDNVPSEEVVKKMKNYWRQLLNAKLITQRKFDNLTKAERGGLSELDKAGFIKRQLVETRQITKHVAQILDSRMNTKYDENDKLIREVKVITLKSKLVSDFRKDFQFYKVREINNYHHAHDAYLNAVVGTALIKKYPKLESEFVYGDYKVYDVRKMIAKSEQEIGKATAKYFFYSNIMNFFKTEITLANGEIRKRPLIETNGETGEIVWDKGRDFATVRKVLSMPQVNIVKKTEVQTGGFSKESILPKRNSDKLIARKKDWDPKKYGGFDSPTVAYSVLVVAKVEKGKSKKLKSVKELLGITIMERSSFEKNPIDFLEAKGYKEVKKDLIIKLPKYSLFELENGRKRMLASAGELQKGNELALPSKYVNFLYLASHYEKLKGSPEDNEQKQLFVEQHKHYLDEIIEQISEFSKRVILADANLDKVLSAYNKHRDKPIREQAENIIHLFTLTNLGAPAAFKYFDTTIDRKRYTSTKEVLDATLIHQSITGLYETRIDLSQLGGDGGEAAAKGSSPAPGGTLGIEDEYRLHETSTEPDVSLGSTWLSDFPQAWAETGGMGLAVRQAPLIIPLKATSTPVSIQQYPMSHEARLGIKPHIQRLLDQGILVPCQSPWNTPLLPVKKPGTNDYRPVQDLREVNKRVEDIHPTVPNPYNLLSGLPPSHQWYTVLDLKDAFFCLRLHPTSQPLFAFEWRDPGMGISGQLTWTRLPQGFKNSPTLFNEALHRDLADFRIQHPDLILLQYVDDILLAATSELDCQQGTRALLQTLGDLGYRASAKKAQICQKQVKYLGYLLREGQRWLTEARKETVMGQPVPKTPRQLREFLGTAGFCRLWIPGFAEMAAPLYPLTKPGTLFSWGPDQQKAYQEIKQALLTAPALGLPDLTKPFELFVDEKQGYAKGVLTQKLGPWRRPVAYLSKKLDPVAAGWPPCLRMVAAIAVLTKDAGKLTMGQPLVILAPHAVEALVKQPPDRWLSNARMTHYQAMLLDTDRVQFGPVVALNPATLLPLPEEGAPHDCLEILAETHGTRPDLTDQPIPDADHTWYTDGSSFLQEGQRKAGAAVTTETEVIWAGALPAGTSAQRAELIALTQALKMAEGKRLNVYTDSRYAFATAHIHGEIYRRRGWLTSEGREIKNKSEILALLKALFLPKRLSIIHCLGHQKGDSAEARGNRLADQAAREAAIKTPPDTSTLLAGKRTADGSEFEKRTADGSEFESPKKKAKVE

SEQ ID NO: 2212 - protein, 2094 aa, synthetic construct; identical to SEQ ID NO: 2079

SEQ ID NO: 2213 - protein, 2096 aa, synthetic construct
MPAAKRVKLDGGDKKYSIGLDIGTNSVGWAVITDEYKVPSKKFKVLGNTDRHSIKKNLIGALLFDSGETAEATRLKRTARRRYTRRKNRICYLQEIFSNEMAKVDDSFFHRLEESFLVEEDKKHERHPIFGNIVDEVAYHEKYPTIYHLRKKLVDSTDKADLRLIYLALAHMIKFRGHFLIEGDLNPDNSDVDKLFIQLVQTYNQLFEENPINASGVDAKAILSARLSKSRRLENLIAQLPGEKKNGLFGNLIALSLGLTPNFKSNFDLAEDAKLQLSKDTYDDDLDNLLAQIGDQYADLFLAAKNLSDAILLSDILRVNTEITKAPLSASMIKRYDEHHQDLTLLKALVRQQLPEKYKEIFFDQSKNGYAGYIDGGASQEEFYKFIKPILEKMDGTEELLVKLNREDLLRKQRTFDNGSIPHQIHLGELHAILRRQEDFYPFLKDNREKIEKILTFRIPYYVGPLARGNSRFAWMTRKSEETITPWNFEEVVDKGASAQSFIERMTNFDKNLPNEKVLPKHSLLYEYFTVYNELTKVKYVTEGMRKPAFLSGEQKKAIVDLLFKTNRKVTVKQLKEDYFKKIECFDSVEISGVEDRFNASLGTYHDLLKIIKDKDFLDNEENEDILEDIVLTLTLFEDREMIEERLKTYAHLFDDKVMKQLKRRRYTGWGRLSRKLINGIRDKQSGKTILDFLKSDGFANRNFMQLIHDDSLTFKEDIQKAQVSGQGDSLHEHIANLAGSPAIKKGILQTVKVVDELVKVMGRHKPENIVIEMARENQTTQKGQKNSRERMKRIEEGIKELGSQILKEHPVENTQLQNEKLYLYYLQNGRDMYVDQELDINRLSDYDVDHIVPQSFLKDDSIDNKVLTRSDKARGKSDNVPSEEVVKKMKNYWRQLLNAKLITQRKFDNLTKAERGGLSELDKAGFIKRQLVETRQITKHVAQILDSRMNTKYDENDKLIREVKVITLKSKLVSDFRKDFQFYKVREINNYHHAHDAYLNAVVGTALIKKYPKLESEFVYGDYKVYDVRKMIAKSEQEIGKATAKYFFYSNIMNFFKTEITLANGEIRKRPLIETNGETGEIVWDKGRDFATVRKVLSMPQVNIVKKTEVQTGGFSKESILPKRNSDKLIARKKDWDPKKYGGFDSPTVAYSVLVVAKVEKGKSKKLKSVKELLGITIMERSSFEKNPIDFLEAKGYKEVKKDLIIKLPKYSLFELENGRKRMLASAGELQKGNELALPSKYVNFLYLASHYEKLKGSPEDNEQKQLFVEQHKHYLDEIIEQISEFSKRVILADANLDKVLSAYNKHRDKPIREQAENIIHLFTLTNLGAPAAFKYFDTTIDRKRYTSTKEVLDATLIHQSITGLYETRIDLSQLGGDGGEAAAKPAPGSSGGTLGIEDEYRLHETSTEPDVSLGSTWLSDFPQAWAETGGMGLAVRQAPLIIPLKATSTPVSIQQYPMSHEARLGIKPHIQRLLDQGILVPCQSPWNTPLLPVKKPGTNDYRPVQDLREVNKRVEDIHPTVPNPYNLLSGLPPSHQWYTVLDLKDAFFCLRLHPTSQPLFAFEWRDPGMGISGQLTWTRLPQGFKNSPTLFNEALHRDLADFRIQHPDLILLQYVDDILLAATSELDCQQGTRALLQTLGDLGYRASAKKAQICQKQVKYLGYLLREGQRWLTEARKETVMGQPVPKTPRQLREFLGTAGFCRLWIPGFAEMAAPLYPLTKPGTLFSWGPDQQKAYQEIKQALLTAPALGLPDLTKPFELFVDEKQGYAKGVLTQKLGPWRRPVAYLSKKLDPVAAGWPPCLRMVAAIAVLTKDAGKLTMGQPLVILAPHAVEALVKQPPDRWLSNARMTHYQAMLLDTDRVQFGPVVALNPATLLPLPEEGAPHDCLEILAETHGTRPDLTDQPIPDADHTWYTDGSSFLQEGQRKAGAAVTTETEVIWAGALPAGTSAQRAELIALTQALKMAEGKRLNVYTDSRYAFATAHIHGEIYRRRGWLTSEGREIKNKSEILALLKALFLPKRLSIIHCLGHQKGDSAEARGNRLADQAAREAAIKTPPDTSTLLAGKRTADGSEFEKRTADGSEFESPKKKAKVE

SEQ ID NO: 2214 - protein, 2096 aa, synthetic construct
MPAAKRVKLDGGDKKYSIGLDIGTNSVGWAVITDEYKVPSKKFKVLGNTDRHSIKKNLIGALLFDSGETAEATRLKRTARRRYTRRKNRICYLQEIFSNEMAKVDDSFFHRLEESFLVEEDKKHERHPIFGNIVDEVAYHEKYPTIYHLRKKLVDSTDKADLRLIYLALAHMIKFRGHFLIEGDLNPDNSDVDKLFIQLVQTYNQLFEENPINASGVDAKAILSARLSKSRRLENLIAQLPGEKKNGLFGNLIALSLGLTPNFKSNFDLAEDAKLQLSKDTYDDDLDNLLAQIGDQYADLFLAAKNLSDAILLSDILRVNTEITKAPLSASMIKRYDEHHQDLTLLKALVRQQLPEKYKEIFFDQSKNGYAGYIDGGASQEEFYKFIKPILEKMDGTEELLVKLNREDLLRKQRTFDNGSIPHQIHLGELHAILRRQEDFYPFLKDNREKIEKILTFRIPYYVGPLARGNSRFAWMTRKSEETITPWNFEEVVDKGASAQSFIERMTNFDKNLPNEKVLPKHSLLYEYFTVYNELTKVKYVTEGMRKPAFLSGEQKKAIVDLLFKTNRKVTVKQLKEDYFKKIECFDSVEISGVEDRFNASLGTYHDLLKIIKDKDFLDNEENEDILEDIVLTLTLFEDREMIEERLKTYAHLFDDKVMKQLKRRRYTGWGRLSRKLINGIRDKQSGKTILDFLKSDGFANRNFMQLIHDDSLTFKEDIQKAQVSGQGDSLHEHIANLAGSPAIKKGILQTVKVVDELVKVMGRHKPENIVIEMARENQTTQKGQKNSRERMKRIEEGIKELGSQILKEHPVENTQLQNEKLYLYYLQNGRDMYVDQELDINRLSDYDVDHIVPQSFLKDDSIDNKVLTRSDKARGKSDNVPSEEVVKKMKNYWRQLLNAKLITQRKFDNLTKAERGGLSELDKAGFIKRQLVETRQITKHVAQILDSRMNTKYDENDKLIREVKVITLKSKLVSDFRKDFQFYKVREINNYHHAHDAYLNAVVGTALIKKYPKLESEFVYGDYKVYDVRKMIAKSEQEIGKATAKYFFYSNIMNFFKTEITLANGEIRKRPLIETNGETGEIVWDKGRDFATVRKVLSMPQVNIVKKTEVQTGGFSKESILPKRNSDKLIARKKDWDPKKYGGFDSPTVAYSVLVVAKVEKGKSKKLKSVKELLGITIMERSSFEKNPIDFLEAKGYKEVKKDLIIKLPKYSLFELENGRKRMLASAGELQKGNELALPSKYVNFLYLASHYEKLKGSPEDNEQKQLFVEQHKHYLDEIIEQISEFSKRVILADANLDKVLSAYNKHRDKPIREQAENIIHLFTLTNLGAPAAFKYFDTTIDRKRYTSTKEVLDATLIHQSITGLYETRIDLSQLGGDGGGSSGGGEAAAKGGTLGIEDEYRLHETSTEPDVSLGSTWLSDFPQAWAETGGMGLAVRQAPLIIPLKATSTPVSIQQYPMSHEARLGIKPHIQRLLDQGILVPCQSPWNTPLLPVKKPGTNDYRPVQDLREVNKRVEDIHPTVPNPYNLLSGLPPSHQWYTVLDLKDAFFCLRLHPTSQPLFAFEWRDPGMGISGQLTWTRLPQGFKNSPTLFNEALHRDLADFRIQHPDLILLQYVDDILLAATSELDCQQGTRALLQTLGDLGYRASAKKAQICQKQVKYLGYLLREGQRWLTEARKETVMGQPVPKTPRQLREFLGTAGFCRLWIPGFAEMAAPLYPLTKPGTLFSWGPDQQKAYQEIKQALLTAPALGLPDLTKPFELFVDEKQGYAKGVLTQKLGPWRRPVAYLSKKLDPVAAGWPPCLRMVAAIAVLTKDAGKLTMGQPLVILAPHAVEALVKQPPDRWLSNARMTHYQAMLLDTDRVQFGPVVALNPATLLPLPEEGAPHDCLEILAETHGTRPDLTDQPIPDADHTWYTDGSSFLQEGQRKAGAAVTTETEVIWAGALPAGTSAQRAELIALTQALKMAEGKRLNVYTDSRYAFATAHIHGEIYRRRGWLTSEGREIKNKSEILALLKALFLPKRLSIIHCLGHQKGDSAEARGNRLADQAAREAAIKTPPDTSTLLAGKRTADGSEFEKRTADGSEFESPKKKAKVE

SEQ ID NO: 2215 - protein, 2096 aa, synthetic construct
MPAAKRVKLDGGDKKYSIGLDIGTNSVGWAVITDEYKVPSKKFKVLGNTDRHSIKKNLIGALLFDSGETAEATRLKRTARRRYTRRKNRICYLQEIFSNEMAKVDDSFFHRLEESFLVEEDKKHERHPIFGNIVDEVAYHEKYPTIYHLRKKLVDSTDKADLRLIYLALAHMIKFRGHFLIEGDLNPDNSDVDKLFIQLVQTYNQLFEENPINASGVDAKAILSARLSKSRRLENLIAQLPGEKKNGLFGNLIALSLGLTPNFKSNFDLAEDAKLQLSKDTYDDDLDNLLAQIGDQYADLFLAAKNLSDAILLSDILRVNTEITKAPLSASMIKRYDEHHQDLTLLKALVRQQLPEKYKEIFFDQSKNGYAGYIDGGASQEEFYKFIKPILEKMDGTEELLVKLNREDLLRKQRTFDNGSIPHQIHLGELHAILRRQEDFYPFLKDNREKIEKILTFRIPYYVGPLARGNSRFAWMTRKSEETITPWNFEEVVDKGASAQSFIERMTNFDKNLPNEKVLPKHSLLYEYFTVYNELTKVKYVTEGMRKPAFLSGEQKKAIVDLLFKTNRKVTVKQLKEDYFKKIECFDSVEISGVEDRFNASLGTYHDLLKIIKDKDFLDNEENEDILEDIVLTLTLFEDREMIEERLKTYAHLFDDKVMKQLKRRRYTGWGRLSRKLINGIRDKQSGKTILDFLKSDGFANRNFMQLIHDDSLTFKEDIQKAQVSGQGDSLHEHIANLAGSPAIKKGILQTVKVVDELVKVMGRHKPENIVIEMARENQTTQKGQKNSRERMKRIEEGIKELGSQILKEHPVENTQLQNEKLYLYYLQNGRDMYVDQELDINRLSDYDVDHIVPQSFLKDDSIDNKVLTRSDKARGKSDNVPSEEVVKKMKNYWRQLLNAKLITQRKFDNLTKAERGGLSELDKAGFIKRQLVETRQITKHVAQILDSRMNTKYDENDKLIREVKVITLKSKLVSDFRKDFQFYKVREINNYHHAHDAYLNAVVGTALIKKYPKLESEFVYGDYKVYDVRKMIAKSEQEIGKATAKYFFYSNIMNFFKTEITLANGEIRKRPLIETNGETGEIVWDKGRDFATVRKVLSMPQVNIVKKTEVQTGGFSKESILPKRNSDKLIARKKDWDPKKYGGFDSPTVAYSVLVVAKVEKGKSKKLKSVKELLGITIMERSSFEKNPIDFLEAKGYKEVKKDLIIKLPKYSLFELENGRKRMLASAGELQKGNELALPSKYVNFLYLASHYEKLKGSPEDNEQKQLFVEQHKHYLDEIIEQISEFSKRVILADANLDKVLSAYNKHRDKPIREQAENIIHLFTLTNLGAPAAFKYFDTTIDRKRYTSTKEVLDATLIHQSITGLYETRIDLSQLGGDGGGSSEAAAKPAPGGTLGIEDEYRLHETSTEPDVSLGSTWLSDFPQAWAETGGMGLAVRQAPLIIPLKATSTPVSIQQYPMSHEARLGIKPHIQRLLDQGILVPCQSPWNTPLLPVKKPGTNDYRPVQDLREVNKRVEDIHPTVPNPYNLLSGLPPSHQWYTVLDLKDAFFCLRLHPTSQPLFAFEWRDPGMGISGQLTWTRLPQGFKNSPTLFNEALHRDLADFRIQHPDLILLQYVDDILLAATSELDCQQGTRALLQTLGDLGYRASAKKAQICQKQVKYLGYLLREGQRWLTEARKETVMGQPVPKTPRQLREFLGTAGFCRLWIPGFAEMAAPLYPLTKPGTLFSWGPDQQKAYQEIKQALLTAPALGLPDLTKPFELFVDEKQGYAKGVLTQKLGPWRRPVAYLSKKLDPVAAGWPPCLRMVAAIAVLTKDAGKLTMGQPLVILAPHAVEALVKQPPDRWLSNARMTHYQAMLLDTDRVQFGPVVALNPATLLPLPEEGAPHDCLEILAETHGTRPDLTDQPIPDADHTWYTDGSSFLQEGQRKAGAAVTTETEVIWAGALPAGTSAQRAELIALTQALKMAEGKRLNVYTDSRYAFATAHIHGEIYRRRGWLTSEGREIKNKSEILALLKALFLPKRLSIIHCLGHQKGDSAEARGNRLADQAAREAAIKTPPDTSTLLAGKRTADGSEFEKRTADGSEFESPKKKAKVE

SEQ ID NO: 2216 - protein, 2091 aa, synthetic construct
MPAAKRVKLDGGDKKYSIGLDIGTNSVGWAVITDEYKVPSKKFKVLGNTDRHSIKKNLIGALLFDSGETAEATRLKRTARRRYTRRKNRICYLQEIFSNEMAKVDDSFFHRLEESFLVEEDKKHERHPIFGNIVDEVAYHEKYPTIYHLRKKLVDSTDKADLRLIYLALAHMIKFRGHFLIEGDLNPDNSDVDKLFIQLVQTYNQLFEENPINASGVDAKAILSARLSKSRRLENLIAQLPGEKKNGLFGNLIALSLGLTPNFKSNFDLAEDAKLQLSKDTYDDDLDNLLAQIGDQYADLFLAAKNLSDAILLSDILRVNTEITKAPLSASMIKRYDEHHQDLTLLKALVRQQLPEKYKEIFFDQSKNGYAGYIDGGASQEEFYKFIKPILEKMDGTEELLVKLNREDLLRKQRTFDNGSIPHQIHLGELHAILRRQEDFYPFLKDNREKIEKILTFRIPYYVGPLARGNSRFAWMTRKSEETITPWNFEEVVDKGASAQSFIERMTNFDKNLPNEKVLPKHSLLYEYFTVYNELTKVKYVTEGMRKPAFLSGEQKKAIVDLLFKTNRKVTVKQLKEDYFKKIECFDSVEISGVEDRFNASLGTYHDLLKIIKDKDFLDNEENEDILEDIVLTLTLFEDREMIEERLKTYAHLFDDKVMKQLKRRRYTGWGRLSRKLINGIRDKQSGKTILDFLKSDGFANRNFMQLIHDDSLTFKEDIQKAQVSGQGDSLHEHIANLAGSPAIKKGILQTVKVVDELVKVMGRHKPENIVIEMARENQTTQKGQKNSRERMKRIEEGIKELGSQILKEHPVENTQLQNEKLYLYYLQNGRDMYVDQELDINRLSDYDVDHIVPQSFLKDDSIDNKVLTRSDKARGKSDNVPSEEVVKKMKNYWRQLLNAKLITQRKFDNLTKAERGGLSELDKAGFIKRQLVETRQITKHVAQILDSRMNTKYDENDKLIREVKVITLKSKLVSDFRKDFQFYKVREINNYHHAHDAYLNAVVGTALIKKYPKLESEFVYGDYKVYDVRKMIAKSEQEIGKATAKYFFYSNIMNFFKTEITLANGEIRKRPLIETNGETGEIVWDKGRDFATVRKVLSMPQVNIVKKTEVQTGGFSKESILPKRNSDKLIARKKDWDPKKYGGFDSPTVAYSVLVVAKVEKGKSKKLKSVKELLGITIMERSSFEKNPIDFLEAKGYKEVKKDLIIKLPKYSLFELENGRKRMLASAGELQKGNELALPSKYVNFLYLASHYEKLKGSPEDNEQKQLFVEQHKHYLDEIIEQISEFSKRVILADANLDKVLSAYNKHRDKPIREQAENIIHLFTLTNLGAPAAFKYFDTTIDRKRYTSTKEVLDATLIHQSITGLYETRIDLSQLGGDGGGGGGGGGGTLGIEDEYRLHETSTEPDVSLGSTWLSDFPQAWAETGGMGLAVRQAPLIIPLKATSTPVSIQQYPMSHEARLGIKPHIQRLLDQGILVPCQSPWNTPLLPVKKPGTNDYRPVQDLREVNKRVEDIHPTVPNPYNLLSGLPPSHQWYTVLDLKDAFFCLRLHPTSQPLFAFEWRDPGMGISGQLTWTRLPQGFKNSPTLFNEALHRDLADFRIQHPDLILLQYVDDILLAATSELDCQQGTRALLQTLGDLGYRASAKKAQICQKQVKYLGYLLREGQRWLTEARKETVMGQPVPKTPRQLREFLGTAGFCRLWIPGFAEMAAPLYPLTKPGTLFSWGPDQQKAYQEIKQALLTAPALGLPDLTKPFELFVDEKQGYAKGVLTQKLGPWRRPVAYLSKKLDPVAAGWPPCLRMVAAIAVLTKDAGKLTMGQPLVILAPHAVEALVKQPPDRWLSNARMTHYQAMLLDTDRVQFGPVVALNPATLLPLPEEGAPHDCLEILAETHGTRPDLTDQPIPDADHTWYTDGSSFLQEGQRKAGAAVTTETEVIWAGALPAGTSAQRAELIALTQALKMAEGKRLNVYTDSRYAFATAHIHGEIYRRRGWLTSEGREIKNKSEILALLKALFLPKRLSIIHCLGHQKGDSAEARGNRLADQAAREAAIKTPPDTSTLLAGKRTADGSEFEKRTADGSEFESPKKKAKVE

SEQ ID NO: 2217 - protein, 2094 aa, synthetic construct
MPAAKRVKLDGGDKKYSIGLDIGTNSVGWAVITDEYKVPSKKFKVLGNTDRHSIKKNLIGALLFDSGETAEATRLKRTARRRYTRRKNRICYLQEIFSNEMAKVDDSFFHRLEESFLVEEDKKHERHPIFGNIVDEVAYHEKYPTIYHLRKKLVDSTDKADLRLIYLALAHMIKFRGHFLIEGDLNPDNSDVDKLFIQLVQTYNQLFEENPINASGVDAKAILSARLSKSRRLENLIAQLPGEKKNGLFGNLIALSLGLTPNFKSNFDLAEDAKLQLSKDTYDDDLDNLLAQIGDQYADLFLAAKNLSDAILLSDILRVNTEITKAPLSASMIKRYDEHHQDLTLLKALVRQQLPEKYKEIFFDQSKNGYAGYIDGGASQEEFYKFIKPILEKMDGTEELLVKLNREDLLRKQRTFDNGSIPHQIHLGELHAILRRQEDFYPFLKDNREKIEKILTFRIPYYVGPLARGNSRFAWMTRKSEETITPWNFEEVVDKGASAQSFIERMTNFDKNLPNEKVLPKHSLLYEYFTVYNELTKVKYVTEGMRKPAFLSGEQKKAIVDLLFKTNRKVTVKQLKEDYFKKIECFDSVEISGVEDRFNASLGTYHDLLKIIKDKDFLDNEENEDILEDIVLTLTLFEDREMIEERLKTYAHLFDDKVMKQLKRRRYTGWGRLSRKLINGIRDKQSGKTILDFLKSDGFANRNFMQLIHDDSLTFKEDIQKAQVSGQGDSLHEHIANLAGSPAIKKGILQTVKVVDELVKVMGRHKPENIVIEMARENQTTQKGQKNSRERMKRIEEGIKELGSQILKEHPVENTQLQNEKLYLYYLQNGRDMYVDQELDINRLSDYDVDHIVPQSFLKDDSIDNKVLTRSDKARGKSDNVPSEEVVKKMKNYWRQLLNAKLITQRKFDNLTKAERGGLSELDKAGFIKRQLVETRQITKHVAQILDSRMNTKYDENDKLIREVKVITLKSKLVSDFRKDFQFYKVREINNYHHAHDAYLNAVVGTALIKKYPKLESEFVYGDYKVYDVRKMIAKSEQEIGKATAKYFFYSNIMNFFKTEITLANGEIRKRPLIETNGETGEIVWDKGRDFATVRKVLSMPQVNIVKKTEVQTGGFSKESILPKRNSDKLIARKKDWDPKKYGGFDSPTVAYSVLVVAKVEKGKSKKLKSVKELLGITIMERSSFEKNPIDFLEAKGYKEVKKDLIIKLPKYSLFELENGRKRMLASAGELQKGNELALPSKYVNFLYLASHYEKLKGSPEDNEQKQLFVEQHKHYLDEIIEQISEFSKRVILADANLDKVLSAYNKHRDKPIREQAENIIHLFTLTNLGAPAAFKYFDTTIDRKRYTSTKEVLDATLIHQSITGLYETRIDLSQLGGDGGGGSGSSPAPGGTLGIEDEYRLHETSTEPDVSLGSTWLSDFPQAWAETGGMGLAVRQAPLIIPLKATSTPVSIQQYPMSHEARLGIKPHIQRLLDQGILVPCQSPWNTPLLPVKKPGTNDYRPVQDLREVNKRVEDIHPTVPNPYNLLSGLPPSHQWYTVLDLKDAFFCLRLHPTSQPLFAFEWRDPGMGISGQLTWTRLPQGFKNSPTLFNEALHRDLADFRIQHPDLILLQYVDDILLAATSELDCQQGTRALLQTLGDLGYRASAKKAQICQKQVKYLGYLLREGQRWLTEARKETVMGQPVPKTPRQLREFLGTAGFCRLWIPGFAEMAAPLYPLTKPGTLFSWGPDQQKAYQEIKQALLTAPALGLPDLTKPFELFVDEKQGYAKGVLTQKLGPWRRPVAYLSKKLDPVAAGWPPCLRMVAAIAVLTKDAGKLTMGQPLVILAPHAVEALVKQPPDRWLSNARMTHYQAMLLDTDRVQFGPVVALNPATLLPLPEEGAPHDCLEILAETHGTRPDLTDQPIPDADHTWYTDGSSFLQEGQRKAGAAVTTETEVIWAGALPAGTSAQRAELIALTQALKMAEGKRLNVYTDSRYAFATAHIHGEIYRRRGWLTSEGREIKNKSEILALLKALFLPKRLSIIHCLGHQKGDSAEARGNRLADQAAREAAIKTPPDTSTLLAGKRTADGSEFEKRTADGSEFESPKKKAKVE

SEQ ID NO: 2218 - protein, 2096 aa, synthetic construct
MPAAKRVKLDGGDKKYSIGLDIGTNSVGWAVITDEYKVPSKKFKVLGNTDRHSIKKNLIGALLFDSGETAEATRLKRTARRRYTRRKNRICYLQEIFSNEMAKVDDSFFHRLEESFLVEEDKKHERHPIFGNIVDEVAYHEKYPTIYHLRKKLVDSTDKADLRLIYLALAHMIKFRGHFLIEGDLNPDNSDVDKLFIQLVQTYNQLFEENPINASGVDAKAILSARLSKSRRLENLIAQLPGEKKNGLFGNLIALSLGLTPNFKSNFDLAEDAKLQLSKDTYDDDLDNLLAQIGDQYADLFLAAKNLSDAILLSDILRVNTEITKAPLSASMIKRYDEHHQDLTLLKALVRQQLPEKYKEIFFDQSKNGYAGYIDGGASQEEFYKFIKPILEKMDGTEELLVKLNREDLLRKQRTFDNGSIPHQIHLGELHAILRRQEDFYPFLKDNREKIEKILTFRIPYYVGPLARGNSRFAWMTRKSEETITPWNFEEVVDKGASAQSFIERMTNFDKNLPNEKVLPKHSLLYEYFTVYNELTKVKYVTEGMRKPAFLSGEQKKAIVDLLFKTNRKVTVKQLKEDYFKKIECFDSVEISGVEDRFNASLGTYHDLLKIIKDKDFLDNEENEDILEDIVLTLTLFEDREMIEERLKTYAHLFDDKVMKQLKRRRYTGWGRLSRKLINGIRDKQSGKTILDFLKSDGFANRNFMQLIHDDSLTFKEDIQKAQVSGQGDSLHEHIANLAGSPAIKKGILQTVKVVDELVKVMGRHKPENIVIEMARENQTTQKGQKNSRERMKRIEEGIKELGSQILKEHPVENTQLQNEKLYLYYLQNGRDMYVDQELDINRLSDYDVDHIVPQSFLKDDSIDNKVLTRSDKARGKSDNVPSEEVVKKMKNYWRQLLNAKLITQRKFDNLTKAERGGLSELDKAGFIKRQLVETRQITKHVAQILDSRMNTKYDENDKLIREVKVITLKSKLVSDFRKDFQFYKVREINNYHHAHDAYLNAVVGTALIKKYPKLESEFVYGDYKVYDVRKMIAKSEQEIGKATAKYFFYSNIMNFFKTEITLANGEIRKRPLIETNGETGEIVWDKGRDFATVRKVLSMPQVNIVKKTEVQTGGFSKESILPKRNSDKLIARKKDWDPKKYGGFDSPTVAYSVLVVAKVEKGKSKKLKSVKELLGITIMERSSFEKNPIDFLEAKGYKEVKKDLIIKLPKYSLFELENGRKRMLASAGELQKGNELALPSKYVNFLYLASHYEKLKGSPEDNEQKQLFVEQHKHYLDEIIEQISEFSKRVILADANLDKVLSAYNKHRDKPIREQAENIIHLFTLTNLGAPAAFKYFDTTIDRKRYTSTKEVLDATLIHQSITGLYETRIDLSQLGGDGGEAAAKGGSGGGGGTLGIEDEYRLHETSTEPDVSLGSTWLSDFPQAWAETGGMGLAVRQAPLIIPLKATSTPVSIQQYPMSHEARLGIKPHIQRLLDQGILVPCQSPWNTPLLPVKKPGTNDYRPVQDLREVNKRVEDIHPTVPNPYNLLSGLPPSHQWYTVLDLKDAFFCLRLHPTSQPLFAFEWRDPGMGISGQLTWTRLPQGFKNSPTLFNEALHRDLADFRIQHPDLILLQYVDDILLAATSELDCQQGTRALLQTLGDLGYRASAKKAQICQKQVKYLGYLLREGQRWLTEARKETVMGQPVPKTPRQLREFLGTAGFCRLWIPGFAEMAAPLYPLTKPGTLFSWGPDQQKAYQEIKQALLTAPALGLPDLTKPFELFVDEKQGYAKGVLTQKLGPWRRPVAYLSKKLDPVAAGWPPCLRMVAAIAVLTKDAGKLTMGQPLVILAPHAVEALVKQPPDRWLSNARMTHYQAMLLDTDRVQFGPVVALNPATLLPLPEEGAPHDCLEILAETHGTRPDLTDQPIPDADHTWYTDGSSFLQEGQRKAGAAVTTETEVIWAGALPAGTSAQRAELIALTQALKMAEGKRLNVYTDSRYAFATAHIHGEIYRRRGWLTSEGREIKNKSEILALLKALFLPKRLSIIHCLGHQKGDSAEARGNRLADQAAREAAIKTPPDTSTLLAGKRTADGSEFEKRTADGSEFESPKKKAKVE

SEQ ID NO: 2219 - protein, 2094 aa, synthetic construct
MPAAKRVKLDGGDKKYSIGLDIGTNSVGWAVITDEYKVPSKKFKVLGNTDRHSIKKNLIGALLFDSGETAEATRLKRTARRRYTRRKNRICYLQEIFSNEMAKVDDSFFHRLEESFLVEEDKKHERHPIFGNIVDEVAYHEKYPTIYHLRKKLVDSTDKADLRLIYLALAHMIKFRGHFLIEGDLNPDNSDVDKLFIQLVQTYNQLFEENPINASGVDAKAILSARLSKSRRLENLIAQLPGEKKNGLFGNLIALSLGLTPNFKSNFDLAEDAKLQLSKDTYDDDLDNLLAQIGDQYADLFLAAKNLSDAILLSDILRVNTEITKAPLSASMIKRYDEHHQDLTLLKALVRQQLPEKYKEIFFDQSKNGYAGYIDGGASQEEFYKFIKPILEKMDGTEELLVKLNREDLLRKQRTFDNGSIPHQIHLGELHAILRRQEDFYPFLKDNREKIEKILTFRIPYYVGPLARGNSRFAWMTRKSEETITPWNFEEVVDKGASAQSFIERMTNFDKNLPNEKVLPKHSLLYEYFTVYNELTKVKYVTEGMRKPAFLSGEQKKAIVDLLFKTNRKVTVKQLKEDYFKKIECFDSVEISGVEDRFNASLGTYHDLLKIIKDKDFLDNEENEDILEDIVLTLTLFEDREMIEERLKTYAHLFDDKVMKQLKRRRYTGWGRLSRKLINGIRDKQSGKTILDFLKSDGFANRNFMQLIHDDSLTFKEDIQKAQVSGQGDSLHEHIANLAGSPAIKKGILQTVKVVDELVKVMGRHKPENIVIEMARENQTTQKGQKNSRERMKRIEEGIKELGSQILKEHPVENTQLQNEKLYLYYLQNGRDMYVDQELDINRLSDYDVDHIVPQSFLKDDSIDNKVLTRSDKARGKSDNVPSEEVVKKMKNYWRQLLNAKLITQRKFDNLTKAERGGLSELDKAGFIKRQLVETRQITKHVAQILDSRMNTKYDENDKLIREVKVITLKSKLVSDFRKDFQFYKVREINNYHHAHDAYLNAVVGTALIKKYPKLESEFVYGDYKVYDVRKMIAKSEQEIGKATAKYFFYSNIMNFFKTEITLANGEIRKRPLIETNGETGEIVWDKGRDFATVRKVLSMPQVNIVKKTEVQTGGFSKESILPKRNSDKLIARKKDWDPKKYGGFDSPTVAYSVLVVAKVEKGKSKKLKSVKELLGITIMERSSFEKNPIDFLEAKGYKEVKKDLIIKLPKYSLFELENGRKRMLASAGELQKGNELALPSKYVNFLYLASHYEKLKGSPEDNEQKQLFVEQHKHYLDEIIEQISEFSKRVILADANLDKVLSAYNKHRDKPIREQAENIIHLFTLTNLGAPAAFKYFDTTIDRKRYTSTKEVLDATLIHQSITGLYETRIDLSQLGGDGGGSSGSSGSSGGTLGIEDEYRLHETSTEPDVSLGSTWLSDFPQAWAETGGMGLAVRQAPLIIPLKATSTPVSIQQYPMSHEARLGIKPHIQRLLDQGILVPCQSPWNTPLLPVKKPGTNDYRPVQDLREVNKRVEDIHPTVPNPYNLLSGLPPSHQWYTVLDLKDAFFCLRLHPTSQPLFAFEWRDPGMGISGQLTWTRLPQGFKNSPTLFNEALHRDLADFRIQHPDLILLQYVDDILLAATSELDCQQGTRALLQTLGDLGYRASAKKAQICQKQVKYLGYLLREGQRWLTEARKETVMGQPVPKTPRQLREFLGTAGFCRLWIPGFAEMAAPLYPLTKPGTLFSWGPDQQKAYQEIKQALLTAPALGLPDLTKPFELFVDEKQGYAKGVLTQKLGPWRRPVAYLSKKLDPVAAGWPPCLRMVAAIAVLTKDAGKLTMGQPLVILAPHAVEALVKQPPDRWLSNARMTHYQAMLLDTDRVQFGPVVALNPATLLPLPEEGAPHDCLEILAETHGTRPDLTDQPIPDADHTWYTDGSSFLQEGQRKAGAAVTTETEVIWAGALPAGTSAQRAELIALTQALKMAEGKRLNVYTDSRYAFATAHIHGEIYRRRGWLTSEGREIKNKSEILALLKALFLPKRLSIIHCLGHQKGDSAEARGNRLADQAAREAAIKTPPDTSTLLAGKRTADGSEFEKRTADGSEFESPKKKAKVE

SEQ ID NO: 2220 - protein, 2097 aa, synthetic construct
MPAAKRVKLDGGDKKYSIGLDIGTNSVGWAVITDEYKVPSKKFKVLGNTDRHSIKKNLIGALLFDSGETAEATRLKRTARRRYTRRKNRICYLQEIFSNEMAKVDDSFFHRLEESFLVEEDKKHERHPIFGNIVDEVAYHEKYPTIYHLRKKLVDSTDKADLRLIYLALAHMIKFRGHFLIEGDLNPDNSDVDKLFIQLVQTYNQLFEENPINASGVDAKAILSARLSKSRRLENLIAQLPGEKKNGLFGNLIALSLGLTPNFKSNFDLAEDAKLQLSKDTYDDDLDNLLAQIGDQYADLFLAAKNLSDAILLSDILRVNTEITKAPLSASMIKRYDEHHQDLTLLKALVRQQLPEKYKEIFFDQSKNGYAGYIDGGASQEEFYKFIKPILEKMDGTEELLVKLNREDLLRKQRTFDNGSIPHQIHLGELHAILRRQEDFYPFLKDNREKIEKILTFRIPYYVGPLARGNSRFAWMTRKSEETITPWNFEEVVDKGASAQSFIERMTNFDKNLPNEKVLPKHSLLYEYFTVYNELTKVKYVTEGMRKPAFLSGEQKKAIVDLLFKTNRKVTVKQLKEDYFKKIECFDSVEISGVEDRFNASLGTYHDLLKIIKDKDFLDNEENEDILEDIVLTLTLFEDREMIEERLKTYAHLFDDKVMKQLKRRRYTGWGRLSRKLINGIRDKQSGKTILDFLKSDGFANRNFMQLIHDDSLTFKEDIQKAQVSGQGDSLHEHIANLAGSPAIKKGILQTVKVVDELVKVMGRHKPENIVIEMARENQTTQKGQKNSRERMKRIEEGIKELGSQILKEHPVENTQLQNEKLYLYYLQNGRDMYVDQELDINRLSDYDVDHIVPQSFLKDDSIDNKVLTRSDKARGKSDNVPSEEVVKKMKNYWRQLLNAKLITQRKFDNLTKAERGGLSELDKAGFIKRQLVETRQITKHVAQILDSRMNTKYDENDKLIREVKVITLKSKLVSDFRKDFQFYKVREINNYHHAHDAYLNAVVGTALIKKYPKLESEFVYGDYKVYDVRKMIAKSEQEIGKATAKYFFYSNIMNFFKTEITLANGEIRKRPLIETNGETGEIVWDKGRDFATVRKVLSMPQVNIVKKTEVQTGGFSKESILPKRNSDKLIARKKDWDPKKYGGFDSPTVAYSVLVVAKVEKGKSKKLKSVKELLGITIMERSSFEKNPIDFLEAKGYKEVKKDLIIKLPKYSLFELENGRKRMLASAGELQKGNELALPSKYVNFLYLASHYEKLKGSPEDNEQKQLFVEQHKHYLDEIIEQISEFSKRVILADANLDKVLSAYNKHRDKPIREQAENIIHLFTLTNLGAPAAFKYFDTTIDRKRYTSTKEVLDATLIHQSITGLYETRIDLSQLGGDGGGSAGSAAGSGEFGGTLGIEDEYRLHETSTEPDVSLGSTWLSDFPQAWAETGGMGLAVRQAPLIIPLKATSTPVSIQQYPMSHEARLGIKPHIQRLLDQGILVPCQSPWNTPLLPVKKPGTNDYRPVQDLREVNKRVEDIHPTVPNPYNLLSGLPPSHQWYTVLDLKDAFFCLRLHPTSQPLFAFEWRDPGMGISGQLTWTRLPQGFKNSPTLFNEALHRDLADFRIQHPDLILLQYVDDILLAATSELDCQQGTRALLQTLGDLGYRASAKKAQICQKQVKYLGYLLREGQRWLTEARKETVMGQPVPKTPRQLREFLGTAGFCRLWIPGFAEMAAPLYPLTKPGTLFSWGPDQQKAYQEIKQALLTAPALGLPDLTKPFELFVDEKQGYAKGVLTQKLGPWRRPVAYLSKKLDPVAAGWPPCLRMVAAIAVLTKDAGKLTMGQPLVILAPHAVEALVKQPPDRWLSNARMTHYQAMLLDTDRVQFGPVVALNPATLLPLPEEGAPHDCLEILAETHGTRPDLTDQPIPDADHTWYTDGSSFLQEGQRKAGAAVTTETEVIWAGALPAGTSAQRAELIALTQALKMAEGKRLNVYTDSRYAFATAHIHGEIYRRRGWLTSEGREIKNKSEILALLKALFLPKRLSIIHCLGHQKGDSAEARGNRLADQAAREAAIKTPPDTSTLLAGKRTADGSEFEKRTADGSEFESPKKKAKVE

SEQ ID NO: 2221 - protein, 2090 aa, synthetic construct
MPAAKRVKLDGGDKKYSIGLDIGTNSVGWAVITDEYKVPSKKFKVLGNTDRHSIKKNLIGALLFDSGETAEATRLKRTARRRYTRRKNRICYLQEIFSNEMAKVDDSFFHRLEESFLVEEDKKHERHPIFGNIVDEVAYHEKYPTIYHLRKKLVDSTDKADLRLIYLALAHMIKFRGHFLIEGDLNPDNSDVDKLFIQLVQTYNQLFEENPINASGVDAKAILSARLSKSRRLENLIAQLPGEKKNGLFGNLIALSLGLTPNFKSNFDLAEDAKLQLSKDTYDDDLDNLLAQIGDQYADLFLAAKNLSDAILLSDILRVNTEITKAPLSASMIKRYDEHHQDLTLLKALVRQQLPEKYKEIFFDQSKNGYAGYIDGGASQEEFYKFIKPILEKMDGTEELLVKLNREDLLRKQRTFDNGSIPHQIHLGELHAILRRQEDFYPFLKDNREKIEKILTFRIPYYVGPLARGNSRFAWMTRKSEETITPWNFEEVVDKGASAQSFIERMTNFDKNLPNEKVLPKHSLLYEYFTVYNELTKVKYVTEGMRKPAFLSGEQKKAIVDLLFKTNRKVTVKQLKEDYFKKIECFDSVEISGVEDRFNASLGTYHDLLKIIKDKDFLDNEENEDILEDIVLTLTLFEDREMIEERLKTYAHLFDDKVMKQLKRRRYTGWGRLSRKLINGIRDKQSGKTILDFLKSDGFANRNFMQLIHDDSLTFKEDIQKAQVSGQGDSLHEHIANLAGSPAIKKGILQTVKVVDELVKVMGRHKPENIVIEMARENQTTQKGQKNSRERMKRIEEGIKELGSQILKEHPVENTQLQNEKLYLYYLQNGRDMYVDQELDINRLSDYDVDHIVPQSFLKDDSIDNKVLTRSDKARGKSDNVPSEEVVKKMKNYWRQLLNAKLITQRKFDNLTKAERGGLSELDKAGFIKRQLVETRQITKHVAQILDSRMNTKYDENDKLIREVKVITLKSKLVSDFRKDFQFYKVREINNYHHAHDAYLNAVVGTALIKKYPKLESEFVYGDYKVYDVRKMIAKSEQEIGKATAKYFFYSNIMNFFKTEITLANGEIRKRPLIETNGETGEIVWDKGRDFATVRKVLSMPQVNIVKKTEVQTGGFSKESILPKRNSDKLIARKKDWDPKKYGGFDSPTVAYSVLVVAKVEKGKSKKLKSVKELLGITIMERSSFEKNPIDFLEAKGYKEVKKDLIIKLPKYSLFELENGRKRMLASAGELQKGNELALPSKYVNFLYLASHYEKLKGSPEDNEQKQLFVEQHKHYLDEIIEQISEFSKRVILADANLDKVLSAYNKHRDKPIREQAENIIHLFTLTNLGAPAAFKYFDTTIDRKRYTSTKEVLDATLIHQSITGLYETRIDLSQLGGDGGGGGGGGGTLGIEDEYRLHETSTEPDVSLGSTWLSDFPQAWAETGGMGLAVRQAPLIIPLKATSTPVSIQQYPMSHEARLGIKPHIQRLLDQGILVPCQSPWNTPLLPVKKPGTNDYRPVQDLREVNKRVEDIHPTVPNPYNLLSGLPPSHQWYTVLDLKDAFFCLRLHPTSQPLFAFEWRDPGMGISGQLTWTRLPQGFKNSPTLFNEALHRDLADFRIQHPDLILLQYVDDILLAATSELDCQQGTRALLQTLGDLGYRASAKKAQICQKQVKYLGYLLREGQRWLTEARKETVMGQPVPKTPRQLREFLGTAGFCRLWIPGFAEMAAPLYPLTKPGTLFSWGPDQQKAYQEIKQALLTAPALGLPDLTKPFELFVDEKQGYAKGVLTQKLGPWRRPVAYLSKKLDPVAAGWPPCLRMVAAIAVLTKDAGKLTMGQPLVILAPHAVEALVKQPPDRWLSNARMTHYQAMLLDTDRVQFGPVVALNPATLLPLPEEGAPHDCLEILAETHGTRPDLTDQPIPDADHTWYTDGSSFLQEGQRKAGAAVTTETEVIWAGALPAGTSAQRAELIALTQALKMAEGKRLNVYTDSRYAFATAHIHGEIYRRRGWLTSEGREIKNKSEILALLKALFLPKRLSIIHCLGHQKGDSAEARGNRLADQAAREAAIKTPPDTSTLLAGKRTADGSEFEKRTADGSEFESPKKKAKVE

SEQ ID NO: 2222 - protein, 2094 aa, synthetic construct
MPAAKRVKLDGGDKKYSIGLDIGTNSVGWAVITDEYKVPSKKFKVLGNTDRHSIKKNLIGALLFDSGETAEATRLKRTARRRYTRRKNRICYLQEIFSNEMAKVDDSFFHRLEESFLVEEDKKHERHPIFGNIVDEVAYHEKYPTIYHLRKKLVDSTDKADLRLIYLALAHMIKFRGHFLIEGDLNPDNSDVDKLFIQLVQTYNQLFEENPINASGVDAKAILSARLSKSRRLENLIAQLPGEKKNGLFGNLIALSLGLTPNFKSNFDLAEDAKLQLSKDTYDDDLDNLLAQIGDQYADLFLAAKNLSDAILLSDILRVNTEITKAPLSASMIKRYDEHHQDLTLLKALVRQQLPEKYKEIFFDQSKNGYAGYIDGGASQEEFYKFIKPILEKMDGTEELLVKLNREDLLRKQRTFDNGSIPHQIHLGELHAILRRQEDFYPFLKDNREKIEKILTFRIPYYVGPLARGNSRFAWMTRKSEETITPWNFEEVVDKGASAQSFIERMTNFDKNLPNEKVLPKHSLLYEYFTVYNELTKVKYVTEGMRKPAFLSGEQKKAIVDLLFKTNRKVTVKQLKEDYFKKIECFDSVEISGVEDRFNASLGTYHDLLKIIKDKDFLDNEENEDILEDIVLTLTLFEDREMIEERLKTYAHLFDDKVMKQLKRRRYTGWGRLSRKLINGIRDKQSGKTILDFLKSDGFANRNFMQLIHDDSLTFKEDIQKAQVSGQGDSLHEHIANLAGSPAIKKGILQTVKVVDELVKVMGRHKPENIVIEMARENQTTQKGQKNSRERMKRIEEGIKELGSQILKEHPVENTQLQNEKLYLYYLQNGRDMYVDQELDINRLSDYDVDHIVPQSFLKDDSIDNKVLTRSDKARGKSDNVPSEEVVKKMKNYWRQLLNAKLITQRKFDNLTKAERGGLSELDKAGFIKRQLVETRQITKHVAQILDSRMNTKYDENDKLIREVKVITLKSKLVSDFRKDFQFYKVREINNYHHAHDAYLNAVVGTALIKKYPKLESEFVYGDYKVYDVRKMIAKSEQEIGKATAKYFFYSNIMNFFKTEITLANGEIRKRPLIETNGETGEIVWDKGRDFATVRKVLSMPQVNIVKKTEVQTGGFSKESILPKRNSDKLIARKKDWDPKKYGGFDSPTVAYSVLVVAKVEKGKSKKLKSVKELLGITIMERSSFEKNPIDFLEAKGYKEVKKDLIIKLPKYSLFELENGRKRMLASAGELQKGNELALPSKYVNFLYLASHYEKLKGSPEDNEQKQLFVEQHKHYLDEIIEQISEFSKRVILADANLDKVLSAYNKHRDKPIREQAENIIHLFTLTNLGAPAAFKYFDTTIDRKRYTSTKEVLDATLIHQSITGLYETRIDLSQLGGDGGGSSGGSPAPGGTLGIEDEYRLHETSTEPDVSLGSTWLSDFPQAWAETGGMGLAVRQAPLIIPLKATSTPVSIQQYPMSHEARLGIKPHIQRLLDQGILVPCQSPWNTPLLPVKKPGTNDYRPVQDLREVNKRVEDIHPTVPNPYNLLSGLPPSHQWYTVLDLKDAFFCLRLHPTSQPLFAFEWRDPGMGISGQLTWTRLPQGFKNSPTLFNEALHRDLADFRIQHPDLILLQYVDDILLAATSELDCQQGTRALLQTLGDLGYRASAKKAQICQKQVKYLGYLLREGQRWLTEARKETVMGQPVPKTPRQLREFLGTAGFCRLWIPGFAEMAAPLYPLTKPGTLFSWGPDQQKAYQEIKQALLTAPALGLPDLTKPFELFVDEKQGYAKGVLTQKLGPWRRPVAYLSKKLDPVAAGWPPCLRMVAAIAVLTKDAGKLTMGQPLVILAPHAVEALVKQPPDRWLSNARMTHYQAMLLDTDRVQFGPVVALNPATLLPLPEEGAPHDCLEILAETHGTRPDLTDQPIPDADHTWYTDGSSFLQEGQRKAGAAVTTETEVIWAGALPAGTSAQRAELIALTQALKMAEGKRLNVYTDSRYAFATAHIHGEIYRRRGWLTSEGREIKNKSEILALLKALFLPKRLSIIHCLGHQKGDSAEARGNRLADQAAREAAIKTPPDTSTLLAGKRTADGSEFEKRTADGSEFESPKKKAKVE

SEQ ID NO: 2223 - protein, 2096 aa, synthetic construct
MPAAKRVKLDGGDKKYSIGLDIGTNSVGWAVITDEYKVPSKKFKVLGNTDRHSIKKNLIGALLFDSGETAEATRLKRTARRRYTRRKNRICYLQEIFSNEMAKVDDSFFHRLEESFLVEEDKKHERHPIFGNIVDEVAYHEKYPTIYHLRKKLVDSTDKADLRLIYLALAHMIKFRGHFLIEGDLNPDNSDVDKLFIQLVQTYNQLFEENPINASGVDAKAILSARLSKSRRLENLIAQLPGEKKNGLFGNLIALSLGLTPNFKSNFDLAEDAKLQLSKDTYDDDLDNLLAQIGDQYADLFLAAKNLSDAILLSDILRVNTEITKAPLSASMIKRYDEHHQDLTLLKALVRQQLPEKYKEIFFDQSKNGYAGYIDGGASQEEFYKFIKPILEKMDGTEELLVKLNREDLLRKQRTFDNGSIPHQIHLGELHAILRRQEDFYPFLKDNREKIEKILTFRIPYYVGPLARGNSRFAWMTRKSEETITPWNFEEVVDKGASAQSFIERMTNFDKNLPNEKVLPKHSLLYEYFTVYNELTKVKYVTEGMRKPAFLSGEQKKAIVDLLFKTNRKVTVKQLKEDYFKKIECFDSVEISGVEDRFNASLGTYHDLLKIIKDKDFLDNEENEDILEDIVLTLTLFEDREMIEERLKTYAHLFDDKVMKQLKRRRYTGWGRLSRKLINGIRDKQSGKTILDFLKSDGFANRNFMQLIHDDSLTFKEDIQKAQVSGQGDSLHEHIANLAGSPAIKKGILQTVKVVDELVKVMGRHKPENIVIEMARENQTTQKGQKNSRERMKRIEEGIKELGSQILKEHPVENTQLQNEKLYLYYLQNGRDMYVDQELDINRLSDYDVDHIVPQSFLKDDSIDNKVLTRSDKARGKSDNVPSEEVVKKMKNYWRQLLNAKLITQRKFDNLTKAERGGLSELDKAGFIKRQLVETRQITKHVAQILDSRMNTKYDENDKLIREVKVITLKSKLVSDFRKDFQFYKVREINNYHHAHDAYLNAVVGTALIKKYPKLESEFVYGDYKVYDVRKMIAKSEQEIGKATAKYFFYSNIMNFFKTEITLANGEIRKRPLIETNGETGEIVWDKGRDFATVRKVLSMPQVNIVKKTEVQTGGFSKESILPKRNSDKLIARKKDWDPKKYGGFDSPTVAYSVLVVAKVEKGKSKKLKSVKELLGITIMERSSFEKNPIDFLEAKGYKEVKKDLIIKLPKYSLFELENGRKRMLASAGELQKGNELALPSKYVNFLYLASHYEKLKGSPEDNEQKQLFVEQHKHYLDEIIEQISEFSKRVILADANLDKVLSAYNKHRDKPIREQAENIIHLFTLTNLGAPAAFKYFDTTIDRKRYTSTKEVLDATLIHQSITGLYETRIDLSQLGGDGGEAAAKPAPGGGGGTLNIEDEYRLHETSKEPDVSLGSTWLSDFPQAWAETGGMGLAVRQAPLIIPLKATSTPVSIKQYPMSQEARLGIKPHIQRLLDQGILVPCQSPWNTPLLPVKKPGTNDYRPVQDLREVNKRVEDIHPTVPNPYNLLSGLPPSHQWYTVLDLKDAFFCLRLHPTSQPLFAFEWRDPEMGISGQLTWTRLPQGFKNSPTLFDEALHRDLAGFRIQHPDLILLQYVDDLLLAATSELDCQQGTRALLQTLGDLGYRASAKKAQICQKQVKYLGYLLKEGQRWLTEARKETVMGQPIPKTPRQLREFLGTAGFCRLWIPGFAEMAAPLYPLTKTGTLFNWGPDQQKAFQEIKQALLTAPALGLPDLTKPFELFVDEKQGYAKGVLTQKLGPWRRPVAYLSKKLDPVAAGWPPCLRMVAAIAVLTKDAGKLTMGQPLVILAPHAVEALVKQPPDRWLSNARMTHYQALLLDTDRVQFGPVVALNPATLLPLPEEGLQHDCLDILAEAHGTRSDLMDQPLPDADHTWYTDGSSFLQEGQRKAGAAVTTETEVIWARALPAGTSAQRAELIALTQALKMAEGKKLNVYTDSRYAFATAHIHGEIYRRRGLLTSEGKEIKNKDEILALLKALFLPKRLSIIHCPGHQKGNSAEARGNRMADQAAREVATRETPETSTLLAGKRTADGSEFEKRTADGSEFESPKKKAKVE

SEQ ID NO: 2224 - protein, 2115 aa, synthetic construct
MPAAKRVKLDGGDKKYSIGLDIGTNSVGWAVITDEYKVPSKKFKVLGNTDRHSIKKNLIGALLFDSGETAEATRLKRTARRRYTRRKNRICYLQEIFSNEMAKVDDSFFHRLEESFLVEEDKKHERHPIFGNIVDEVAYHEKYPTIYHLRKKLVDSTDKADLRLIYLALAHMIKFRGHFLIEGDLNPDNSDVDKLFIQLVQTYNQLFEENPINASGVDAKAILSARLSKSRRLENLIAQLPGEKKNGLFGNLIALSLGLTPNFKSNFDLAEDAKLQLSKDTYDDDLDNLLAQIGDQYADLFLAAKNLSDAILLSDILRVNTEITKAPLSASMIKRYDEHHQDLTLLKALVRQQLPEKYKEIFFDQSKNGYAGYIDGGASQEEFYKFIKPILEKMDGTEELLVKLNREDLLRKQRTFDNGSIPHQIHLGELHAILRRQEDFYPFLKDNREKIEKILTFRIPYYVGPLARGNSRFAWMTRKSEETITPWNFEEVVDKGASAQSFIERMTNFDKNLPNEKVLPKHSLLYEYFTVYNELTKVKYVTEGMRKPAFLSGEQKKAIVDLLFKTNRKVTVKQLKEDYFKKIECFDSVEISGVEDRFNASLGTYHDLLKIIKDKDFLDNEENEDILEDIVLTLTLFEDREMIEERLKTYAHLFDDKVMKQLKRRRYTGWGRLSRKLINGIRDKQSGKTILDFLKSDGFANRNFMQLIHDDSLTFKEDIQKAQVSGQGDSLHEHIANLAGSPAIKKGILQTVKVVDELVKVMGRHKPENIVIEMARENQTTQKGQKNSRERMKRIEEGIKELGSQILKEHPVENTQLQNEKLYLYYLQNGRDMYVDQELDINRLSDYDVDHIVPQSFLKDDSIDNKVLTRSDKARGKSDNVPSEEVVKKMKNYWRQLLNAKLITQRKFDNLTKAERGGLSELDKAGFIKRQLVETRQITKHVAQILDSRMNTKYDENDKLIREVKVITLKSKLVSDFRKDFQFYKVREINNYHHAHDAYLNAVVGTALIKKYPKLESEFVYGDYKVYDVRKMIAKSEQEIGKATAKYFFYSNIMNFFKTEITLANGEIRKRPLIETNGETGEIVWDKGRDFATVRKVLSMPQVNIVKKTEVQTGGFSKESILPKRNSDKLIARKKDWDPKKYGGFDSPTVAYSVLVVAKVEKGKSKKLKSVKELLGITIMERSSFEKNPIDFLEAKGYKEVKKDLIIKLPKYSLFELENGRKRMLASAGELQKGNELALPSKYVNFLYLASHYEKLKGSPEDNEQKQLFVEQHKHYLDEIIEQISEFSKRVILADANLDKVLSAYNKHRDKPIREQAENIIHLFTLTNLGAPAAFKYFDTTIDRKRYTSTKEVLDATLIHQSITGLYETRIDLSQLGGDGGGGGGSGGGGSGGGGSGGGGSGGGGSGGGGSGGTLNIEDEYRLHETSKEPDVSLGSTWLSDFPQAWAETGGMGLAVRQAPLIIPLKATSTPVSIKQYPMSQEARLGIKPHIQRLLDQGILVPCQSPWNTPLLPVKKPGTNDYRPVQDLREVNKRVEDIHPTVPNPYNLLSGLPPSHQWYTVLDLKDAFFCLRLHPTSQPLFAFEWRDPEMGISGQLTWTRLPQGFKNSPTLFNEALHRDLAGFRIQHPDLILLQYVDDLLLAATSELDCQQGTRALLQTLGDLGYRASAKKAQICQKQVKYLGYLLKEGQRWLTEARKETVMGQPIPKTPRQLREFLGTAGFCRLWIPGFAEMAAPLYPLTKPGTLFNWGPDQQKAFQEIKQALLTAPALGLPDLTKPFELFVDEKQGYAKGVLTQKLGPWRRPVAYLSKKLDPVAAGWPPCLRMVAAIAVLTKDAGKLTMGQPLVILAPHAVEALVKQPPDRWLSNARMTHYQALLLDTDRVQFGPVVALNPATLLPLPEEGLQHDCLDILAEAHGTRSDLMDQPLPDADHTWYTDGSSFLQEGQRKAGAAVTTETEVIWARALPAGTSAQRAELIALTQALKMAEGKKLNVYTDSRYAFATAHIHGEIYRRRGWLTSEGKEIKNKDEILALLKALFLPKRLSIIHCPGHQKGNSAEARGNRMADQAAREVATRETPETSTLLAGKRTADGSEFEKRTADGSEFESPKKKAKVE

SEQ ID NO: 2225 - protein, 2096 aa, synthetic construct
MPAAKRVKLDGGDKKYSIGLDIGTNSVGWAVITDEYKVPSKKFKVLGNTDRHSIKKNLIGALLFDSGETAEATRLKRTARRRYTRRKNRICYLQEIFSNEMAKVDDSFFHRLEESFLVEEDKKHERHPIFGNIVDEVAYHEKYPTIYHLRKKLVDSTDKADLRLIYLALAHMIKFRGHFLIEGDLNPDNSDVDKLFIQLVQTYNQLFEENPINASGVDAKAILSARLSKSRRLENLIAQLPGEKKNGLFGNLIALSLGLTPNFKSNFDLAEDAKLQLSKDTYDDDLDNLLAQIGDQYADLFLAAKNLSDAILLSDILRVNTEITKAPLSASMIKRYDEHHQDLTLLKALVRQQLPEKYKEIFFDQSKNGYAGYIDGGASQEEFYKFIKPILEKMDGTEELLVKLNREDLLRKQRTFDNGSIPHQIHLGELHAILRRQEDFYPFLKDNREKIEKILTFRIPYYVGPLARGNSRFAWMTRKSEETITPWNFEEVVDKGASAQSFIERMTNFDKNLPNEKVLPKHSLLYEYFTVYNELTKVKYVTEGMRKPAFLSGEQKKAIVDLLFKTNRKVTVKQLKEDYFKKIECFDSVEISGVEDRFNASLGTYHDLLKIIKDKDFLDNEENEDILEDIVLTLTLFEDREMIEERLKTYAHLFDDKVMKQLKRRRYTGWGRLSRKLINGIRDKQSGKTILDFLKSDGFANRNFMQLIHDDSLTFKEDIQKAQVSGQGDSLHEHIANLAGSPAIKKGILQTVKVVDELVKVMGRHKPENIVIEMARENQTTQKGQKNSRERMKRIEEGIKELGSQILKEHPVENTQLQNEKLYLYYLQNGRDMYVDQELDINRLSDYDVDHIVPQSFLKDDSIDNKVLTRSDKARGKSDNVPSEEVVKKMKNYWRQLLNAKLITQRKFDNLTKAERGGLSELDKAGFIKRQLVETRQITKHVAQILDSRMNTKYDENDKLIREVKVITLKSKLVSDFRKDFQFYKVREINNYHHAHDAYLNAVVGTALIKKYPKLESEFVYGDYKVYDVRKMIAKSEQEIGKATAKYFFYSNIMNFFKTEITLANGEIRKRPLIETNGETGEIVWDKGRDFATVRKVLSMPQVNIVKKTEVQTGGFSKESILPKRNSDKLIARKKDWDPKKYGGFDSPTVAYSVLVVAKVEKGKSKKLKSVKELLGITIMERSSFEKNPIDFLEAKGYKEVKKDLIIKLPKYSLFELENGRKRMLASAGELQKGNELALPSKYVNFLYLASHYEKLKGSPEDNEQKQLFVEQHKHYLDEIIEQISEFSKRVILADANLDKVLSAYNKHRDKPIREQAENIIHLFTLTNLGAPAAFKYFDTTIDRKRYTSTKEVLDATLIHQSITGLYETRIDLSQLGGDGGPAPGSSEAAAKGGTLNIEDEYRLHETSKEPDVSLGSTWLSDFPQAWAETGGMGLAVRQAPLIIPLKATSTPVSIKQYPMSQEARLGIKPHIQRLLDQGILVPCQSPWNTPLLPVKKPGTNDYRPVQDLREVNKRVEDIHPTVPNPYNLLSGLPPSHQWYTVLDLKDAFFCLRLHPTSQPLFAFEWRDPEMGISGQLTWTRLPQGFKNSPTLFNEALHRDLAGFRIQHPDLILLQYVDDLLLAATSELDCQQGTRALLQTLGDLGYRASAKKAQICQKQVKYLGYLLKEGQRWLTEARKETVMGQPIPKTPRQLREFLGTAGFCRLWIPGFAEMAAPLYPLTKPGTLFNWGPDQQKAFQEIKQALLTAPALGLPDLTKPFELFVDEKQGYAKGVLTQKLGPWRRPVAYLSKKLDPVAAGWPPCLRMVAAIAVLTKDAGKLTMGQPLVILAPHAVEALVKQPPDRWLSNARMTHYQALLLDTDRVQFGPVVALNPATLLPLPEEGLQHDCLDILAEAHGTRSDLMDQPLPDADHTWYTDGSSFLQEGQRKAGAAVTTETEVIWARALPAGTSAQRAELIALTQALKMAEGKKLNVYTDSRYAFATAHIHGEIYRRRGWLTSEGKEIKNKDEILALLKALFLPKRLSIIHCPGHQKGNSAEARGNRMADQAAREVATRETPETSTLLAGKRTADGSEFEKRTADGSEFESPKKKAKVE

SEQ ID NO: 2226 - protein, 2100 aa, synthetic construct
MPAAKRVKLDGGDKKYSIGLDIGTNSVGWAVITDEYKVPSKKFKVLGNTDRHSIKKNLIGALLFDSGETAEATRLKRTARRRYTRRKNRICYLQEIFSNEMAKVDDSFFHRLEESFLVEEDKKHERHPIFGNIVDEVAYHEKYPTIYHLRKKLVDSTDKADLRLIYLALAHMIKFRGHFLIEGDLNPDNSDVDKLFIQLVQTYNQLFEENPINASGVDAKAILSARLSKSRRLENLIAQLPGEKKNGLFGNLIALSLGLTPNFKSNFDLAEDAKLQLSKDTYDDDLDNLLAQIGDQYADLFLAAKNLSDAILLSDILRVNTEITKAPLSASMIKRYDEHHQDLTLLKALVRQQLPEKYKEIFFDQSKNGYAGYIDGGASQEEFYKFIKPILEKMDGTEELLVKLNREDLLRKQRTFDNGSIPHQIHLGELHAILRRQEDFYPFLKDNREKIEKILTFRIPYYVGPLARGNSRFAWMTRKSEETITPWNFEEVVDKGASAQSFIERMTNFDKNLPNEKVLPKHSLLYEYFTVYNELTKVKYVTEGMRKPAFLSGEQKKAIVDLLFKTNRKVTVKQLKEDYFKKIECFDSVEISGVEDRFNASLGTYHDLLKIIKDKDFLDNEENEDILEDIVLTLTLFEDREMIEERLKTYAHLFDDKVMKQLKRRRYTGWGRLSRKLINGIRDKQSGKTILDFLKSDGFANRNFMQLIHDDSLTFKEDIQKAQVSGQGDSLHEHIANLAGSPAIKKGILQTVKVVDELVKVMGRHKPENIVIEMARENQTTQKGQKNSRERMKRIEEGIKELGSQILKEHPVENTQLQNEKLYLYYLQNGRDMYVDQELDINRLSDYDVDHIVPQSFLKDDSIDNKVLTRSDKARGKSDNVPSEEVVKKMKNYWRQLLNAKLITQRKFDNLTKAERGGLSELDKAGFIKRQLVETRQITKHVAQILDSRMNTKYDENDKLIREVKVITLKSKLVSDFRKDFQFYKVREINNYHHAHDAYLNAVVGTALIKKYPKLESEFVYGDYKVYDVRKMIAKSEQEIGKATAKYFFYSNIMNFFKTEITLANGEIRKRPLIETNGETGEIVWDKGRDFATVRKVLSMPQVNIVKKTEVQTGGFSKESILPKRNSDKLIARKKDWDPKKYGGFDSPTVAYSVLVVAKVEKGKSKKLKSVKELLGITIMERSSFEKNPIDFLEAKGYKEVKKDLIIKLPKYSLFELENGRKRMLASAGELQKGNELALPSKYVNFLYLASHYEKLKGSPEDNEQKQLFVEQHKHYLDEIIEQISEFSKRVILADANLDKVLSAYNKHRDKPIREQAENIIHLFTLTNLGAPAAFKYFDTTIDRKRYTSTKEVLDATLIHQSITGLYETRIDLSQLGGDGGEAAAKGGGGSEAAAKGGTLNIEDEYRLHETSKEPDVSLGSTWLSDFPQAWAETGGMGLAVRQAPLIIPLKATSTPVSIKQYPMSQEARLGIKPHIQRLLDQGILVPCQSPWNTPLLPVKKPGTNDYRPVQDLREVNKRVEDIHPTVPNPYNLLSGLPPSHQWYTVLDLKDAFFCLRLHPTSQPLFAFEWRDPEMGISGQLTWTRLPQGFKNSPTLFNEALHRDLAGFRIQHPDLILLQYVDDLLLAATSELDCQQGTRALLQTLGDLGYRASAKKAQICQKQVKYLGYLLKEGQRWLTEARKETVMGQPIPKTPRQLREFLGTAGFCRLWIPGFAEMAAPLYPLTKPGTLFNWGPDQQKAFQEIKQALLTAPALGLPDLTKPFELFVDEKQGYAKGVLTQKLGPWRRPVAYLSKKLDPVAAGWPPCLRMVAAIAVLTKDAGKLTMGQPLVILAPHAVEALVKQPPDRWLSNARMTHYQALLLDTDRVQFGPVVALNPATLLPLPEEGLQHDCLDILAEAHGTRSDLMDQPLPDADHTWYTDGSSFLQEGQRKAGAAVTTETEVIWARALPAGTSAQRAELIALTQALKMAEGKKLNVYTDSRYAFATAHIHGEIYRRRGWLTSEGKEIKNKDEILALLKALFLPKRLSIIHCPGHQKGNSAEARGNRMADQAAREVATRETPETSTLLAGKRTADGSEFEKRTADGSEFESPKKKAKVE

SEQ ID NO: 2227 - protein, 2091 aa, synthetic construct
MPAAKRVKLDGGDKKYSIGLDIGTNSVGWAVITDEYKVPSKKFKVLGNTDRHSIKKNLIGALLFDSGETAEATRLKRTARRRYTRRKNRICYLQEIFSNEMAKVDDSFFHRLEESFLVEEDKKHERHPIFGNIVDEVAYHEKYPTIYHLRKKLVDSTDKADLRLIYLALAHMIKFRGHFLIEGDLNPDNSDVDKLFIQLVQTYNQLFEENPINASGVDAKAILSARLSKSRRLENLIAQLPGEKKNGLFGNLIALSLGLTPNFKSNFDLAEDAKLQLSKDTYDDDLDNLLAQIGDQYADLFLAAKNLSDAILLSDILRVNTEITKAPLSASMIKRYDEHHQDLTLLKALVRQQLPEKYKEIFFDQSKNGYAGYIDGGASQEEFYKFIKPILEKMDGTEELLVKLNREDLLRKQRTFDNGSIPHQIHLGELHAILRRQEDFYPFLKDNREKIEKILTFRIPYYVGPLARGNSRFAWMTRKSEETITPWNFEEVVDKGASAQSFIERMTNFDKNLPNEKVLPKHSLLYEYFTVYNELTKVKYVTEGMRKPAFLSGEQKKAIVDLLFKTNRKVTVKQLKEDYFKKIECFDSVEISGVEDRFNASLGTYHDLLKIIKDKDFLDNEENEDILEDIVLTLTLFEDREMIEERLKTYAHLFDDKVMKQLKRRRYTGWGRLSRKLINGIRDKQSGKTILDFLKSDGFANRNFMQLIHDDSLTFKEDIQKAQVSGQGDSLHEHIANLAGSPAIKKGILQTVKVVDELVKVMGRHKPENIVIEMARENQTTQKGQKNSRERMKRIEEGIKELGSQILKEHPVENTQLQNEKLYLYYLQNGRDMYVDQELDINRLSDYDVDHIVPQSFLKDDSIDNKVLTRSDKARGKSDNVPSEEVVKKMKNYWRQLLNAKLITQRKFDNLTKAERGGLSELDKAGFIKRQLVETRQITKHVAQILDSRMNTKYDENDKLIREVKVITLKSKLVSDFRKDFQFYKVREINNYHHAHDAYLNAVVGTALIKKYPKLESEFVYGDYKVYDVRKMIAKSEQEIGKATAKYFFYSNIMNFFKTEITLANGEIRKRPLIETNGETGEIVWDKGRDFATVRKVLSMPQVNIVKKTEVQTGGFSKESILPKRNSDKLIARKKDWDPKKYGGFDSPTVAYSVLVVAKVEKGKSKKLKSVKELLGITIMERSSFEKNPIDFLEAKGYKEVKKDLIIKLPKYSLFELENGRKRMLASAGELQKGNELALPSKYVNFLYLASHYEKLKGSPEDNEQKQLFVEQHKHYLDEIIEQISEFSKRVILADANLDKVLSAYNKHRDKPIREQAENIIHLFTLTNLGAPAAFKYFDTTIDRKRYTSTKEVLDATLIHQSITGLYETRIDLSQLGGDGGGSSGSSGGTLNIEDEYRLHETSKEPDVSLGSTWLSDFPQAWAETGGMGLAVRQAPLIIPLKATSTPVSIKQYPMSQEARLGIKPHIQRLLDQGILVPCQSPWNTPLLPVKKPGTNDYRPVQDLREVNKRVEDIHPTVPNPYNLLSGLPPSHQWYTVLDLKDAFFCLRLHPTSQPLFAFEWRDPEMGISGQLTWTRLPQGFKNSPTLFNEALHRDLAGFRIQHPDLILLQYVDDLLLAATSELDCQQGTRALLQTLGDLGYRASAKKAQICQKQVKYLGYLLKEGQRWLTEARKETVMGQPIPKTPRQLREFLGTAGFCRLWIPGFAEMAAPLYPLTKPGTLFNWGPDQQKAFQEIKQALLTAPALGLPDLTKPFELFVDEKQGYAKGVLTQKLGPWRRPVAYLSKKLDPVAAGWPPCLRMVAAIAVLTKDAGKLTMGQPLVILAPHAVEALVKQPPDRWLSNARMTHYQALLLDTDRVQFGPVVALNPATLLPLPEEGLQHDCLDILAEAHGTRSDLMDQPLPDADHTWYTDGSSFLQEGQRKAGAAVTTETEVIWARALPAGTSAQRAELIALTQALKMAEGKKLNVYTDSRYAFATAHIHGEIYRRRGWLTSEGKEIKNKDEILALLKALFLPKRLSIIHCPGHQKGNSAEARGNRMADQAAREVATRETPETSTLLAGKRTADGSEFEKRTADGSEFESPKKKAKVE

SEQ ID NO: 2228 - protein, 2097 aa, synthetic construct
MPAAKRVKLDGGDKKYSIGLDIGTNSVGWAVITDEYKVPSKKFKVLGNTDRHSIKKNLIGALLFDSGETAEATRLKRTARRRYTRRKNRICYLQEIFSNEMAKVDDSFFHRLEESFLVEEDKKHERHPIFGNIVDEVAYHEKYPTIYHLRKKLVDSTDKADLRLIYLALAHMIKFRGHFLIEGDLNPDNSDVDKLFIQLVQTYNQLFEENPINASGVDAKAILSARLSKSRRLENLIAQLPGEKKNGLFGNLIALSLGLTPNFKSNFDLAEDAKLQLSKDTYDDDLDNLLAQIGDQYADLFLAAKNLSDAILLSDILRVNTEITKAPLSASMIKRYDEHHQDLTLLKALVRQQLPEKYKEIFFDQSKNGYAGYIDGGASQEEFYKFIKPILEKMDGTEELLVKLNREDLLRKQRTFDNGSIPHQIHLGELHAILRRQEDFYPFLKDNREKIEKILTFRIPYYVGPLARGNSRFAWMTRKSEETITPWNFEEVVDKGASAQSFIERMTNFDKNLPNEKVLPKHSLLYEYFTVYNELTKVKYVTEGMRKPAFLSGEQKKAIVDLLFKTNRKVTVKQLKEDYFKKIECFDSVEISGVEDRFNASLGTYHDLLKIIKDKDFLDNEENEDILEDIVLTLTLFEDREMIEERLKTYAHLFDDKVMKQLKRRRYTGWGRLSRKLINGIRDKQSGKTILDFLKSDGFANRNFMQLIHDDSLTFKEDIQKAQVSGQGDSLHEHIANLAGSPAIKKGILQTVKVVDELVKVMGRHKPENIVIEMARENQTTQKGQKNSRERMKRIEEGIKELGSQILKEHPVENTQLQNEKLYLYYLQNGRDMYVDQELDINRLSDYDVDHIVPQSFLKDDSIDNKVLTRSDKARGKSDNVPSEEVVKKMKNYWRQLLNAKLITQRKFDNLTKAERGGLSELDKAGFIKRQLVETRQITKHVAQILDSRMNTKYDENDKLIREVKVITLKSKLVSDFRKDFQFYKVREINNYHHAHDAYLNAVVGTALIKKYPKLESEFVYGDYKVYDVRKMIAKSEQEIGKATAKYFFYSNIMNFFKTEITLANGEIRKRPLIETNGETGEIVWDKGRDFATVRKVLSMPQVNIVKKTEVQTGGFSKESILPKRNSDKLIARKKDWDPKKYGGFDSPTVAYSVLVVAKVEKGKSKKLKSVKELLGITIMERSSFEKNPIDFLEAKGYKEVKKDLIIKLPKYSLFELENGRKRMLASAGELQKGNELALPSKYVNFLYLASHYEKLKGSPEDNEQKQLFVEQHKHYLDEIIEQISEFSKRVILADANLDKVLSAYNKHRDKPIREQAENIIHLFTLTNLGAPAAFKYFDTTIDRKRYTSTKEVLDATLIHQSITGLYETRIDLSQLGGDGGGSAGSAAGSGEFGGTLNIEDEYRLHETSKEPDVSLGSTWLSDFPQAWAETGGMGLAVRQAPLIIPLKATSTPVSIKQYPMSQEARLGIKPHIQRLLDQGILVPCQSPWNTPLLPVKKPGTNDYRPVQDLREVNKRVEDIHPTVPNPYNLLSGLPPSHQWYTVLDLKDAFFCLRLHPTSQPLFAFEWRDPEMGISGQLTWTRLPQGFKNSPTLFNEALHRDLAGFRIQHPDLILLQYVDDLLLAATSELDCQQGTRALLQTLGDLGYRASAKKAQICQKQVKYLGYLLKEGQRWLTEARKETVMGQPIPKTPRQLREFLGTAGFCRLWIPGFAEMAAPLYPLTKPGTLFNWGPDQQKAFQEIKQALLTAPALGLPDLTKPFELFVDEKQGYAKGVLTQKLGPWRRPVAYLSKKLDPVAAGWPPCLRMVAAIAVLTKDAGKLTMGQPLVILAPHAVEALVKQPPDRWLSNARMTHYQALLLDTDRVQFGPVVALNPATLLPLPEEGLQHDCLDILAEAHGTRSDLMDQPLPDADHTWYTDGSSFLQEGQRKAGAAVTTETEVIWARALPAGTSAQRAELIALTQALKMAEGKKLNVYTDSRYAFATAHIHGEIYRRRGWLTSEGKEIKNKDEILALLKALFLPKRLSIIHCPGHQKGNSAEARGNRMADQAAREVATRETPETSTLLAGKRTADGSEFEKRTADGSEFESPKKKAKVE

SEQ ID NO: 2229 - protein, 2088 aa, synthetic construct
MPAAKRVKLDGGDKKYSIGLDIGTNSVGWAVITDEYKVPSKKFKVLGNTDRHSIKKNLIGALLFDSGETAEATRLKRTARRRYTRRKNRICYLQEIFSNEMAKVDDSFFHRLEESFLVEEDKKHERHPIFGNIVDEVAYHEKYPTIYHLRKKLVDSTDKADLRLIYLALAHMIKFRGHFLIEGDLNPDNSDVDKLFIQLVQTYNQLFEENPINASGVDAKAILSARLSKSRRLENLIAQLPGEKKNGLFGNLIALSLGLTPNFKSNFDLAEDAKLQLSKDTYDDDLDNLLAQIGDQYADLFLAAKNLSDAILLSDILRVNTEITKAPLSASMIKRYDEHHQDLTLLKALVRQQLPEKYKEIFFDQSKNGYAGYIDGGASQEEFYKFIKPILEKMDGTEELLVKLNREDLLRKQRTFDNGSIPHQIHLGELHAILRRQEDFYPFLKDNREKIEKILTFRIPYYVGPLARGNSRFAWMTRKSEETITPWNFEEVVDKGASAQSFIERMTNFDKNLPNEKVLPKHSLLYEYFTVYNELTKVKYVTEGMRKPAFLSGEQKKAIVDLLFKTNRKVTVKQLKEDYFKKIECFDSVEISGVEDRFNASLGTYHDLLKIIKDKDFLDNEENEDILEDIVLTLTLFEDREMIEERLKTYAHLFDDKVMKQLKRRRYTGWGRLSRKLINGIRDKQSGKTILDFLKSDGFANRNFMQLIHDDSLTFKEDIQKAQVSGQGDSLHEHIANLAGSPAIKKGILQTVKVVDELVKVMGRHKPENIVIEMARENQTTQKGQKNSRERMKRIEEGIKELGSQILKEHPVENTQLQNEKLYLYYLQNGRDMYVDQELDINRLSDYDVDHIVPQSFLKDDSIDNKVLTRSDKARGKSDNVPSEEVVKKMKNYWRQLLNAKLITQRKFDNLTKAERGGLSELDKAGFIKRQLVETRQITKHVAQILDSRMNTKYDENDKLIREVKVITLKSKLVSDFRKDFQFYKVREINNYHHAHDAYLNAVVGTALIKKYPKLESEFVYGDYKVYDVRKMIAKSEQEIGKATAKYFFYSNIMNFFKTEITLANGEIRKRPLIETNGETGEIVWDKGRDFATVRKVLSMPQVNIVKKTEVQTGGFSKESILPKRNSDKLIARKKDWDPKKYGGFDSPTVAYSVLVVAKVEKGKSKKLKSVKELLGITIMERSSFEKNPIDFLEAKGYKEVKKDLIIKLPKYSLFELENGRKRMLASAGELQKGNELALPSKYVNFLYLASHYEKLKGSPEDNEQKQLFVEQHKHYLDEIIEQISEFSKRVILADANLDKVLSAYNKHRDKPIREQAENIIHLFTLTNLGAPAAFKYFDTTIDRKRYTSTKEVLDATLIHQSITGLYETRIDLSQLGGDGGGGGGGTLNIEDEYRLHETSKEPDVSLGSTWLSDFPQAWAETGGMGLAVRQAPLIIPLKATSTPVSIKQYPMSQEARLGIKPHIQRLLDQGILVPCQSPWNTPLLPVKKPGTNDYRPVQDLREVNKRVEDIHPTVPNPYNLLSGLPPSHQWYTVLDLKDAFFCLRLHPTSQPLFAFEWRDPEMGISGQLTWTRLPQGFKNSPTLFNEALHRDLAGFRIQHPDLILLQYVDDLLLAATSELDCQQGTRALLQTLGDLGYRASAKKAQICQKQVKYLGYLLKEGQRWLTEARKETVMGQPIPKTPRQLREFLGTAGFCRLWIPGFAEMAAPLYPLTKPGTLFNWGPDQQKAFQEIKQALLTAPALGLPDLTKPFELFVDEKQGYAKGVLTQKLGPWRRPVAYLSKKLDPVAAGWPPCLRMVAAIAVLTKDAGKLTMGQPLVILAPHAVEALVKQPPDRWLSNARMTHYQALLLDTDRVQFGPVVALNPATLLPLPEEGLQHDCLDILAEAHGTRSDLMDQPLPDADHTWYTDGSSFLQEGQRKAGAAVTTETEVIWARALPAGTSAQRAELIALTQALKMAEGKKLNVYTDSRYAFATAHIHGEIYRRRGWLTSEGKEIKNKDEILALLKALFLPKRLSIIHCPGHQKGNSAEARGNRMADQAAREVATRETPETSTLLAGKRTADGSEFEKRTADGSEFESPKKKAKVE

SEQ ID NO: 2230 - protein, 2096 aa, synthetic construct
MPAAKRVKLDGGDKKYSIGLDIGTNSVGWAVITDEYKVPSKKFKVLGNTDRHSIKKNLIGALLFDSGETAEATRLKRTARRRYTRRKNRICYLQEIFSNEMAKVDDSFFHRLEESFLVEEDKKHERHPIFGNIVDEVAYHEKYPTIYHLRKKLVDSTDKADLRLIYLALAHMIKFRGHFLIEGDLNPDNSDVDKLFIQLVQTYNQLFEENPINASGVDAKAILSARLSKSRRLENLIAQLPGEKKNGLFGNLIALSLGLTPNFKSNFDLAEDAKLQLSKDTYDDDLDNLLAQIGDQYADLFLAAKNLSDAILLSDILRVNTEITKAPLSASMIKRYDEHHQDLTLLKALVRQQLPEKYKEIFFDQSKNGYAGYIDGGASQEEFYKFIKPILEKMDGTEELLVKLNREDLLRKQRTFDNGSIPHQIHLGELHAILRRQEDFYPFLKDNREKIEKILTFRIPYYVGPLARGNSRFAWMTRKSEETITPWNFEEVVDKGASAQSFIERMTNFDKNLPNEKVLPKHSLLYEYFTVYNELTKVKYVTEGMRKPAFLSGEQKKAIVDLLFKTNRKVTVKQLKEDYFKKIECFDSVEISGVEDRFNASLGTYHDLLKIIKDKDFLDNEENEDILEDIVLTLTLFEDREMIEERLKTYAHLFDDKVMKQLKRRRYTGWGRLSRKLINGIRDKQSGKTILDFLKSDGFANRNFMQLIHDDSLTFKEDIQKAQVSGQGDSLHEHIANLAGSPAIKKGILQTVKVVDELVKVMGRHKPENIVIEMARENQTTQKGQKNSRERMKRIEEGIKELGSQILKEHPVENTQLQNEKLYLYYLQNGRDMYVDQELDINRLSDYDVDHIVPQSFLKDDSIDNKVLTRSDKARGKSDNVPSEEVVKKMKNYWRQLLNAKLITQRKFDNLTKAERGGLSELDKAGFIKRQLVETRQITKHVAQILDSRMNTKYDENDKLIREVKVITLKSKLVSDFRKDFQFYKVREINNYHHAHDAYLNAVVGTALIKKYPKLESEFVYGDYKVYDVRKMIAKSEQEIGKATAKYFFYSNIMNFFKTEITLANGEIRKRPLIETNGETGEIVWDKGRDFATVRKVLSMPQVNIVKKTEVQTGGFSKESILPKRNSDKLIARKKDWDPKKYGGFDSPTVAYSVLVVAKVEKGKSKKLKSVKELLGITIMERSSFEKNPIDFLEAKGYKEVKKDLIIKLPKYSLFELENGRKRMLASAGELQKGNELALPSKYVNFLYLASHYEKLKGSPEDNEQKQLFVEQHKHYLDEIIEQISEFSKRVILADANLDKVLSAYNKHRDKPIREQAENIIHLFTLTNLGAPAAFKYFDTTIDRKRYTSTKEVLDATLIHQSITGLYETRIDLSQLGGDGGEAAAKPAPGGGGGTLNIEDEYRLHETSKEPDVSLGSTWLSDFPQAWAETGGMGLAVRQAPLIIPLKATSTPVSIKQYPMSQEARLGIKPHIQRLLDQGILVPCQSPWNTPLLPVKKPGTNDYRPVQDLREVNKRVEDIHPTVPNPYNLLSGLPPSHQWYTVLDLKDAFFCLRLHPTSQPLFAFEWRDPEMGISGQLTWTRLPQGFKNSPTLFNEALHRDLAGFRIQHPDLILLQYVDDLLLAATSELDCQQGTRALLQTLGDLGYRASAKKAQICQKQVKYLGYLLKEGQRWLTEARKETVMGQPIPKTPRQLREFLGTAGFCRLWIPGFAEMAAPLYPLTKPGTLFNWGPDQQKAFQEIKQALLTAPALGLPDLTKPFELFVDEKQGYAKGVLTQKLGPWRRPVAYLSKKLDPVAAGWPPCLRMVAAIAVLTKDAGKLTMGQPLVILAPHAVEALVKQPPDRWLSNARMTHYQALLLDTDRVQFGPVVALNPATLLPLPEEGLQHDCLDILAEAHGTRSDLMDQPLPDADHTWYTDGSSFLQEGQRKAGAAVTTETEVIWARALPAGTSAQRAELIALTQALKMAEGKKLNVYTDSRYAFATAHIHGEIYRRRGWLTSEGKEIKNKDEILALLKALFLPKRLSIIHCPGHQKGNSAEARGNRMADQAAREVATRETPETSTLLAGKRTADGSEFEKRTADGSEFESPKKKAKVE

SEQ ID NO: 2231 - protein, 2094 aa, synthetic construct
MPAAKRVKLDGGDKKYSIGLDIGTNSVGWAVITDEYKVPSKKFKVLGNTDRHSIKKNLIGALLFDSGETAEATRLKRTARRRYTRRKNRICYLQEIFSNEMAKVDDSFFHRLEESFLVEEDKKHERHPIFGNIVDEVAYHEKYPTIYHLRKKLVDSTDKADLRLIYLALAHMIKFRGHFLIEGDLNPDNSDVDKLFIQLVQTYNQLFEENPINASGVDAKAILSARLSKSRRLENLIAQLPGEKKNGLFGNLIALSLGLTPNFKSNFDLAEDAKLQLSKDTYDDDLDNLLAQIGDQYADLFLAAKNLSDAILLSDILRVNTEITKAPLSASMIKRYDEHHQDLTLLKALVRQQLPEKYKEIFFDQSKNGYAGYIDGGASQEEFYKFIKPILEKMDGTEELLVKLNREDLLRKQRTFDNGSIPHQIHLGELHAILRRQEDFYPFLKDNREKIEKILTFRIPYYVGPLARGNSRFAWMTRKSEETITPWNFEEVVDKGASAQSFIERMTNFDKNLPNEKVLPKHSLLYEYFTVYNELTKVKYVTEGMRKPAFLSGEQKKAIVDLLFKTNRKVTVKQLKEDYFKKIECFDSVEISGVEDRFNASLGTYHDLLKIIKDKDFLDNEENEDILEDIVLTLTLFEDREMIEERLKTYAHLFDDKVMKQLKRRRYTGWGRLSRKLINGIRDKQSGKTILDFLKSDGFANRNFMQLIHDDSLTFKEDIQKAQVSGQGDSLHEHIANLAGSPAIKKGILQTVKVVDELVKVMGRHKPENIVIEMARENQTTQKGQKNSRERMKRIEEGIKELGSQILKEHPVENTQLQNEKLYLYYLQNGRDMYVDQELDINRLSDYDVDHIVPQSFLKDDSIDNKVLTRSDKARGKSDNVPSEEVVKKMKNYWRQLLNAKLITQRKFDNLTKAERGGLSELDKAGFIKRQLVETRQITKHVAQILDSRMNTKYDENDKLIREVKVITLKSKLVSDFRKDFQFYKVREINNYHHAHDAYLNAVVGTALIKKYPKLESEFVYGDYKVYDVRKMIAKSEQEIGKATAKYFFYSNIMNFFKTEITLANGEIRKRPLIETNGETGEIVWDKGRDFATVRKVLSMPQVNIVKKTEVQTGGFSKESILPKRNSDKLIARKKDWDPKKYGGFDSPTVAYSVLVVAKVEKGKSKKLKSVKELLGITIMERSSFEKNPIDFLEAKGYKEVKKDLIIKLPKYSLFELENGRKRMLASAGELQKGNELALPSKYVNFLYLASHYEKLKGSPEDNEQKQLFVEQHKHYLDEIIEQISEFSKRVILADANLDKVLSAYNKHRDKPIREQAENIIHLFTLTNLGAPAAFKYFDTTIDRKRYTSTKEVLDATLIHQSITGLYETRIDLSQLGGDGGGGGGGSGSSGGTLNIEDEYRLHETSKEPDVSLGSTWLSDFPQAWAETGGMGLAVRQAPLIIPLKATSTPVSIKQYPMSQEARLGIKPHIQRLLDQGILVPCQSPWNTPLLPVKKPGTNDYRPVQDLREVNKRVEDIHPTVPNPYNLLSGLPPSHQWYTVLDLKDAFFCLRLHPTSQPLFAFEWRDPEMGISGQLTWTRLPQGFKNSPTLFNEALHRDLAGFRIQHPDLILLQYVDDLLLAATSELDCQQGTRALLQTLGDLGYRASAKKAQICQKQVKYLGYLLKEGQRWLTEARKETVMGQPIPKTPRQLREFLGTAGFCRLWIPGFAEMAAPLYPLTKPGTLFNWGPDQQKAFQEIKQALLTAPALGLPDLTKPFELFVDEKQGYAKGVLTQKLGPWRRPVAYLSKKLDPVAAGWPPCLRMVAAIAVLTKDAGKLTMGQPLVILAPHAVEALVKQPPDRWLSNARMTHYQALLLDTDRVQFGPVVALNPATLLPLPEEGLQHDCLDILAEAHGTRSDLMDQPLPDADHTWYTDGSSFLQEGQRKAGAAVTTETEVIWARALPAGTSAQRAELIALTQALKMAEGKKLNVYTDSRYAFATAHIHGEIYRRRGWLTSEGKEIKNKDEILALLKALFLPKRLSIIHCPGHQKGNSAEARGNRMADQAAREVATRETPETSTLLAGKRTADGSEFEKRTADGSEFESPKKKAKVE

SEQ ID NO: 2232 - protein, 2096 aa, synthetic construct
MPAAKRVKLDGGDKKYSIGLDIGTNSVGWAVITDEYKVPSKKFKVLGNTDRHSIKKNLIGALLFDSGETAEATRLKRTARRRYTRRKNRICYLQEIFSNEMAKVDDSFFHRLEESFLVEEDKKHERHPIFGNIVDEVAYHEKYPTIYHLRKKLVDSTDKADLRLIYLALAHMIKFRGHFLIEGDLNPDNSDVDKLFIQLVQTYNQLFEENPINASGVDAKAILSARLSKSRRLENLIAQLPGEKKNGLFGNLIALSLGLTPNFKSNFDLAEDAKLQLSKDTYDDDLDNLLAQIGDQYADLFLAAKNLSDAILLSDILRVNTEITKAPLSASMIKRYDEHHQDLTLLKALVRQQLPEKYKEIFFDQSKNGYAGYIDGGASQEEFYKFIKPILEKMDGTEELLVKLNREDLLRKQRTFDNGSIPHQIHLGELHAILRRQEDFYPFLKDNREKIEKILTFRIPYYVGPLARGNSRFAWMTRKSEETITPWNFEEVVDKGASAQSFIERMTNFDKNLPNEKVLPKHSLLYEYFTVYNELTKVKYVTEGMRKPAFLSGEQKKAIVDLLFKTNRKVTVKQLKEDYFKKIECFDSVEISGVEDRFNASLGTYHDLLKIIKDKDFLDNEENEDILEDIVLTLTLFEDREMIEERLKTYAHLFDDKVMKQLKRRRYTGWGRLSRKLINGIRDKQSGKTILDFLKSDGFANRNFMQLIHDDSLTFKEDIQKAQVSGQGDSLHEHIANLAGSPAIKKGILQTVKVVDELVKVMGRHKPENIVIEMARENQTTQKGQKNSRERMKRIEEGIKELGSQILKEHPVENTQLQNEKLYLYYLQNGRDMYVDQELDINRLSDYDVDHIVPQSFLKDDSIDNKVLTRSDKARGKSDNVPSEEVVKKMKNYWRQLLNAKLITQRKFDNLTKAERGGLSELDKAGFIKRQLVETRQITKHVAQILDSRMNTKYDENDKLIREVKVITLKSKLVSDFRKDFQFYKVREINNYHHAHDAYLNAVVGTALIKKYPKLESEFVYGDYKVYDVRKMIAKSEQEIGKATAKYFFYSNIMNFFKTEITLANGEIRKRPLIETNGETGEIVWDKGRDFATVRKVLSMPQVNIVKKTEVQTGGFSKESILPKRNSDKLIARKKDWDPKKYGGFDSPTVAYSVLVVAKVEKGKSKKLKSVKELLGITIMERSSFEKNPIDFLEAKGYKEVKKDLIIKLPKYSLFELENGRKRMLASAGELQKGNELALPSKYVNFLYLASHYEKLKGSPEDNEQKQLFVEQHKHYLDEIIEQISEFSKRVILADANLDKVLSAYNKHRDKPIREQAENIIHLFTLTNLGAPAAFKYFDTTIDRKRYTSTKEVLDATLIHQSITGLYETRIDLSQLGGDGGPAPEAAAKGGSGGTLNIEDEYRLHETSKEPDVSLGSTWLSDFPQAWAETGGMGLAVRQAPLIIPLKATSTPVSIKQYPMSQEARLGIKPHIQRLLDQGILVPCQSPWNTPLLPVKKPGTNDYRPVQDLREVNKRVEDIHPTVPNPYNLLSGLPPSHQWYTVLDLKDAFFCLRLHPTSQPLFAFEWRDPEMGISGQLTWTRLPQGFKNSPTLFNEALHRDLAGFRIQHPDLILLQYVDDLLLAATSELDCQQGTRALLQTLGDLGYRASAKKAQICQKQVKYLGYLLKEGQRWLTEARKETVMGQPIPKTPRQLREFLGTAGFCRLWIPGFAEMAAPLYPLTKPGTLFNWGPDQQKAFQEIKQALLTAPALGLPDLTKPFELFVDEKQGYAKGVLTQKLGPWRRPVAYLSKKLDPVAAGWPPCLRMVAAIAVLTKDAGKLTMGQPLVILAPHAVEALVKQPPDRWLSNARMTHYQALLLDTDRVQFGPVVALNPATLLPLPEEGLQHDCLDILAEAHGTRSDLMDQPLPDADHTWYTDGSSFLQEGQRKAGAAVTTETEVIWARALPAGTSAQRAELIALTQALKMAEGKKLNVYTDSRYAFATAHIHGEIYRRRGWLTSEGKEIKNKDEILALLKALFLPKRLSIIHCPGHQKGNSAEARGNRMADQAAREVATRETPETSTLLAGKRTADGSEFEKRTADGSEFESPKKKAKVE

SEQ ID NO: 2233 - protein, 2093 aa, synthetic construct
MPAAKRVKLDGGDKKYSIGLDIGTNSVGWAVITDEYKVPSKKFKVLGNTDRHSIKKNLIGALLFDSGETAEATRLKRTARRRYTRRKNRICYLQEIFSNEMAKVDDSFFHRLEESFLVEEDKKHERHPIFGNIVDEVAYHEKYPTIYHLRKKLVDSTDKADLRLIYLALAHMIKFRGHFLIEGDLNPDNSDVDKLFIQLVQTYNQLFEENPINASGVDAKAILSARLSKSRRLENLIAQLPGEKKNGLFGNLIALSLGLTPNFKSNFDLAEDAKLQLSKDTYDDDLDNLLAQIGDQYADLFLAAKNLSDAILLSDILRVNTEITKAPLSASMIKRYDEHHQDLTLLKALVRQQLPEKYKEIFFDQSKNGYAGYIDGGASQEEFYKFIKPILEKMDGTEELLVKLNREDLLRKQRTFDNGSIPHQIHLGELHAILRRQEDFYPFLKDNREKIEKILTFRIPYYVGPLARGNSRFAWMTRKSEETITPWNFEEVVDKGASAQSFIERMTNFDKNLPNEKVLPKHSLLYEYFTVYNELTKVKYVTEGMRKPAFLSGEQKKAIVDLLFKTNRKVTVKQLKEDYFKKIECFDSVEISGVEDRFNASLGTYHDLLKIIKDKDFLDNEENEDILEDIVLTLTLFEDREMIEERLKTYAHLFDDKVMKQLKRRRYTGWGRLSRKLINGIRDKQSGKTILDFLKSDGFANRNFMQLIHDDSLTFKEDIQKAQVSGQGDSLHEHIANLAGSPAIKKGILQTVKVVDELVKVMGRHKPENIVIEMARENQTTQKGQKNSRERMKRIEEGIKELGSQILKEHPVENTQLQNEKLYLYYLQNGRDMYVDQELDINRLSDYDVDHIVPQSFLKDDSIDNKVLTRSDKARGKSDNVPSEEVVKKMKNYWRQLLNAKLITQRKFDNLTKAERGGLSELDKAGFIKRQLVETRQITKHVAQILDSRMNTKYDENDKLIREVKVITLKSKLVSDFRKDFQFYKVREINNYHHAHDAYLNAVVGTALIKKYPKLESEFVYGDYKVYDVRKMIAKSEQEIGKATAKYFFYSNIMNFFKTEITLANGEIRKRPLIETNGETGEIVWDKGRDFATVRKVLSMPQVNIVKKTEVQTGGFSKESILPKRNSDKLIARKKDWDPKKYGGFDSPTVAYSVLVVAKVEKGKSKKLKSVKELLGITIMERSSFEKNPIDFLEAKGYKEVKKDLIIKLPKYSLFELENGRKRMLASAGELQKGNELALPSKYVNFLYLASHYEKLKGSPEDNEQKQLFVEQHKHYLDEIIEQISEFSKRVILADANLDKVLSAYNKHRDKPIREQAENIIHLFTLTNLGAPAAFKYFDTTIDRKRYTSTKEVLDATLIHQSITGLYETRIDLSQLGGDGGGSSEAAAKGGTLNIEDEYRLHETSKEPDVSLGSTWLSDFPQAWAETGGMGLAVRQAPLIIPLKATSTPVSIKQYPMSQEARLGIKPHIQRLLDQGILVPCQSPWNTPLLPVKKPGTNDYRPVQDLREVNKRVEDIHPTVPNPYNLLSGLPPSHQWYTVLDLKDAFFCLRLHPTSQPLFAFEWRDPEMGISGQLTWTRLPQGFKNSPTLFNEALHRDLAGFRIQHPDLILLQYVDDLLLAATSELDCQQGTRALLQTLGDLGYRASAKKAQICQKQVKYLGYLLKEGQRWLTEARKETVMGQPIPKTPRQLREFLGTAGFCRLWIPGFAEMAAPLYPLTKPGTLFNWGPDQQKAFQEIKQALLTAPALGLPDLTKPFELFVDEKQGYAKGVLTQKLGPWRRPVAYLSKKLDPVAAGWPPCLRMVAAIAVLTKDAGKLTMGQPLVILAPHAVEALVKQPPDRWLSNARMTHYQALLLDTDRVQFGPVVALNPATLLPLPEEGLQHDCLDILAEAHGTRSDLMDQPLPDADHTWYTDGSSFLQEGQRKAGAAVTTETEVIWARALPAGTSAQRAELIALTQALKMAEGKKLNVYTDSRYAFATAHIHGEIYRRRGWLTSEGKEIKNKDEILALLKALFLPKRLSIIHCPGHQKGNSAEARGNRMADQAAREVATRETPETSTLLAGKRTADGSEFEKRTADGSEFESPKKKAKVE

SEQ ID NO: 2234 - protein, 2094 aa, synthetic construct
MPAAKRVKLDGGDKKYSIGLDIGTNSVGWAVITDEYKVPSKKFKVLGNTDRHSIKKNLIGALLFDSGETAEATRLKRTARRRYTRRKNRICYLQEIFSNEMAKVDDSFFHRLEESFLVEEDKKHERHPIFGNIVDEVAYHEKYPTIYHLRKKLVDSTDKADLRLIYLALAHMIKFRGHFLIEGDLNPDNSDVDKLFIQLVQTYNQLFEENPINASGVDAKAILSARLSKSRRLENLIAQLPGEKKNGLFGNLIALSLGLTPNFKSNFDLAEDAKLQLSKDTYDDDLDNLLAQIGDQYADLFLAAKNLSDAILLSDILRVNTEITKAPLSASMIKRYDEHHQDLTLLKALVRQQLPEKYKEIFFDQSKNGYAGYIDGGASQEEFYKFIKPILEKMDGTEELLVKLNREDLLRKQRTFDNGSIPHQIHLGELHAILRRQEDFYPFLKDNREKIEKILTFRIPYYVGPLARGNSRFAWMTRKSEETITPWNFEEVVDKGASAQSFIERMTNFDKNLPNEKVLPKHSLLYEYFTVYNELTKVKYVTEGMRKPAFLSGEQKKAIVDLLFKTNRKVTVKQLKEDYFKKIECFDSVEISGVEDRFNASLGTYHDLLKIIKDKDFLDNEENEDILEDIVLTLTLFEDREMIEERLKTYAHLFDDKVMKQLKRRRYTGWGRLSRKLINGIRDKQSGKTILDFLKSDGFANRNFMQLIHDDSLTFKEDIQKAQVSGQGDSLHEHIANLAGSPAIKKGILQTVKVVDELVKVMGRHKPENIVIEMARENQTTQKGQKNSRERMKRIEEGIKELGSQILKEHPVENTQLQNEKLYLYYLQNGRDMYVDQELDINRLSDYDVDHIVPQSFLKDDSIDNKVLTRSDKARGKSDNVPSEEVVKKMKNYWRQLLNAKLITQRKFDNLTKAERGGLSELDKAGFIKRQLVETRQITKHVAQILDSRMNTKYDENDKLIREVKVITLKSKLVSDFRKDFQFYKVREINNYHHAHDAYLNAVVGTALIKKYPKLESEFVYGDYKVYDVRKMIAKSEQEIGKATAKYFFYSNIMNFFKTEITLANGEIRKRPLIETNGETGEIVWDKGRDFATVRKVLSMPQVNIVKKTEVQTGGFSKESILPKRNSDKLIARKKDWDPKKYGGFDSPTVAYSVLVVAKVEKGKSKKLKSVKELLGITIMERSSFEKNPIDFLEAKGYKEVKKDLIIKLPKYSLFELENGRKRMLASAGELQKGNELALPSKYVNFLYLASHYEKLKGSPEDNEQKQLFVEQHKHYLDEIIEQISEFSKRVILADANLDKVLSAYNKHRDKPIREQAENIIHLFTLTNLGAPAAFKYFDTTIDRKRYTSTKEVLDATLIHQSITGLYETRIDLSQLGGDGGPAPGGGGSSGGTLNIEDEYRLHETSKEPDVSLGSTWLSDFPQAWAETGGMGLAVRQAPLIIPLKATSTPVSIKQYPMSQEARLGIKPHIQRLLDQGILVPCQSPWNTPLLPVKKPGTNDYRPVQDLREVNKRVEDIHPTVPNPYNLLSGLPPSHQWYTVLDLKDAFFCLRLHPTSQPLFAFEWRDPEMGISGQLTWTRLPQGFKNSPTLFNEALHRDLAGFRIQHPDLILLQYVDDLLLAATSELDCQQGTRALLQTLGDLGYRASAKKAQICQKQVKYLGYLLKEGQRWLTEARKETVMGQPIPKTPRQLREFLGTAGFCRLWIPGFAEMAAPLYPLTKPGTLFNWGPDQQKAFQEIKQALLTAPALGLPDLTKPFELFVDEKQGYAKGVLTQKLGPWRRPVAYLSKKLDPVAAGWPPCLRMVAAIAVLTKDAGKLTMGQPLVILAPHAVEALVKQPPDRWLSNARMTHYQALLLDTDRVQFGPVVALNPATLLPLPEEGLQHDCLDILAEAHGTRSDLMDQPLPDADHTWYTDGSSFLQEGQRKAGAAVTTETEVIWARALPAGTSAQRAELIALTQALKMAEGKKLNVYTDSRYAFATAHIHGEIYRRRGWLTSEGKEIKNKDEILALLKALFLPKRLSIIHCPGHQKGNSAEARGNRMADQAAREVATRETPETSTLLAGKRTADGSEFEKRTADGSEFESPKKKAKVE

SEQ ID NO: 2235 - protein, 2096 aa, synthetic construct
MPAAKRVKLDGGDKKYSIGLDIGTNSVGWAVITDEYKVPSKKFKVLGNTDRHSIKKNLIGALLFDSGETAEATRLKRTARRRYTRRKNRICYLQEIFSNEMAKVDDSFFHRLEESFLVEEDKKHERHPIFGNIVDEVAYHEKYPTIYHLRKKLVDSTDKADLRLIYLALAHMIKFRGHFLIEGDLNPDNSDVDKLFIQLVQTYNQLFEENPINASGVDAKAILSARLSKSRRLENLIAQLPGEKKNGLFGNLIALSLGLTPNFKSNFDLAEDAKLQLSKDTYDDDLDNLLAQIGDQYADLFLAAKNLSDAILLSDILRVNTEITKAPLSASMIKRYDEHHQDLTLLKALVRQQLPEKYKEIFFDQSKNGYAGYIDGGASQEEFYKFIKPILEKMDGTEELLVKLNREDLLRKQRTFDNGSIPHQIHLGELHAILRRQEDFYPFLKDNREKIEKILTFRIPYYVGPLARGNSRFAWMTRKSEETITPWNFEEVVDKGASAQSFIERMTNFDKNLPNEKVLPKHSLLYEYFTVYNELTKVKYVTEGMRKPAFLSGEQKKAIVDLLFKTNRKVTVKQLKEDYFKKIECFDSVEISGVEDRFNASLGTYHDLLKIIKDKDFLDNEENEDILEDIVLTLTLFEDREMIEERLKTYAHLFDDKVMKQLKRRRYTGWGRLSRKLINGIRDKQSGKTILDFLKSDGFANRNFMQLIHDDSLTFKEDIQKAQVSGQGDSLHEHIANLAGSPAIKKGILQTVKVVDELVKVMGRHKPENIVIEMARENQTTQKGQKNSRERMKRIEEGIKELGSQILKEHPVENTQLQNEKLYLYYLQNGRDMYVDQELDINRLSDYDVDHIVPQSFLKDDSIDNKVLTRSDKARGKSDNVPSEEVVKKMKNYWRQLLNAKLITQRKFDNLTKAERGGLSELDKAGFIKRQLVETRQITKHVAQILDSRMNTKYDENDKLIREVKVITLKSKLVSDFRKDFQFYKVREINNYHHAHDAYLNAVVGTALIKKYPKLESEFVYGDYKVYDVRKMIAKSEQEIGKATAKYFFYSNIMNFFKTEITLANGEIRKRPLIETNGETGEIVWDKGRDFATVRKVLSMPQVNIVKKTEVQTGGFSKESILPKRNSDKLIARKKDWDPKKYGGFDSPTVAYSVLVVAKVEKGKSKKLKSVKELLGITIMERSSFEKNPIDFLEAKGYKEVKKDLIIKLPKYSLFELENGRKRMLASAGELQKGNELALPSKYVNFLYLASHYEKLKGSPEDNEQKQLFVEQHKHYLDEIIEQISEFSKRVILADANLDKVLSAYNKHRDKPIREQAENIIHLFTLTNLGAPAAFKYFDTTIDRKRYTSTKEVLDATLIHQSITGLYETRIDLSQLGGDGGEAAAKGSSPAPGGTLNIEDEYRLHETSKEPDVSLGSTWLSDFPQAWAETGGMGLAVRQAPLIIPLKATSTPVSIKQYPMSQEARLGIKPHIQRLLDQGILVPCQSPWNTPLLPVKKPGTNDYRPVQDLREVNKRVEDIHPTVPNPYNLLSGLPPSHQWYTVLDLKDAFFCLRLHPTSQPLFAFEWRDPEMGISGQLTWTRLPQGFKNSPTLFNEALHRDLAGFRIQHPDLILLQYVDDLLLAATSELDCQQGTRALLQTLGDLGYRASAKKAQICQKQVKYLGYLLKEGQRWLTEARKETVMGQPIPKTPRQLREFLGTAGFCRLWIPGFAEMAAPLYPLTKPGTLFNWGPDQQKAFQEIKQALLTAPALGLPDLTKPFELFVDEKQGYAKGVLTQKLGPWRRPVAYLSKKLDPVAAGWPPCLRMVAAIAVLTKDAGKLTMGQPLVILAPHAVEALVKQPPDRWLSNARMTHYQALLLDTDRVQFGPVVALNPATLLPLPEEGLQHDCLDILAEAHGTRSDLMDQPLPDADHTWYTDGSSFLQEGQRKAGAAVTTETEVIWARALPAGTSAQRAELIALTQALKMAEGKKLNVYTDSRYAFATAHIHGEIYRRRGWLTSEGKEIKNKDEILALLKALFLPKRLSIIHCPGHQKGNSAEARGNRMADQAAREVATRETPETSTLLAGKRTADGSEFEKRTADGSEFESPKKKAKVE

SEQ ID NO: 2236 - protein, 2095 aa, synthetic construct
MPAAKRVKLDGGDKKYSIGLDIGTNSVGWAVITDEYKVPSKKFKVLGNTDRHSIKKNLIGALLFDSGETAEATRLKRTARRRYTRRKNRICYLQEIFSNEMAKVDDSFFHRLEESFLVEEDKKHERHPIFGNIVDEVAYHEKYPTIYHLRKKLVDSTDKADLRLIYLALAHMIKFRGHFLIEGDLNPDNSDVDKLFIQLVQTYNQLFEENPINASGVDAKAILSARLSKSRRLENLIAQLPGEKKNGLFGNLIALSLGLTPNFKSNFDLAEDAKLQLSKDTYDDDLDNLLAQIGDQYADLFLAAKNLSDAILLSDILRVNTEITKAPLSASMIKRYDEHHQDLTLLKALVRQQLPEKYKEIFFDQSKNGYAGYIDGGASQEEFYKFIKPILEKMDGTEELLVKLNREDLLRKQRTFDNGSIPHQIHLGELHAILRRQEDFYPFLKDNREKIEKILTFRIPYYVGPLARGNSRFAWMTRKSEETITPWNFEEVVDKGASAQSFIERMTNFDKNLPNEKVLPKHSLLYEYFTVYNELTKVKYVTEGMRKPAFLSGEQKKAIVDLLFKTNRKVTVKQLKEDYFKKIECFDSVEISGVEDRFNASLGTYHDLLKIIKDKDFLDNEENEDILEDIVLTLTLFEDREMIEERLKTYAHLFDDKVMKQLKRRRYTGWGRLSRKLINGIRDKQSGKTILDFLKSDGFANRNFMQLIHDDSLTFKEDIQKAQVSGQGDSLHEHIANLAGSPAIKKGILQTVKVVDELVKVMGRHKPENIVIEMARENQTTQKGQKNSRERMKRIEEGIKELGSQILKEHPVENTQLQNEKLYLYYLQNGRDMYVDQELDINRLSDYDVDHIVPQSFLKDDSIDNKVLTRSDKARGKSDNVPSEEVVKKMKNYWRQLLNAKLITQRKFDNLTKAERGGLSELDKAGFIKRQLVETRQITKHVAQILDSRMNTKYDENDKLIREVKVITLKSKLVSDFRKDFQFYKVREINNYHHAHDAYLNAVVGTALIKKYPKLESEFVYGDYKVYDVRKMIAKSEQEIGKATAKYFFYSNIMNFFKTEITLANGEIRKRPLIETNGETGEIVWDKGRDFATVRKVLSMPQVNIVKKTEVQTGGFSKESILPKRNSDKLIARKKDWDPKKYGGFDSPTVAYSVLVVAKVEKGKSKKLKSVKELLGITIMERSSFEKNPIDFLEAKGYKEVKKDLIIKLPKYSLFELENGRKRMLASAGELQKGNELALPSKYVNFLYLASHYEKLKGSPEDNEQKQLFVEQHKHYLDEIIEQISEFSKRVILADANLDKVLSAYNKHRDKPIREQAENIIHLFTLTNLGAPAAFKYFDTTIDRKRYTSTKEVLDATLIHQSITGLYETRIDLSQLGGDGGEAAAKEAAAKGGTLNIEDEYRLHETSKEPDVSLGSTWLSDFPQAWAETGGMGLAVRQAPLIIPLKATSTPVSIKQYPMSQEARLGIKPHIQRLLDQGILVPCQSPWNTPLLPVKKPGTNDYRPVQDLREVNKRVEDIHPTVPNPYNLLSGLPPSHQWYTVLDLKDAFFCLRLHPTSQPLFAFEWRDPEMGISGQLTWTRLPQGFKNSPTLFNEALHRDLAGFRIQHPDLILLQYVDDLLLAATSELDCQQGTRALLQTLGDLGYRASAKKAQICQKQVKYLGYLLKEGQRWLTEARKETVMGQPIPKTPRQLREFLGTAGFCRLWIPGFAEMAAPLYPLTKPGTLFNWGPDQQKAFQEIKQALLTAPALGLPDLTKPFELFVDEKQGYAKGVLTQKLGPWRRPVAYLSKKLDPVAAGWPPCLRMVAAIAVLTKDAGKLTMGQPLVILAPHAVEALVKQPPDRWLSNARMTHYQALLLDTDRVQFGPVVALNPATLLPLPEEGLQHDCLDILAEAHGTRSDLMDQPLPDADHTWYTDGSSFLQEGQRKAGAAVTTETEVIWARALPAGTSAQRAELIALTQALKMAEGKKLNVYTDSRYAFATAHIHGEIYRRRGWLTSEGKEIKNKDEILALLKALFLPKRLSIIHCPGHQKGNSAEARGNRMADQAAREVATRETPETSTLLAGKRTADGSEFEKRTADGSEFESPKKKAKVE

SEQ ID NO: 2237 - protein, 2105 aa, synthetic construct
MPAAKRVKLDGGDKKYSIGLDIGTNSVGWAVITDEYKVPSKKFKVLGNTDRHSIKKNLIGALLFDSGETAEATRLKRTARRRYTRRKNRICYLQEIFSNEMAKVDDSFFHRLEESFLVEEDKKHERHPIFGNIVDEVAYHEKYPTIYHLRKKLVDSTDKADLRLIYLALAHMIKFRGHFLIEGDLNPDNSDVDKLFIQLVQTYNQLFEENPINASGVDAKAILSARLSKSRRLENLIAQLPGEKKNGLFGNLIALSLGLTPNFKSNFDLAEDAKLQLSKDTYDDDLDNLLAQIGDQYADLFLAAKNLSDAILLSDILRVNTEITKAPLSASMIKRYDEHHQDLTLLKALVRQQLPEKYKEIFFDQSKNGYAGYIDGGASQEEFYKFIKPILEKMDGTEELLVKLNREDLLRKQRTFDNGSIPHQIHLGELHAILRRQEDFYPFLKDNREKIEKILTFRIPYYVGPLARGNSRFAWMTRKSEETITPWNFEEVVDKGASAQSFIERMTNFDKNLPNEKVLPKHSLLYEYFTVYNELTKVKYVTEGMRKPAFLSGEQKKAIVDLLFKTNRKVTVKQLKEDYFKKIECFDSVEISGVEDRFNASLGTYHDLLKIIKDKDFLDNEENEDILEDIVLTLTLFEDREMIEERLKTYAHLFDDKVMKQLKRRRYTGWGRLSRKLINGIRDKQSGKTILDFLKSDGFANRNFMQLIHDDSLTFKEDIQKAQVSGQGDSLHEHIANLAGSPAIKKGILQTVKVVDELVKVMGRHKPENIVIEMARENQTTQKGQKNSRERMKRIEEGIKELGSQILKEHPVENTQLQNEKLYLYYLQNGRDMYVDQELDINRLSDYDVDHIVPQSFLKDDSIDNKVLTRSDKARGKSDNVPSEEVVKKMKNYWRQLLNAKLITQRKFDNLTKAERGGLSELDKAGFIKRQLVETRQITKHVAQILDSRMNTKYDENDKLIREVKVITLKSKLVSDFRKDFQFYKVREINNYHHAHDAYLNAVVGTALIKKYPKLESEFVYGDYKVYDVRKMIAKSEQEIGKATAKYFFYSNIMNFFKTEITLANGEIRKRPLIETNGETGEIVWDKGRDFATVRKVLSMPQVNIVKKTEVQTGGFSKESILPKRNSDKLIARKKDWDPKKYGGFDSPTVAYSVLVVAKVEKGKSKKLKSVKELLGITIMERSSFEKNPIDFLEAKGYKEVKKDLIIKLPKYSLFELENGRKRMLASAGELQKGNELALPSKYVNFLYLASHYEKLKGSPEDNEQKQLFVEQHKHYLDEIIEQISEFSKRVILADANLDKVLSAYNKHRDKPIREQAENIIHLFTLTNLGAPAAFKYFDTTIDRKRYTSTKEVLDATLIHQSITGLYETRIDLSQLGGDGGEAAAKEAAAKEAAAKEAAAKGGTLNIEDEYRLHETSKEPDVSLGSTWLSDFPQAWAETGGMGLAVRQAPLIIPLKATSTPVSIKQYPMSQEARLGIKPHIQRLLDQGILVPCQSPWNTPLLPVKKPGTNDYRPVQDLREVNKRVEDIHPTVPNPYNLLSGLPPSHQWYTVLDLKDAFFCLRLHPTSQPLFAFEWRDPEMGISGQLTWTRLPQGFKNSPTLFNEALHRDLAGFRIQHPDLILLQYVDDLLLAATSELDCQQGTRALLQTLGDLGYRASAKKAQICQKQVKYLGYLLKEGQRWLTEARKETVMGQPIPKTPRQLREFLGTAGFCRLWIPGFAEMAAPLYPLTKPGTLFNWGPDQQKAFQEIKQALLTAPALGLPDLTKPFELFVDEKQGYAKGVLTQKLGPWRRPVAYLSKKLDPVAAGWPPCLRMVAAIAVLTKDAGKLTMGQPLVILAPHAVEALVKQPPDRWLSNARMTHYQALLLDTDRVQFGPVVALNPATLLPLPEEGLQHDCLDILAEAHGTRSDLMDQPLPDADHTWYTDGSSFLQEGQRKAGAAVTTETEVIWARALPAGTSAQRAELIALTQALKMAEGKKLNVYTDSRYAFATAHIHGEIYRRRGWLTSEGKEIKNKDEILALLKALFLPKRLSIIHCPGHQKGNSAEARGNRMADQAAREVATRETPETSTLLAGKRTADGSEFEKRTADGSEFESPKKKAKVE

SEQ ID NO: 2238 - protein, 2093 aa, synthetic construct
MPAAKRVKLDGGDKKYSIGLDIGTNSVGWAVITDEYKVPSKKFKVLGNTDRHSIKKNLIGALLFDSGETAEATRLKRTARRRYTRRKNRICYLQEIFSNEMAKVDDSFFHRLEESFLVEEDKKHERHPIFGNIVDEVAYHEKYPTIYHLRKKLVDSTDKADLRLIYLALAHMIKFRGHFLIEGDLNPDNSDVDKLFIQLVQTYNQLFEENPINASGVDAKAILSARLSKSRRLENLIAQLPGEKKNGLFGNLIALSLGLTPNFKSNFDLAEDAKLQLSKDTYDDDLDNLLAQIGDQYADLFLAAKNLSDAILLSDILRVNTEITKAPLSASMIKRYDEHHQDLTLLKALVRQQLPEKYKEIFFDQSKNGYAGYIDGGASQEEFYKFIKPILEKMDGTEELLVKLNREDLLRKQRTFDNGSIPHQIHLGELHAILRRQEDFYPFLKDNREKIEKILTFRIPYYVGPLARGNSRFAWMTRKSEETITPWNFEEVVDKGASAQSFIERMTNFDKNLPNEKVLPKHSLLYEYFTVYNELTKVKYVTEGMRKPAFLSGEQKKAIVDLLFKTNRKVTVKQLKEDYFKKIECFDSVEISGVEDRFNASLGTYHDLLKIIKDKDFLDNEENEDILEDIVLTLTLFEDREMIEERLKTYAHLFDDKVMKQLKRRRYTGWGRLSRKLINGIRDKQSGKTILDFLKSDGFANRNFMQLIHDDSLTFKEDIQKAQVSGQGDSLHEHIANLAGSPAIKKGILQTVKVVDELVKVMGRHKPENIVIEMARENQTTQKGQKNSRERMKRIEEGIKELGSQILKEHPVENTQLQNEKLYLYYLQNGRDMYVDQELDINRLSDYDVDHIVPQSFLKDDSIDNKVLTRSDKARGKSDNVPSEEVVKKMKNYWRQLLNAKLITQRKFDNLTKAERGGLSELDKAGFIKRQLVETRQITKHVAQILDSRMNTKYDENDKLIREVKVITLKSKLVSDFRKDFQFYKVREINNYHHAHDAYLNAVVGTALIKKYPKLESEFVYGDYKVYDVRKMIAKSEQEIGKATAKYFFYSNIMNFFKTEITLANGEIRKRPLIETNGETGEIVWDKGRDFATVRKVLSMPQVNIVKKTEVQTGGFSKESILPKRNSDKLIARKKDWDPKKYGGFDSPTVAYSVLVVAKVEKGKSKKLKSVKELLGITIMERSSFEKNPIDFLEAKGYKEVKKDLIIKLPKYSLFELENGRKRMLASAGELQKGNELALPSKYVNFLYLASHYEKLKGSPEDNEQKQLFVEQHKHYLDEIIEQISEFSKRVILADANLDKVLSAYNKHRDKPIREQAENIIHLFTLTNLGAPAAFKYFDTTIDRKRYTSTKEVLDATLIHQSITGLYETRIDLSQLGGDGGEAAAKGGSGGTLNIEDEYRLHETSKEPDVSLGSTWLSDFPQAWAETGGMGLAVRQAPLIIPLKATSTPVSIKQYPMSQEARLGIKPHIQRLLDQGILVPCQSPWNTPLLPVKKPGTNDYRPVQDLREVNKRVEDIHPTVPNPYNLLSGLPPSHQWYTVLDLKDAFFCLRLHPTSQPLFAFEWRDPEMGISGQLTWTRLPQGFKNSPTLFNEALHRDLAGFRIQHPDLILLQYVDDLLLAATSELDCQQGTRALLQTLGDLGYRASAKKAQICQKQVKYLGYLLKEGQRWLTEARKETVMGQPIPKTPRQLREFLGTAGFCRLWIPGFAEMAAPLYPLTKPGTLFNWGPDQQKAFQEIKQALLTAPALGLPDLTKPFELFVDEKQGYAKGVLTQKLGPWRRPVAYLSKKLDPVAAGWPPCLRMVAAIAVLTKDAGKLTMGQPLVILAPHAVEALVKQPPDRWLSNARMTHYQALLLDTDRVQFGPVVALNPATLLPLPEEGLQHDCLDILAEAHGTRSDLMDQPLPDADHTWYTDGSSFLQEGQRKAGAAVTTETEVIWARALPAGTSAQRAELIALTQALKMAEGKKLNVYTDSRYAFATAHIHGEIYRRRGWLTSEGKEIKNKDEILALLKALFLPKRLSIIHCPGHQKGNSAEARGNRMADQAAREVATRETPETSTLLAGKRTADGSEFEKRTADGSEFESPKKKAKVE

SEQ ID NO: 2239 - protein, 2096 aa, synthetic construct
MPAAKRVKLDGGDKKYSIGLDIGTNSVGWAVITDEYKVPSKKFKVLGNTDRHSIKKNLIGALLFDSGETAEATRLKRTARRRYTRRKNRICYLQEIFSNEMAKVDDSFFHRLEESFLVEEDKKHERHPIFGNIVDEVAYHEKYPTIYHLRKKLVDSTDKADLRLIYLALAHMIKFRGHFLIEGDLNPDNSDVDKLFIQLVQTYNQLFEENPINASGVDAKAILSARLSKSRRLENLIAQLPGEKKNGLFGNLIALSLGLTPNFKSNFDLAEDAKLQLSKDTYDDDLDNLLAQIGDQYADLFLAAKNLSDAILLSDILRVNTEITKAPLSASMIKRYDEHHQDLTLLKALVRQQLPEKYKEIFFDQSKNGYAGYIDGGASQEEFYKFIKPILEKMDGTEELLVKLNREDLLRKQRTFDNGSIPHQIHLGELHAILRRQEDFYPFLKDNREKIEKILTFRIPYYVGPLARGNSRFAWMTRKSEETITPWNFEEVVDKGASAQSFIERMTNFDKNLPNEKVLPKHSLLYEYFTVYNELTKVKYVTEGMRKPAFLSGEQKKAIVDLLFKTNRKVTVKQLKEDYFKKIECFDSVEISGVEDRFNASLGTYHDLLKIIKDKDFLDNEENEDILEDIVLTLTLFEDREMIEERLKTYAHLFDDKVMKQLKRRRYTGWGRLSRKLINGIRDKQSGKTILDFLKSDGFANRNFMQLIHDDSLTFKEDIQKAQVSGQGDSLHEHIANLAGSPAIKKGILQTVKVVDELVKVMGRHKPENIVIEMARENQTTQKGQKNSRERMKRIEEGIKELGSQILKEHPVENTQLQNEKLYLYYLQNGRDMYVDQELDINRLSDYDVDHIVPQSFLKDDSIDNKVLTRSDKARGKSDNVPSEEVVKKMKNYWRQLLNAKLITQRKFDNLTKAERGGLSELDKAGFIKRQLVETRQITKHVAQILDSRMNTKYDENDKLIREVKVITLKSKLVSDFRKDFQFYKVREINNYHHAHDAYLNAVVGTALIKKYPKLESEFVYGDYKVYDVRKMIAKSEQEIGKATAKYFFYSNIMNFFKTEITLANGEIRKRPLIETNGETGEIVWDKGRDFATVRKVLSMPQVNIVKKTEVQTGGFSKESILPKRNSDKLIARKKDWDPKKYGGFDSPTVAYSVLVVAKVEKGKSKKLKSVKELLGITIMERSSFEKNPIDFLEAKGYKEVKKDLIIKLPKYSLFELENGRKRMLASAGELQKGNELALPSKYVNFLYLASHYEKLKGSPEDNEQKQLFVEQHKHYLDEIIEQISEFSKRVILADANLDKVLSAYNKHRDKPIREQAENIIHLFTLTNLGAPAAFKYFDTTIDRKRYTSTKEVLDATLIHQSITGLYETRIDLSQLGGDGGEAAAKGGSGSSGGTLNIEDEYRLHETSKEPDVSLGSTWLSDFPQAWAETGGMGLAVRQAPLIIPLKATSTPVSIKQYPMSQEARLGIKPHIQRLLDQGILVPCQSPWNTPLLPVKKPGTNDYRPVQDLREVNKRVEDIHPTVPNPYNLLSGLPPSHQWYTVLDLKDAFFCLRLHPTSQPLFAFEWRDPEMGISGQLTWTRLPQGFKNSPTLFNEALHRDLAGFRIQHPDLILLQYVDDLLLAATSELDCQQGTRALLQTLGDLGYRASAKKAQICQKQVKYLGYLLKEGQRWLTEARKETVMGQPIPKTPRQLREFLGTAGFCRLWIPGFAEMAAPLYPLTKPGTLFNWGPDQQKAFQEIKQALLTAPALGLPDLTKPFELFVDEKQGYAKGVLTQKLGPWRRPVAYLSKKLDPVAAGWPPCLRMVAAIAVLTKDAGKLTMGQPLVILAPHAVEALVKQPPDRWLSNARMTHYQALLLDTDRVQFGPVVALNPATLLPLPEEGLQHDCLDILAEAHGTRSDLMDQPLPDADHTWYTDGSSFLQEGQRKAGAAVTTETEVIWARALPAGTSAQRAELIALTQALKMAEGKKLNVYTDSRYAFATAHIHGEIYRRRGWLTSEGKEIKNKDEILALLKALFLPKRLSIIHCPGHQKGNSAEARGNRMADQAAREVATRETPETSTLLAGKRTADGSEFEKRTADGSEFESPKKKAKVE

SEQ ID NO: 2240 - protein, 2100 aa, synthetic construct
MPAAKRVKLDGGDKKYSIGLDIGTNSVGWAVITDEYKVPSKKFKVLGNTDRHSIKKNLIGALLFDSGETAEATRLKRTARRRYTRRKNRICYLQEIFSNEMAKVDDSFFHRLEESFLVEEDKKHERHPIFGNIVDEVAYHEKYPTIYHLRKKLVDSTDKADLRLIYLALAHMIKFRGHFLIEGDLNPDNSDVDKLFIQLVQTYNQLFEENPINASGVDAKAILSARLSKSRRLENLIAQLPGEKKNGLFGNLIALSLGLTPNFKSNFDLAEDAKLQLSKDTYDDDLDNLLAQIGDQYADLFLAAKNLSDAILLSDILRVNTEITKAPLSASMIKRYDEHHQDLTLLKALVRQQLPEKYKEIFFDQSKNGYAGYIDGGASQEEFYKFIKPILEKMDGTEELLVKLNREDLLRKQRTFDNGSIPHQIHLGELHAILRRQEDFYPFLKDNREKIEKILTFRIPYYVGPLARGNSRFAWMTRKSEETITPWNFEEVVDKGASAQSFIERMTNFDKNLPNEKVLPKHSLLYEYFTVYNELTKVKYVTEGMRKPAFLSGEQKKAIVDLLFKTNRKVTVKQLKEDYFKKIECFDSVEISGVEDRFNASLGTYHDLLKIIKDKDFLDNEENEDILEDIVLTLTLFEDREMIEERLKTYAHLFDDKVMKQLKRRRYTGWGRLSRKLINGIRDKQSGKTILDFLKSDGFANRNFMQLIHDDSLTFKEDIQKAQVSGQGDSLHEHIANLAGSPAIKKGILQTVKVVDELVKVMGRHKPENIVIEMARENQTTQKGQKNSRERMKRIEEGIKELGSQILKEHPVENTQLQNEKLYLYYLQNGRDMYVDQELDINRLSDYDVDHIVPQSFLKDDSIDNKVLTRSDKARGKSDNVPSEEVVKKMKNYWRQLLNAKLITQRKFDNLTKAERGGLSELDKAGFIKRQLVETRQITKHVAQILDSRMNTKYDENDKLIREVKVITLKSKLVSDFRKDFQFYKVREINNYHHAHDAYLNAVVGTALIKKYPKLESEFVYGDYKVYDVRKMIAKSEQEIGKATAKYFFYSNIMNFFKTEITLANGEIRKRPLIETNGETGEIVWDKGRDFATVRKVLSMPQVNIVKKTEVQTGGFSKESILPKRNSDKLIARKKDWDPKKYGGFDSPTVAYSVLVVAKVEKGKSKKLKSVKELLGITIMERSSFEKNPIDFLEAKGYKEVKKDLIIKLPKYSLFELENGRKRMLASAGELQKGNELALPSKYVNFLYLASHYEKLKGSPEDNEQKQLFVEQHKHYLDEIIEQISEFSKRVILADANLDKVLSAYNKHRDKPIREQAENIIHLFTLTNLGAPAAFKYFDTTIDRKRYTSTKEVLDATLIHQSITGLYETRIDLSQLGGDGGGGGGSGGGGSGGGGSGGTLNIEDEYRLHETSKEPDVSLGSTWLSDFPQAWAETGGMGLAVRQAPLIIPLKATSTPVSIKQYPMSQEARLGIKPHIQRLLDQGILVPCQSPWNTPLLPVKKPGTNDYRPVQDLREVNKRVEDIHPTVPNPYNLLSGLPPSHQWYTVLDLKDAFFCLRLHPTSQPLFAFEWRDPEMGISGQLTWTRLPQGFKNSPTLFNEALHRDLAGFRIQHPDLILLQYVDDLLLAATSELDCQQGTRALLQTLGDLGYRASAKKAQICQKQVKYLGYLLKEGQRWLTEARKETVMGQPIPKTPRQLREFLGTAGFCRLWIPGFAEMAAPLYPLTKPGTLFNWGPDQQKAFQEIKQALLTAPALGLPDLTKPFELFVDEKQGYAKGVLTQKLGPWRRPVAYLSKKLDPVAAGWPPCLRMVAAIAVLTKDAGKLTMGQPLVILAPHAVEALVKQPPDRWLSNARMTHYQALLLDTDRVQFGPVVALNPATLLPLPEEGLQHDCLDILAEAHGTRSDLMDQPLPDADHTWYTDGSSFLQEGQRKAGAAVTTETEVIWARALPAGTSAQRAELIALTQALKMAEGKKLNVYTDSRYAFATAHIHGEIYRRRGWLTSEGKEIKNKDEILALLKALFLPKRLSIIHCPGHQKGNSAEARGNRMADQAAREVATRETPETSTLLAGKRTADGSEFEKRTADGSEFESPKKKAKVE

SEQ ID NO: 2241 - protein, 2093 aa, synthetic construct
MPAAKRVKLDGGDKKYSIGLDIGTNSVGWAVITDEYKVPSKKFKVLGNTDRHSIKKNLIGALLFDSGETAEATRLKRTARRRYTRRKNRICYLQEIFSNEMAKVDDSFFHRLEESFLVEEDKKHERHPIFGNIVDEVAYHEKYPTIYHLRKKLVDSTDKADLRLIYLALAHMIKFRGHFLIEGDLNPDNSDVDKLFIQLVQTYNQLFEENPINASGVDAKAILSARLSKSRRLENLIAQLPGEKKNGLFGNLIALSLGLTPNFKSNFDLAEDAKLQLSKDTYDDDLDNLLAQIGDQYADLFLAAKNLSDAILLSDILRVNTEITKAPLSASMIKRYDEHHQDLTLLKALVRQQLPEKYKEIFFDQSKNGYAGYIDGGASQEEFYKFIKPILEKMDGTEELLVKLNREDLLRKQRTFDNGSIPHQIHLGELHAILRRQEDFYPFLKDNREKIEKILTFRIPYYVGPLARGNSRFAWMTRKSEETITPWNFEEVVDKGASAQSFIERMTNFDKNLPNEKVLPKHSLLYEYFTVYNELTKVKYVTEGMRKPAFLSGEQKKAIVDLLFKTNRKVTVKQLKEDYFKKIECFDSVEISGVEDRFNASLGTYHDLLKIIKDKDFLDNEENEDILEDIVLTLTLFEDREMIEERLKTYAHLFDDKVMKQLKRRRYTGWGRLSRKLINGIRDKQSGKTILDFLKSDGFANRNFMQLIHDDSLTFKEDIQKAQVSGQGDSLHEHIANLAGSPAIKKGILQTVKVVDELVKVMGRHKPENIVIEMARENQTTQKGQKNSRERMKRIEEGIKELGSQILKEHPVENTQLQNEKLYLYYLQNGRDMYVDQELDINRLSDYDVDHIVPQSFLKDDSIDNKVLTRSDKARGKSDNVPSEEVVKKMKNYWRQLLNAKLITQRKFDNLTKAERGGLSELDKAGFIKRQLVETRQITKHVAQILDSRMNTKYDENDKLIREVKVITLKSKLVSDFRKDFQFYKVREINNYHHAHDAYLNAVVGTALIKKYPKLESEFVYGDYKVYDVRKMIAKSEQEIGKATAKYFFYSNIMNFFKTEITLANGEIRKRPLIETNGETGEIVWDKGRDFATVRKVLSMPQVNIVKKTEVQTGGFSKESILPKRNSDKLIARKKDWDPKKYGGFDSPTVAYSVLVVAKVEKGKSKKLKSVKELLGITIMERSSFEKNPIDFLEAKGYKEVKKDLIIKLPKYSLFELENGRKRMLASAGELQKGNELALPSKYVNFLYLASHYEKLKGSPEDNEQKQLFVEQHKHYLDEIIEQISEFSKRVILADANLDKVLSAYNKHRDKPIREQAENIIHLFTLTNLGAPAAFKYFDTTIDRKRYTSTKEVLDATLIHQSITGLYETRIDLSQLGGDGGGGGEAAAKGGTLNIEDEYRLHETSKEPDVSLGSTWLSDFPQAWAETGGMGLAVRQAPLIIPLKATSTPVSIKQYPMSQEARLGIKPHIQRLLDQGILVPCQSPWNTPLLPVKKPGTNDYRPVQDLREVNKRVEDIHPTVPNPYNLLSGLPPSHQWYTVLDLKDAFFCLRLHPTSQPLFAFEWRDPEMGISGQLTWTRLPQGFKNSPTLFNEALHRDLAGFRIQHPDLILLQYVDDLLLAATSELDCQQGTRALLQTLGDLGYRASAKKAQICQKQVKYLGYLLKEGQRWLTEARKETVMGQPIPKTPRQLREFLGTAGFCRLWIPGFAEMAAPLYPLTKPGTLFNWGPDQQKAFQEIKQALLTAPALGLPDLTKPFELFVDEKQGYAKGVLTQKLGPWRRPVAYLSKKLDPVAAGWPPCLRMVAAIAVLTKDAGKLTMGQPLVILAPHAVEALVKQPPDRWLSNARMTHYQALLLDTDRVQFGPVVALNPATLLPLPEEGLQHDCLDILAEAHGTRSDLMDQPLPDADHTWYTDGSSFLQEGQRKAGAAVTTETEVIWARALPAGTSAQRAELIALTQALKMAEGKKLNVYTDSRYAFATAHIHGEIYRRRGWLTSEGKEIKNKDEILALLKALFLPKRLSIIHCPGHQKGNSAEARGNRMADQAAREVATRETPETSTLLAGKRTADGSEFEKRTADGSEFESPKKKAKVE

SEQ ID NO: 2242 - protein, 2088 aa, synthetic construct
MPAAKRVKLDGGDKKYSIGLDIGTNSVGWAVITDEYKVPSKKFKVLGNTDRHSIKKNLIGALLFDSGETAEATRLKRTARRRYTRRKNRICYLQEIFSNEMAKVDDSFFHRLEESFLVEEDKKHERHPIFGNIVDEVAYHEKYPTIYHLRKKLVDSTDKADLRLIYLALAHMIKFRGHFLIEGDLNPDNSDVDKLFIQLVQTYNQLFEENPINASGVDAKAILSARLSKSRRLENLIAQLPGEKKNGLFGNLIALSLGLTPNFKSNFDLAEDAKLQLSKDTYDDDLDNLLAQIGDQYADLFLAAKNLSDAILLSDILRVNTEITKAPLSASMIKRYDEHHQDLTLLKALVRQQLPEKYKEIFFDQSKNGYAGYIDGGASQEEFYKFIKPILEKMDGTEELLVKLNREDLLRKQRTFDNGSIPHQIHLGELHAILRRQEDFYPFLKDNREKIEKILTFRIPYYVGPLARGNSRFAWMTRKSEETITPWNFEEVVDKGASAQSFIERMTNFDKNLPNEKVLPKHSLLYEYFTVYNELTKVKYVTEGMRKPAFLSGEQKKAIVDLLFKTNRKVTVKQLKEDYFKKIECFDSVEISGVEDRFNASLGTYHDLLKIIKDKDFLDNEENEDILEDIVLTLTLFEDREMIEERLKTYAHLFDDKVMKQLKRRRYTGWGRLSRKLINGIRDKQSGKTILDFLKSDGFANRNFMQLIHDDSLTFKEDIQKAQVSGQGDSLHEHIANLAGSPAIKKGILQTVKVVDELVKVMGRHKPENIVIEMARENQTTQKGQKNSRERMKRIEEGIKELGSQILKEHPVENTQLQNEKLYLYYLQNGRDMYVDQELDINRLSDYDVDHIVPQSFLKDDSIDNKVLTRSDKARGKSDNVPSEEVVKKMKNYWRQLLNAKLITQRKFDNLTKAERGGLSELDKAGFIKRQLVETRQITKHVAQILDSRMNTKYDENDKLIREVKVITLKSKLVSDFRKDFQFYKVREINNYHHAHDAYLNAVVGTALIKKYPKLESEFVYGDYKVYDVRKMIAKSEQEIGKATAKYFFYSNIMNFFKTEITLANGEIRKRPLIETNGETGEIVWDKGRDFATVRKVLSMPQVNIVKKTEVQTGGFSKESILPKRNSDKLIARKKDWDPKKYGGFDSPTVAYSVLVVAKVEKGKSKKLKSVKELLGITIMERSSFEKNPIDFLEAKGYKEVKKDLIIKLPKYSLFELENGRKRMLASAGELQKGNELALPSKYVNFLYLASHYEKLKGSPEDNEQKQLFVEQHKHYLDEIIEQISEFSKRVILADANLDKVLSAYNKHRDKPIREQAENIIHLFTLTNLGAPAAFKYFDTTIDRKRYTSTKEVLDATLIHQSITGLYETRIDLSQLGGDGGGSSGGTLNIEDEYRLHETSKEPDVSLGSTWLSDFPQAWAETGGMGLAVRQAPLIIPLKATSTPVSIKQYPMSQEARLGIKPHIQRLLDQGILVPCQSPWNTPLLPVKKPGTNDYRPVQDLREVNKRVEDIHPTVPNPYNLLSGLPPSHQWYTVLDLKDAFFCLRLHPTSQPLFAFEWRDPEMGISGQLTWTRLPQGFKNSPTLFNEALHRDLAGFRIQHPDLILLQYVDDLLLAATSELDCQQGTRALLQTLGDLGYRASAKKAQICQKQVKYLGYLLKEGQRWLTEARKETVMGQPIPKTPRQLREFLGTAGFCRLWIPGFAEMAAPLYPLTKPGTLFNWGPDQQKAFQEIKQALLTAPALGLPDLTKPFELFVDEKQGYAKGVLTQKLGPWRRPVAYLSKKLDPVAAGWPPCLRMVAAIAVLTKDAGKLTMGQPLVILAPHAVEALVKQPPDRWLSNARMTHYQALLLDTDRVQFGPVVALNPATLLPLPEEGLQHDCLDILAEAHGTRSDLMDQPLPDADHTWYTDGSSFLQEGQRKAGAAVTTETEVIWARALPAGTSAQRAELIALTQALKMAEGKKLNVYTDSRYAFATAHIHGEIYRRRGWLTSEGKEIKNKDEILALLKALFLPKRLSIIHCPGHQKGNSAEARGNRMADQAAREVATRETPETSTLLAGKRTADGSEFEKRTADGSEFESPKKKAKVE

SEQ ID NO: 2243 - protein, 2090 aa, synthetic construct
MPAAKRVKLDGGDKKYSIGLDIGTNSVGWAVITDEYKVPSKKFKVLGNTDRHSIKKNLIGALLFDSGETAEATRLKRTARRRYTRRKNRICYLQEIFSNEMAKVDDSFFHRLEESFLVEEDKKHERHPIFGNIVDEVAYHEKYPTIYHLRKKLVDSTDKADLRLIYLALAHMIKFRGHFLIEGDLNPDNSDVDKLFIQLVQTYNQLFEENPINASGVDAKAILSARLSKSRRLENLIAQLPGEKKNGLFGNLIALSLGLTPNFKSNFDLAEDAKLQLSKDTYDDDLDNLLAQIGDQYADLFLAAKNLSDAILLSDILRVNTEITKAPLSASMIKRYDEHHQDLTLLKALVRQQLPEKYKEIFFDQSKNGYAGYIDGGASQEEFYKFIKPILEKMDGTEELLVKLNREDLLRKQRTFDNGSIPHQIHLGELHAILRRQEDFYPFLKDNREKIEKILTFRIPYYVGPLARGNSRFAWMTRKSEETITPWNFEEVVDKGASAQSFIERMTNFDKNLPNEKVLPKHSLLYEYFTVYNELTKVKYVTEGMRKPAFLSGEQKKAIVDLLFKTNRKVTVKQLKEDYFKKIECFDSVEISGVEDRFNASLGTYHDLLKIIKDKDFLDNEENEDILEDIVLTLTLFEDREMIEERLKTYAHLFDDKVMKQLKRRRYTGWGRLSRKLINGIRDKQSGKTILDFLKSDGFANRNFMQLIHDDSLTFKEDIQKAQVSGQGDSLHEHIANLAGSPAIKKGILQTVKVVDELVKVMGRHKPENIVIEMARENQTTQKGQKNSRERMKRIEEGIKELGSQILKEHPVENTQLQNEKLYLYYLQNGRDMYVDQELDINRLSDYDVDHIVPQSFLKDDSIDNKVLTRSDKARGKSDNVPSEEVVKKMKNYWRQLLNAKLITQRKFDNLTKAERGGLSELDKAGFIKRQLVETRQITKHVAQILDSRMNTKYDENDKLIREVKVITLKSKLVSDFRKDFQFYKVREINNYHHAHDAYLNAVVGTALIKKYPKLESEFVYGDYKVYDVRKMIAKSEQEIGKATAKYFFYSNIMNFFKTEITLANGEIRKRPLIETNGETGEIVWDKGRDFATVRKVLSMPQVNIVKKTEVQTGGFSKESILPKRNSDKLIARKKDWDPKKYGGFDSPTVAYSVLVVAKVEKGKSKKLKSVKELLGITIMERSSFEKNPIDFLEAKGYKEVKKDLIIKLPKYSLFELENGRKRMLASAGELQKGNELALPSKYVNFLYLASHYEKLKGSPEDNEQKQLFVEQHKHYLDEIIEQISEFSKRVILADANLDKVLSAYNKHRDKPIREQAENIIHLFTLTNLGAPAAFKYFDTTIDRKRYTSTKEVLDATLIHQSITGLYETRIDLSQLGGDGGPAPAPGGTLNIEDEYRLHETSKEPDVSLGSTWLSDFPQAWAETGGMGLAVRQAPLIIPLKATSTPVSIKQYPMSQEARLGIKPHIQRLLDQGILVPCQSPWNTPLLPVKKPGTNDYRPVQDLREVNKRVEDIHPTVPNPYNLLSGLPPSHQWYTVLDLKDAFFCLRLHPTSQPLFAFEWRDPEMGISGQLTWTRLPQGFKNSPTLFNEALHRDLAGFRIQHPDLILLQYVDDLLLAATSELDCQQGTRALLQTLGDLGYRASAKKAQICQKQVKYLGYLLKEGQRWLTEARKETVMGQPIPKTPRQLREFLGTAGFCRLWIPGFAEMAAPLYPLTKPGTLFNWGPDQQKAFQEIKQALLTAPALGLPDLTKPFELFVDEKQGYAKGVLTQKLGPWRRPVAYLSKKLDPVAAGWPPCLRMVAAIAVLTKDAGKLTMGQPLVILAPHAVEALVKQPPDRWLSNARMTHYQALLLDTDRVQFGPVVALNPATLLPLPEEGLQHDCLDILAEAHGTRSDLMDQPLPDADHTWYTDGSSFLQEGQRKAGAAVTTETEVIWARALPAGTSAQRAELIALTQALKMAEGKKLNVYTDSRYAFATAHIHGEIYRRRGWLTSEGKEIKNKDEILALLKALFLPKRLSIIHCPGHQKGNSAEARGNRMADQAAREVATRETPETSTLLAGKRTADGSEFEKRTADGSEFESPKKKAKVE

SEQ ID NO: 2244 - protein, 2096 aa, synthetic construct
MPAAKRVKLDGGDKKYSIGLDIGTNSVGWAVITDEYKVPSKKFKVLGNTDRHSIKKNLIGALLFDSGETAEATRLKRTARRRYTRRKNRICYLQEIFSNEMAKVDDSFFHRLEESFLVEEDKKHERHPIFGNIVDEVAYHEKYPTIYHLRKKLVDSTDKADLRLIYLALAHMIKFRGHFLIEGDLNPDNSDVDKLFIQLVQTYNQLFEENPINASGVDAKAILSARLSKSRRLENLIAQLPGEKKNGLFGNLIALSLGLTPNFKSNFDLAEDAKLQLSKDTYDDDLDNLLAQIGDQYADLFLAAKNLSDAILLSDILRVNTEITKAPLSASMIKRYDEHHQDLTLLKALVRQQLPEKYKEIFFDQSKNGYAGYIDGGASQEEFYKFIKPILEKMDGTEELLVKLNREDLLRKQRTFDNGSIPHQIHLGELHAILRRQEDFYPFLKDNREKIEKILTFRIPYYVGPLARGNSRFAWMTRKSEETITPWNFEEVVDKGASAQSFIERMTNFDKNLPNEKVLPKHSLLYEYFTVYNELTKVKYVTEGMRKPAFLSGEQKKAIVDLLFKTNRKVTVKQLKEDYFKKIECFDSVEISGVEDRFNASLGTYHDLLKIIKDKDFLDNEENEDILEDIVLTLTLFEDREMIEERLKTYAHLFDDKVMKQLKRRRYTGWGRLSRKLINGIRDKQSGKTILDFLKSDGFANRNFMQLIHDDSLTFKEDIQKAQVSGQGDSLHEHIANLAGSPAIKKGILQTVKVVDELVKVMGRHKPENIVIEMARENQTTQKGQKNSRERMKRIEEGIKELGSQILKEHPVENTQLQNEKLYLYYLQNGRDMYVDQELDINRLSDYDVDHIVPQSFLKDDSIDNKVLTRSDKARGKSDNVPSEEVVKKMKNYWRQLLNAKLITQRKFDNLTKAERGGLSELDKAGFIKRQLVETRQITKHVAQILDSRMNTKYDENDKLIREVKVITLKSKLVSDFRKDFQFYKVREINNYHHAHDAYLNAVVGTALIKKYPKLESEFVYGDYKVYDVRKMIAKSEQEIGKATAKYFFYSNIMNFFKTEITLANGEIRKRPLIETNGETGEIVWDKGRDFATVRKVLSMPQVNIVKKTEVQTGGFSKESILPKRNSDKLIARKKDWDPKKYGGFDSPTVAYSVLVVAKVEKGKSKKLKSVKELLGITIMERSSFEKNPIDFLEAKGYKEVKKDLIIKLPKYSLFELENGRKRMLASAGELQKGNELALPSKYVNFLYLASHYEKLKGSPEDNEQKQLFVEQHKHYLDEIIEQISEFSKRVILADANLDKVLSAYNKHRDKPIREQAENIIHLFTLTNLGAPAAFKYFDTTIDRKRYTSTKEVLDATLIHQSITGLYETRIDLSQLGGDGGGSSEAAAKGGSGGTLNIEDEYRLHETSKEPDVSLGSTWLSDFPQAWAETGGMGLAVRQAPLIIPLKATSTPVSIKQYPMSQEARLGIKPHIQRLLDQGILVPCQSPWNTPLLPVKKPGTNDYRPVQDLREVNKRVEDIHPTVPNPYNLLSGLPPSHQWYTVLDLKDAFFCLRLHPTSQPLFAFEWRDPEMGISGQLTWTRLPQGFKNSPTLFNEALHRDLAGFRIQHPDLILLQYVDDLLLAATSELDCQQGTRALLQTLGDLGYRASAKKAQICQKQVKYLGYLLKEGQRWLTEARKETVMGQPIPKTPRQLREFLGTAGFCRLWIPGFAEMAAPLYPLTKPGTLFNWGPDQQKAFQEIKQALLTAPALGLPDLTKPFELFVDEKQGYAKGVLTQKLGPWRRPVAYLSKKLDPVAAGWPPCLRMVAAIAVLTKDAGKLTMGQPLVILAPHAVEALVKQPPDRWLSNARMTHYQALLLDTDRVQFGPVVALNPATLLPLPEEGLQHDCLDILAEAHGTRSDLMDQPLPDADHTWYTDGSSFLQEGQRKAGAAVTTETEVIWARALPAGTSAQRAELIALTQALKMAEGKKLNVYTDSRYAFATAHIHGEIYRRRGWLTSEGKEIKNKDEILALLKALFLPKRLSIIHCPGHQKGNSAEARGNRMADQAAREVATRETPETSTLLAGKRTADGSEFEKRTADGSEFESPKKKAKVE

SEQ ID NO: 2245 - protein, 2091 aa, synthetic construct
MPAAKRVKLDGGDKKYSIGLDIGTNSVGWAVITDEYKVPSKKFKVLGNTDRHSIKKNLIGALLFDSGETAEATRLKRTARRRYTRRKNRICYLQEIFSNEMAKVDDSFFHRLEESFLVEEDKKHERHPIFGNIVDEVAYHEKYPTIYHLRKKLVDSTDKADLRLIYLALAHMIKFRGHFLIEGDLNPDNSDVDKLFIQLVQTYNQLFEENPINASGVDAKAILSARLSKSRRLENLIAQLPGEKKNGLFGNLIALSLGLTPNFKSNFDLAEDAKLQLSKDTYDDDLDNLLAQIGDQYADLFLAAKNLSDAILLSDILRVNTEITKAPLSASMIKRYDEHHQDLTLLKALVRQQLPEKYKEIFFDQSKNGYAGYIDGGASQEEFYKFIKPILEKMDGTEELLVKLNREDLLRKQRTFDNGSIPHQIHLGELHAILRRQEDFYPFLKDNREKIEKILTFRIPYYVGPLARGNSRFAWMTRKSEETITPWNFEEVVDKGASAQSFIERMTNFDKNLPNEKVLPKHSLLYEYFTVYNELTKVKYVTEGMRKPAFLSGEQKKAIVDLLFKTNRKVTVKQLKEDYFKKIECFDSVEISGVEDRFNASLGTYHDLLKIIKDKDFLDNEENEDILEDIVLTLTLFEDREMIEERLKTYAHLFDDKVMKQLKRRRYTGWGRLSRKLINGIRDKQSGKTILDFLKSDGFANRNFMQLIHDDSLTFKEDIQKAQVSGQGDSLHEHIANLAGSPAIKKGILQTVKVVDELVKVMGRHKPENIVIEMARENQTTQKGQKNSRERMKRIEEGIKELGSQILKEHPVENTQLQNEKLYLYYLQNGRDMYVDQELDINRLSDYDVDHIVPQSFLKDDSIDNKVLTRSDKARGKSDNVPSEEVVKKMKNYWRQLLNAKLITQRKFDNLTKAERGGLSELDKAGFIKRQLVETRQITKHVAQILDSRMNTKYDENDKLIREVKVITLKSKLVSDFRKDFQFYKVREINNYHHAHDAYLNAVVGTALIKKYPKLESEFVYGDYKVYDVRKMIAKSEQEIGKATAKYFFYSNIMNFFKTEITLANGEIRKRPLIETNGETGEIVWDKGRDFATVRKVLSMPQVNIVKKTEVQTGGFSKESILPKRNSDKLIARKKDWDPKKYGGFDSPTVAYSVLVVAKVEKGKSKKLKSVKELLGITIMERSSFEKNPIDFLEAKGYKEVKKDLIIKLPKYSLFELENGRKRMLASAGELQKGNELALPSKYVNFLYLASHYEKLKGSPEDNEQKQLFVEQHKHYLDEIIEQISEFSKRVILADANLDKVLSAYNKHRDKPIREQAENIIHLFTLTNLGAPAAFKYFDTTIDRKRYTSTKEVLDATLIHQSITGLYETRIDLSQLGGDGGPAPGGSGGTLNIEDEYRLHETSKEPDVSLGSTWLSDFPQAWAETGGMGLAVRQAPLIIPLKATSTPVSIKQYPMSQEARLGIKPHIQRLLDQGILVPCQSPWNTPLLPVKKPGTNDYRPVQDLREVNKRVEDIHPTVPNPYNLLSGLPPSHQWYTVLDLKDAFFCLRLHPTSQPLFAFEWRDPEMGISGQLTWTRLPQGFKNSPTLFNEALHRDLAGFRIQHPDLILLQYVDDLLLAATSELDCQQGTRALLQTLGDLGYRASAKKAQICQKQVKYLGYLLKEGQRWLTEARKETVMGQPIPKTPRQLREFLGTAGFCRLWIPGFAEMAAPLYPLTKPGTLFNWGPDQQKAFQEIKQALLTAPALGLPDLTKPFELFVDEKQGYAKGVLTQKLGPWRRPVAYLSKKLDPVAAGWPPCLRMVAAIAVLTKDAGKLTMGQPLVILAPHAVEALVKQPPDRWLSNARMTHYQALLLDTDRVQFGPVVALNPATLLPLPEEGLQHDCLDILAEAHGTRSDLMDQPLPDADHTWYTDGSSFLQEGQRKAGAAVTTETEVIWARALPAGTSAQRAELIALTQALKMAEGKKLNVYTDSRYAFATAHIHGEIYRRRGWLTSEGKEIKNKDEILALLKALFLPKRLSIIHCPGHQKGNSAEARGNRMADQAAREVATRETPETSTLLAGKRTADGSEFEKRTADGSEFESPKKKAKVE

SEQ ID NO: 2246 - protein, 2096 aa, synthetic construct
MPAAKRVKLDGGDKKYSIGLDIGTNSVGWAVITDEYKVPSKKFKVLGNTDRHSIKKNLIGALLFDSGETAEATRLKRTARRRYTRRKNRICYLQEIFSNEMAKVDDSFFHRLEESFLVEEDKKHERHPIFGNIVDEVAYHEKYPTIYHLRKKLVDSTDKADLRLIYLALAHMIKFRGHFLIEGDLNPDNSDVDKLFIQLVQTYNQLFEENPINASGVDAKAILSARLSKSRRLENLIAQLPGEKKNGLFGNLIALSLGLTPNFKSNFDLAEDAKLQLSKDTYDDDLDNLLAQIGDQYADLFLAAKNLSDAILLSDILRVNTEITKAPLSASMIKRYDEHHQDLTLLKALVRQQLPEKYKEIFFDQSKNGYAGYIDGGASQEEFYKFIKPILEKMDGTEELLVKLNREDLLRKQRTFDNGSIPHQIHLGELHAILRRQEDFYPFLKDNREKIEKILTFRIPYYVGPLARGNSRFAWMTRKSEETITPWNFEEVVDKGASAQSFIERMTNFDKNLPNEKVLPKHSLLYEYFTVYNELTKVKYVTEGMRKPAFLSGEQKKAIVDLLFKTNRKVTVKQLKEDYFKKIECFDSVEISGVEDRFNASLGTYHDLLKIIKDKDFLDNEENEDILEDIVLTLTLFEDREMIEERLKTYAHLFDDKVMKQLKRRRYTGWGRLSRKLINGIRDKQSGKTILDFLKSDGFANRNFMQLIHDDSLTFKEDIQKAQVSGQGDSLHEHIANLAGSPAIKKGILQTVKVVDELVKVMGRHKPENIVIEMARENQTTQKGQKNSRERMKRIEEGIKELGSQILKEHPVENTQLQNEKLYLYYLQNGRDMYVDQELDINRLSDYDVDHIVPQSFLKDDSIDNKVLTRSDKARGKSDNVPSEEVVKKMKNYWRQLLNAKLITQRKFDNLTKAERGGLSELDKAGFIKRQLVETRQITKHVAQILDSRMNTKYDENDKLIREVKVITLKSKLVSDFRKDFQFYKVREINNYHHAHDAYLNAVVGTALIKKYPKLESEFVYGDYKVYDVRKMIAKSEQEIGKATAKYFFYSNIMNFFKTEITLANGEIRKRPLIETNGETGEIVWDKGRDFATVRKVLSMPQVNIVKKTEVQTGGFSKESILPKRNSDKLIARKKDWDPKKYGGFDSPTVAYSVLVVAKVEKGKSKKLKSVKELLGITIMERSSFEKNPIDFLEAKGYKEVKKDLIIKLPKYSLFELENGRKRMLASAGELQKGNELALPSKYVNFLYLASHYEKLKGSPEDNEQKQLFVEQHKHYLDEIIEQISEFSKRVILADANLDKVLSAYNKHRDKPIREQAENIIHLFTLTNLGAPAAFKYFDTTIDRKRYTSTKEVLDATLIHQSITGLYETRIDLSQLGGDGGGGGGGSEAAAKGGTLNIEDEYRLHETSKEPDVSLGSTWLSDFPQAWAETGGMGLAVRQAPLIIPLKATSTPVSIKQYPMSQEARLGIKPHIQRLLDQGILVPCQSPWNTPLLPVKKPGTNDYRPVQDLREVNKRVEDIHPTVPNPYNLLSGLPPSHQWYTVLDLKDAFFCLRLHPTSQPLFAFEWRDPEMGISGQLTWTRLPQGFKNSPTLFNEALHRDLAGFRIQHPDLILLQYVDDLLLAATSELDCQQGTRALLQTLGDLGYRASAKKAQICQKQVKYLGYLLKEGQRWLTEARKETVMGQPIPKTPRQLREFLGTAGFCRLWIPGFAEMAAPLYPLTKPGTLFNWGPDQQKAFQEIKQALLTAPALGLPDLTKPFELFVDEKQGYAKGVLTQKLGPWRRPVAYLSKKLDPVAAGWPPCLRMVAAIAVLTKDAGKLTMGQPLVILAPHAVEALVKQPPDRWLSNARMTHYQALLLDTDRVQFGPVVALNPATLLPLPEEGLQHDCLDILAEAHGTRSDLMDQPLPDADHTWYTDGSSFLQEGQRKAGAAVTTETEVIWARALPAGTSAQRAELIALTQALKMAEGKKLNVYTDSRYAFATAHIHGEIYRRRGWLTSEGKEIKNKDEILALLKALFLPKRLSIIHCPGHQKGNSAEARGNRMADQAAREVATRETPETSTLLAGKRTADGSEFEKRTADGSEFESPKKKAKVE

SEQ ID NO: 2247 - protein, 2096 aa, synthetic construct
MPAAKRVKLDGGDKKYSIGLDIGTNSVGWAVITDEYKVPSKKFKVLGNTDRHSIKKNLIGALLFDSGETAEATRLKRTARRRYTRRKNRICYLQEIFSNEMAKVDDSFFHRLEESFLVEEDKKHERHPIFGNIVDEVAYHEKYPTIYHLRKKLVDSTDKADLRLIYLALAHMIKFRGHFLIEGDLNPDNSDVDKLFIQLVQTYNQLFEENPINASGVDAKAILSARLSKSRRLENLIAQLPGEKKNGLFGNLIALSLGLTPNFKSNFDLAEDAKLQLSKDTYDDDLDNLLAQIGDQYADLFLAAKNLSDAILLSDILRVNTEITKAPLSASMIKRYDEHHQDLTLLKALVRQQLPEKYKEIFFDQSKNGYAGYIDGGASQEEFYKFIKPILEKMDGTEELLVKLNREDLLRKQRTFDNGSIPHQIHLGELHAILRRQEDFYPFLKDNREKIEKILTFRIPYYVGPLARGNSRFAWMTRKSEETITPWNFEEVVDKGASAQSFIERMTNFDKNLPNEKVLPKHSLLYEYFTVYNELTKVKYVTEGMRKPAFLSGEQKKAIVDLLFKTNRKVTVKQLKEDYFKKIECFDSVEISGVEDRFNASLGTYHDLLKIIKDKDFLDNEENEDILEDIVLTLTLFEDREMIEERLKTYAHLFDDKVMKQLKRRRYTGWGRLSRKLINGIRDKQSGKTILDFLKSDGFANRNFMQLIHDDSLTFKEDIQKAQVSGQGDSLHEHIANLAGSPAIKKGILQTVKVVDELVKVMGRHKPENIVIEMARENQTTQKGQKNSRERMKRIEEGIKELGSQILKEHPVENTQLQNEKLYLYYLQNGRDMYVDQELDINRLSDYDVDHIVPQSFLKDDSIDNKVLTRSDKARGKSDNVPSEEVVKKMKNYWRQLLNAKLITQRKFDNLTKAERGGLSELDKAGFIKRQLVETRQITKHVAQILDSRMNTKYDENDKLIREVKVITLKSKLVSDFRKDFQFYKVREINNYHHAHDAYLNAVVGTALIKKYPKLESEFVYGDYKVYDVRKMIAKSEQEIGKATAKYFFYSNIMNFFKTEITLANGEIRKRPLIETNGETGEIVWDKGRDFATVRKVLSMPQVNIVKKTEVQTGGFSKESILPKRNSDKLIARKKDWDPKKYGGFDSPTVAYSVLVVAKVEKGKSKKLKSVKELLGITIMERSSFEKNPIDFLEAKGYKEVKKDLIIKLPKYSLFELENGRKRMLASAGELQKGNELALPSKYVNFLYLASHYEKLKGSPEDNEQKQLFVEQHKHYLDEIIEQISEFSKRVILADANLDKVLSAYNKHRDKPIREQAENIIHLFTLTNLGAPAAFKYFDTTIDRKRYTSTKEVLDATLIHQSITGLYETRIDLSQLGGDGGPAPAPAPAPAPGGTLNIEDEYRLHETSKEPDVSLGSTWLSDFPQAWAETGGMGLAVRQAPLIIPLKATSTPVSIKQYPMSQEARLGIKPHIQRLLDQGILVPCQSPWNTPLLPVKKPGTNDYRPVQDLREVNKRVEDIHPTVPNPYNLLSGLPPSHQWYTVLDLKDAFFCLRLHPTSQPLFAFEWRDPEMGISGQLTWTRLPQGFKNSPTLFNEALHRDLAGFRIQHPDLILLQYVDDLLLAATSELDCQQGTRALLQTLGDLGYRASAKKAQICQKQVKYLGYLLKEGQRWLTEARKETVMGQPIPKTPRQLREFLGTAGFCRLWIPGFAEMAAPLYPLTKPGTLFNWGPDQQKAFQEIKQALLTAPALGLPDLTKPFELFVDEKQGYAKGVLTQKLGPWRRPVAYLSKKLDPVAAGWPPCLRMVAAIAVLTKDAGKLTMGQPLVILAPHAVEALVKQPPDRWLSNARMTHYQALLLDTDRVQFGPVVALNPATLLPLPEEGLQHDCLDILAEAHGTRSDLMDQPLPDADHTWYTDGSSFLQEGQRKAGAAVTTETEVIWARALPAGTSAQRAELIALTQALKMAEGKKLNVYTDSRYAFATAHIHGEIYRRRGWLTSEGKEIKNKDEILALLKALFLPKRLSIIHCPGHQKGNSAEARGNRMADQAAREVATRETPETSTLLAGKRTADGSEFEKRTADGSEFESPKKKAKVE

SEQ ID NO: 2248 - protein, 2096 aa, synthetic construct
MPAAKRVKLDGGDKKYSIGLDIGTNSVGWAVITDEYKVPSKKFKVLGNTDRHSIKKNLIGALLFDSGETAEATRLKRTARRRYTRRKNRICYLQEIFSNEMAKVDDSFFHRLEESFLVEEDKKHERHPIFGNIVDEVAYHEKYPTIYHLRKKLVDSTDKADLRLIYLALAHMIKFRGHFLIEGDLNPDNSDVDKLFIQLVQTYNQLFEENPINASGVDAKAILSARLSKSRRLENLIAQLPGEKKNGLFGNLIALSLGLTPNFKSNFDLAEDAKLQLSKDTYDDDLDNLLAQIGDQYADLFLAAKNLSDAILLSDILRVNTEITKAPLSASMIKRYDEHHQDLTLLKALVRQQLPEKYKEIFFDQSKNGYAGYIDGGASQEEFYKFIKPILEKMDGTEELLVKLNREDLLRKQRTFDNGSIPHQIHLGELHAILRRQEDFYPFLKDNREKIEKILTFRIPYYVGPLARGNSRFAWMTRKSEETITPWNFEEVVDKGASAQSFIERMTNFDKNLPNEKVLPKHSLLYEYFTVYNELTKVKYVTEGMRKPAFLSGEQKKAIVDLLFKTNRKVTVKQLKEDYFKKIECFDSVEISGVEDRFNASLGTYHDLLKIIKDKDFLDNEENEDILEDIVLTLTLFEDREMIEERLKTYAHLFDDKVMKQLKRRRYTGWGRLSRKLINGIRDKQSGKTILDFLKSDGFANRNFMQLIHDDSLTFKEDIQKAQVSGQGDSLHEHIANLAGSPAIKKGILQTVKVVDELVKVMGRHKPENIVIEMARENQTTQKGQKNSRERMKRIEEGIKELGSQILKEHPVENTQLQNEKLYLYYLQNGRDMYVDQELDINRLSDYDVDHIVPQSFLKDDSIDNKVLTRSDKARGKSDNVPSEEVVKKMKNYWRQLLNAKLITQRKFDNLTKAERGGLSELDKAGFIKRQLVETRQITKHVAQILDSRMNTKYDENDKLIREVKVITLKSKLVSDFRKDFQFYKVREINNYHHAHDAYLNAVVGTALIKKYPKLESEFVYGDYKVYDVRKMIAKSEQEIGKATAKYFFYSNIMNFFKTEITLANGEIRKRPLIETNGETGEIVWDKGRDFATVRKVLSMPQVNIVKKTEVQTGGFSKESILPKRNSDKLIARKKDWDPKKYGGFDSPTVAYSVLVVAKVEKGKSKKLKSVKELLGITIMERSSFEKNPIDFLEAKGYKEVKKDLIIKLPKYSLFELENGRKRMLASAGELQKGNELALPSKYVNFLYLASHYEKLKGSPEDNEQKQLFVEQHKHYLDEIIEQISEFSKRVILADANLDKVLSAYNKHRDKPIREQAENIIHLFTLTNLGAPAAFKYFDTTIDRKRYTSTKEVLDATLIHQSITGLYETRIDLSQLGGDGGPAPGGSEAAAKGGTLNIEDEYRLHETSKEPDVSLGSTWLSDFPQAWAETGGMGLAVRQAPLIIPLKATSTPVSIKQYPMSQEARLGIKPHIQRLLDQGILVPCQSPWNTPLLPVKKPGTNDYRPVQDLREVNKRVEDIHPTVPNPYNLLSGLPPSHQWYTVLDLKDAFFCLRLHPTSQPLFAFEWRDPEMGISGQLTWTRLPQGFKNSPTLFNEALHRDLAGFRIQHPDLILLQYVDDLLLAATSELDCQQGTRALLQTLGDLGYRASAKKAQICQKQVKYLGYLLKEGQRWLTEARKETVMGQPIPKTPRQLREFLGTAGFCRLWIPGFAEMAAPLYPLTKPGTLFNWGPDQQKAFQEIKQALLTAPALGLPDLTKPFELFVDEKQGYAKGVLTQKLGPWRRPVAYLSKKLDPVAAGWPPCLRMVAAIAVLTKDAGKLTMGQPLVILAPHAVEALVKQPPDRWLSNARMTHYQALLLDTDRVQFGPVVALNPATLLPLPEEGLQHDCLDILAEAHGTRSDLMDQPLPDADHTWYTDGSSFLQEGQRKAGAAVTTETEVIWARALPAGTSAQRAELIALTQALKMAEGKKLNVYTDSRYAFATAHIHGEIYRRRGWLTSEGKEIKNKDEILALLKALFLPKRLSIIHCPGHQKGNSAEARGNRMADQAAREVATRETPETSTLLAGKRTADGSEFEKRTADGSEFESPKKKAKVE

SEQ ID NO: 2249 - protein, 2115 aa, synthetic construct
MPAAKRVKLDGGDKKYSIGLDIGTNSVGWAVITDEYKVPSKKFKVLGNTDRHSIKKNLIGALLFDSGETAEATRLKRTARRRYTRRKNRICYLQEIFSNEMAKVDDSFFHRLEESFLVEEDKKHERHPIFGNIVDEVAYHEKYPTIYHLRKKLVDSTDKADLRLIYLALAHMIKFRGHFLIEGDLNPDNSDVDKLFIQLVQTYNQLFEENPINASGVDAKAILSARLSKSRRLENLIAQLPGEKKNGLFGNLIALSLGLTPNFKSNFDLAEDAKLQLSKDTYDDDLDNLLAQIGDQYADLFLAAKNLSDAILLSDILRVNTEITKAPLSASMIKRYDEHHQDLTLLKALVRQQLPEKYKEIFFDQSKNGYAGYIDGGASQEEFYKFIKPILEKMDGTEELLVKLNREDLLRKQRTFDNGSIPHQIHLGELHAILRRQEDFYPFLKDNREKIEKILTFRIPYYVGPLARGNSRFAWMTRKSEETITPWNFEEVVDKGASAQSFIERMTNFDKNLPNEKVLPKHSLLYEYFTVYNELTKVKYVTEGMRKPAFLSGEQKKAIVDLLFKTNRKVTVKQLKEDYFKKIECFDSVEISGVEDRFNASLGTYHDLLKIIKDKDFLDNEENEDILEDIVLTLTLFEDREMIEERLKTYAHLFDDKVMKQLKRRRYTGWGRLSRKLINGIRDKQSGKTILDFLKSDGFANRNFMQLIHDDSLTFKEDIQKAQVSGQGDSLHEHIANLAGSPAIKKGILQTVKVVDELVKVMGRHKPENIVIEMARENQTTQKGQKNSRERMKRIEEGIKELGSQILKEHPVENTQLQNEKLYLYYLQNGRDMYVDQELDINRLSDYDVDHIVPQSFLKDDSIDNKVLTRSDKARGKSDNVPSEEVVKKMKNYWRQLLNAKLITQRKFDNLTKAERGGLSELDKAGFIKRQLVETRQITKHVAQILDSRMNTKYDENDKLIREVKVITLKSKLVSDFRKDFQFYKVREINNYHHAHDAYLNAVVGTALIKKYPKLESEFVYGDYKVYDVRKMIAKSEQEIGKATAKYFFYSNIMNFFKTEITLANGEIRKRPLIETNGETGEIVWDKGRDFATVRKVLSMPQVNIVKKTEVQTGGFSKESILPKRNSDKLIARKKDWDPKKYGGFDSPTVAYSVLVVAKVEKGKSKKLKSVKELLGITIMERSSFEKNPIDFLEAKGYKEVKKDLIIKLPKYSLFELENGRKRMLASAGELQKGNELALPSKYVNFLYLASHYEKLKGSPEDNEQKQLFVEQHKHYLDEIIEQISEFSKRVILADANLDKVLSAYNKHRDKPIREQAENIIHLFTLTNLGAPAAFKYFDTTIDRKRYTSTKEVLDATLIHQSITGLYETRIDLSQLGGDGGEAAAKEAAAKEAAAKEAAAKEAAAKEAAAKGGTLNIEDEYRLHETSKEPDVSLGSTWLSDFPQAWAETGGMGLAVRQAPLIIPLKATSTPVSIKQYPMSQEARLGIKPHIQRLLDQGILVPCQSPWNTPLLPVKKPGTNDYRPVQDLREVNKRVEDIHPTVPNPYNLLSGLPPSHQWYTVLDLKDAFFCLRLHPTSQPLFAFEWRDPEMGISGQLTWTRLPQGFKNSPTLFNEALHRDLAGFRIQHPDLILLQYVDDLLLAATSELDCQQGTRALLQTLGDLGYRASAKKAQICQKQVKYLGYLLKEGQRWLTEARKETVMGQPIPKTPRQLREFLGTAGFCRLWIPGFAEMAAPLYPLTKPGTLFNWGPDQQKAFQEIKQALLTAPALGLPDLTKPFELFVDEKQGYAKGVLTQKLGPWRRPVAYLSKKLDPVAAGWPPCLRMVAAIAVLTKDAGKLTMGQPLVILAPHAVEALVKQPPDRWLSNARMTHYQALLLDTDRVQFGPVVALNPATLLPLPEEGLQHDCLDILAEAHGTRSDLMDQPLPDADHTWYTDGSSFLQEGQRKAGAAVTTETEVIWARALPAGTSAQRAELIALTQALKMAEGKKLNVYTDSRYAFATAHIHGEIYRRRGWLTSEGKEIKNKDEILALLKALFLPKRLSIIHCPGHQKGNSAEARGNRMADQAAREVATRETPETSTLLAGKRTADGSEFEKRTADGSEFESPKKKAKVE

SEQ ID NO: 2250 - protein, 2097 aa, synthetic construct
MPAAKRVKLDGGDKKYSIGLDIGTNSVGWAVITDEYKVPSKKFKVLGNTDRHSIKKNLIGALLFDSGETAEATRLKRTARRRYTRRKNRICYLQEIFSNEMAKVDDSFFHRLEESFLVEEDKKHERHPIFGNIVDEVAYHEKYPTIYHLRKKLVDSTDKADLRLIYLALAHMIKFRGHFLIEGDLNPDNSDVDKLFIQLVQTYNQLFEENPINASGVDAKAILSARLSKSRRLENLIAQLPGEKKNGLFGNLIALSLGLTPNFKSNFDLAEDAKLQLSKDTYDDDLDNLLAQIGDQYADLFLAAKNLSDAILLSDILRVNTEITKAPLSASMIKRYDEHHQDLTLLKALVRQQLPEKYKEIFFDQSKNGYAGYIDGGASQEEFYKFIKPILEKMDGTEELLVKLNREDLLRKQRTFDNGSIPHQIHLGELHAILRRQEDFYPFLKDNREKIEKILTFRIPYYVGPLARGNSRFAWMTRKSEETITPWNFEEVVDKGASAQSFIERMTNFDKNLPNEKVLPKHSLLYEYFTVYNELTKVKYVTEGMRKPAFLSGEQKKAIVDLLFKTNRKVTVKQLKEDYFKKIECFDSVEISGVEDRFNASLGTYHDLLKIIKDKDFLDNEENEDILEDIVLTLTLFEDREMIEERLKTYAHLFDDKVMKQLKRRRYTGWGRLSRKLINGIRDKQSGKTILDFLKSDGFANRNFMQLIHDDSLTFKEDIQKAQVSGQGDSLHEHIANLAGSPAIKKGILQTVKVVDELVKVMGRHKPENIVIEMARENQTTQKGQKNSRERMKRIEEGIKELGSQILKEHPVENTQLQNEKLYLYYLQNGRDMYVDQELDINRLSDYDVDHIVPQSFLKDDSIDNKVLTRSDKARGKSDNVPSEEVVKKMKNYWRQLLNAKLITQRKFDNLTKAERGGLSELDKAGFIKRQLVETRQITKHVAQILDSRMNTKYDENDKLIREVKVITLKSKLVSDFRKDFQFYKVREINNYHHAHDAYLNAVVGTALIKKYPKLESEFVYGDYKVYDVRKMIAKSEQEIGKATAKYFFYSNIMNFFKTEITLANGEIRKRPLIETNGETGEIVWDKGRDFATVRKVLSMPQVNIVKKTEVQTGGFSKESILPKRNSDKLIARKKDWDPKKYGGFDSPTVAYSVLVVAKVEKGKSKKLKSVKELLGITIMERSSFEKNPIDFLEAKGYKEVKKDLIIKLPKYSLFELENGRKRMLASAGELQKGNELALPSKYVNFLYLASHYEKLKGSPEDNEQKQLFVEQHKHYLDEIIEQISEFSKRVILADANLDKVLSAYNKHRDKPIREQAENIIHLFTLTNLGAPAAFKYFDTTIDRKRYTSTKEVLDATLIHQSITGLYETRIDLSQLGGDGGGGSGGSGGSGGSGGTLNIEDEYRLHETSKEPDVSLGSTWLSDFPQAWAETGGMGLAVRQAPLIIPLKATSTPVSIKQYPMSQEARLGIKPHIQRLLDQGILVPCQSPWNTPLLPVKKPGTNDYRPVQDLREVNKRVEDIHPTVPNPYNLLSGLPPSHQWYTVLDLKDAFFCLRLHPTSQPLFAFEWRDPEMGISGQLTWTRLPQGFKNSPTLFNEALHRDLAGFRIQHPDLILLQYVDDLLLAATSELDCQQGTRALLQTLGDLGYRASAKKAQICQKQVKYLGYLLKEGQRWLTEARKETVMGQPIPKTPRQLREFLGTAGFCRLWIPGFAEMAAPLYPLTKPGTLFNWGPDQQKAFQEIKQALLTAPALGLPDLTKPFELFVDEKQGYAKGVLTQKLGPWRRPVAYLSKKLDPVAAGWPPCLRMVAAIAVLTKDAGKLTMGQPLVILAPHAVEALVKQPPDRWLSNARMTHYQALLLDTDRVQFGPVVALNPATLLPLPEEGLQHDCLDILAEAHGTRSDLMDQPLPDADHTWYTDGSSFLQEGQRKAGAAVTTETEVIWARALPAGTSAQRAELIALTQALKMAEGKKLNVYTDSRYAFATAHIHGEIYRRRGWLTSEGKEIKNKDEILALLKALFLPKRLSIIHCPGHQKGNSAEARGNRMADQAAREVATRETPETSTLLAGKRTADGSEFEKRTADGSEFESPKKKAKVE

SEQ ID NO: 2251 - protein, 2096 aa, synthetic construct
MPAAKRVKLDGGDKKYSIGLDIGTNSVGWAVITDEYKVPSKKFKVLGNTDRHSIKKNLIGALLFDSGETAEATRLKRTARRRYTRRKNRICYLQEIFSNEMAKVDDSFFHRLEESFLVEEDKKHERHPIFGNIVDEVAYHEKYPTIYHLRKKLVDSTDKADLRLIYLALAHMIKFRGHFLIEGDLNPDNSDVDKLFIQLVQTYNQLFEENPINASGVDAKAILSARLSKSRRLENLIAQLPGEKKNGLFGNLIALSLGLTPNFKSNFDLAEDAKLQLSKDTYDDDLDNLLAQIGDQYADLFLAAKNLSDAILLSDILRVNTEITKAPLSASMIKRYDEHHQDLTLLKALVRQQLPEKYKEIFFDQSKNGYAGYIDGGASQEEFYKFIKPILEKMDGTEELLVKLNREDLLRKQRTFDNGSIPHQIHLGELHAILRRQEDFYPFLKDNREKIEKILTFRIPYYVGPLARGNSRFAWMTRKSEETITPWNFEEVVDKGASAQSFIERMTNFDKNLPNEKVLPKHSLLYEYFTVYNELTKVKYVTEGMRKPAFLSGEQKKAIVDLLFKTNRKVTVKQLKEDYFKKIECFDSVEISGVEDRFNASLGTYHDLLKIIKDKDFLDNEENEDILEDIVLTLTLFEDREMIEERLKTYAHLFDDKVMKQLKRRRYTGWGRLSRKLINGIRDKQSGKTILDFLKSDGFANRNFMQLIHDDSLTFKEDIQKAQVSGQGDSLHEHIANLAGSPAIKKGILQTVKVVDELVKVMGRHKPENIVIEMARENQTTQKGQKNSRERMKRIEEGIKELGSQILKEHPVENTQLQNEKLYLYYLQNGRDMYVDQELDINRLSDYDVDHIVPQSFLKDDSIDNKVLTRSDKARGKSDNVPSEEVVKKMKNYWRQLLNAKLITQRKFDNLTKAERGGLSELDKAGFIKRQLVETRQITKHVAQILDSRMNTKYDENDKLIREVKVITLKSKLVSDFRKDFQFYKVREINNYHHAHDAYLNAVVGTALIKKYPKLESEFVYGDYKVYDVRKMIAKSEQEIGKATAKYFFYSNIMNFFKTEITLANGEIRKRPLIETNGETGEIVWDKGRDFATVRKVLSMPQVNIVKKTEVQTGGFSKESILPKRNSDKLIARKKDWDPKKYGGFDSPTVAYSVLVVAKVEKGKSKKLKSVKELLGITIMERSSFEKNPIDFLEAKGYKEVKKDLIIKLPKYSLFELENGRKRMLASAGELQKGNELALPSKYVNFLYLASHYEKLKGSPEDNEQKQLFVEQHKHYLDEIIEQISEFSKRVILADANLDKVLSAYNKHRDKPIREQAENIIHLFTLTNLGAPAAFKYFDTTIDRKRYTSTKEVLDATLIHQSITGLYETRIDLSQLGGDGGGGSEAAAKPAPGGTLNIEDEYRLHETSKEPDVSLGSTWLSDFPQAWAETGGMGLAVRQAPLIIPLKATSTPVSIKQYPMSQEARLGIKPHIQRLLDQGILVPCQSPWNTPLLPVKKPGTNDYRPVQDLREVNKRVEDIHPTVPNPYNLLSGLPPSHQWYTVLDLKDAFFCLRLHPTSQPLFAFEWRDPEMGISGQLTWTRLPQGFKNSPTLFNEALHRDLAGFRIQHPDLILLQYVDDLLLAATSELDCQQGTRALLQTLGDLGYRASAKKAQICQKQVKYLGYLLKEGQRWLTEARKETVMGQPIPKTPRQLREFLGTAGFCRLWIPGFAEMAAPLYPLTKPGTLFNWGPDQQKAFQEIKQALLTAPALGLPDLTKPFELFVDEKQGYAKGVLTQKLGPWRRPVAYLSKKLDPVAAGWPPCLRMVAAIAVLTKDAGKLTMGQPLVILAPHAVEALVKQPPDRWLSNARMTHYQALLLDTDRVQFGPVVALNPATLLPLPEEGLQHDCLDILAEAHGTRSDLMDQPLPDADHTWYTDGSSFLQEGQRKAGAAVTTETEVIWARALPAGTSAQRAELIALTQALKMAEGKKLNVYTDSRYAFATAHIHGEIYRRRGWLTSEGKEIKNKDEILALLKALFLPKRLSIIHCPGHQKGNSAEARGNRMADQAAREVATRETPETSTLLAGKRTADGSEFEKRTADGSEFESPKKKAKVE

SEQ ID NO: 2252 - protein, 2100 aa, synthetic construct
MPAAKRVKLDGGDKKYSIGLDIGTNSVGWAVITDEYKVPSKKFKVLGNTDRHSIKKNLIGALLFDSGETAEATRLKRTARRRYTRRKNRICYLQEIFSNEMAKVDDSFFHRLEESFLVEEDKKHERHPIFGNIVDEVAYHEKYPTIYHLRKKLVDSTDKADLRLIYLALAHMIKFRGHFLIEGDLNPDNSDVDKLFIQLVQTYNQLFEENPINASGVDAKAILSARLSKSRRLENLIAQLPGEKKNGLFGNLIALSLGLTPNFKSNFDLAEDAKLQLSKDTYDDDLDNLLAQIGDQYADLFLAAKNLSDAILLSDILRVNTEITKAPLSASMIKRYDEHHQDLTLLKALVRQQLPEKYKEIFFDQSKNGYAGYIDGGASQEEFYKFIKPILEKMDGTEELLVKLNREDLLRKQRTFDNGSIPHQIHLGELHAILRRQEDFYPFLKDNREKIEKILTFRIPYYVGPLARGNSRFAWMTRKSEETITPWNFEEVVDKGASAQSFIERMTNFDKNLPNEKVLPKHSLLYEYFTVYNELTKVKYVTEGMRKPAFLSGEQKKAIVDLLFKTNRKVTVKQLKEDYFKKIECFDSVEISGVEDRFNASLGTYHDLLKIIKDKDFLDNEENEDILEDIVLTLTLFEDREMIEERLKTYAHLFDDKVMKQLKRRRYTGWGRLSRKLINGIRDKQSGKTILDFLKSDGFANRNFMQLIHDDSLTFKEDIQKAQVSGQGDSLHEHIANLAGSPAIKKGILQTVKVVDELVKVMGRHKPENIVIEMARENQTTQKGQKNSRERMKRIEEGIKELGSQILKEHPVENTQLQNEKLYLYYLQNGRDMYVDQELDINRLSDYDVDHIVPQSFLKDDSIDNKVLTRSDKARGKSDNVPSEEVVKKMKNYWRQLLNAKLITQRKFDNLTKAERGGLSELDKAGFIKRQLVETRQITKHVAQILDSRMNTKYDENDKLIREVKVITLKSKLVSDFRKDFQFYKVREINNYHHAHDAYLNAVVGTALIKKYPKLESEFVYGDYKVYDVRKMIAKSEQEIGKATAKYFFYSNIMNFFKTEITLANGEIRKRPLIETNGETGEIVWDKGRDFATVRKVLSMPQVNIVKKTEVQTGGFSKESILPKRNSDKLIARKKDWDPKKYGGFDSPTVAYSVLVVAKVEKGKSKKLKSVKELLGITIMERSSFEKNPIDFLEAKGYKEVKKDLIIKLPKYSLFELENGRKRMLASAGELQKGNELALPSKYVNFLYLASHYEKLKGSPEDNEQKQLFVEQHKHYLDEIIEQISEFSKRVILADANLDKVLSAYNKHRDKPIREQAENIIHLFTLTNLGAPAAFKYFDTTIDRKRYTSTKEVLDATLIHQSITGLYETRIDLSQLGGDGGEAAAKEAAAKEAAAKGGTLNIEDEYRLHETSKEPDVSLGSTWLSDFPQAWAETGGMGLAVRQAPLIIPLKATSTPVSIKQYPMSQEARLGIKPHIQRLLDQGILVPCQSPWNTPLLPVKKPGTNDYRPVQDLREVNKRVEDIHPTVPNPYNLLSGLPPSHQWYTVLDLKDAFFCLRLHPTSQPLFAFEWRDPEMGISGQLTWTRLPQGFKNSPTLFNEALHRDLAGFRIQHPDLILLQYVDDLLLAATSELDCQQGTRALLQTLGDLGYRASAKKAQICQKQVKYLGYLLKEGQRWLTEARKETVMGQPIPKTPRQLREFLGTAGFCRLWIPGFAEMAAPLYPLTKPGTLFNWGPDQQKAFQEIKQALLTAPALGLPDLTKPFELFVDEKQGYAKGVLTQKLGPWRRPVAYLSKKLDPVAAGWPPCLRMVAAIAVLTKDAGKLTMGQPLVILAPHAVEALVKQPPDRWLSNARMTHYQALLLDTDRVQFGPVVALNPATLLPLPEEGLQHDCLDILAEAHGTRSDLMDQPLPDADHTWYTDGSSFLQEGQRKAGAAVTTETEVIWARALPAGTSAQRAELIALTQALKMAEGKKLNVYTDSRYAFATAHIHGEIYRRRGWLTSEGKEIKNKDEILALLKALFLPKRLSIIHCPGHQKGNSAEARGNRMADQAAREVATRETPETSTLLAGKRTADGSEFEKRTADGSEFESPKKKAKVE

SEQ ID NO: 2253 - protein, 2096 aa, synthetic construct
MPAAKRVKLDGGDKKYSIGLDIGTNSVGWAVITDEYKVPSKKFKVLGNTDRHSIKKNLIGALLFDSGETAEATRLKRTARRRYTRRKNRICYLQEIFSNEMAKVDDSFFHRLEESFLVEEDKKHERHPIFGNIVDEVAYHEKYPTIYHLRKKLVDSTDKADLRLIYLALAHMIKFRGHFLIEGDLNPDNSDVDKLFIQLVQTYNQLFEENPINASGVDAKAILSARLSKSRRLENLIAQLPGEKKNGLFGNLIALSLGLTPNFKSNFDLAEDAKLQLSKDTYDDDLDNLLAQIGDQYADLFLAAKNLSDAILLSDILRVNTEITKAPLSASMIKRYDEHHQDLTLLKALVRQQLPEKYKEIFFDQSKNGYAGYIDGGASQEEFYKFIKPILEKMDGTEELLVKLNREDLLRKQRTFDNGSIPHQIHLGELHAILRRQEDFYPFLKDNREKIEKILTFRIPYYVGPLARGNSRFAWMTRKSEETITPWNFEEVVDKGASAQSFIERMTNFDKNLPNEKVLPKHSLLYEYFTVYNELTKVKYVTEGMRKPAFLSGEQKKAIVDLLFKTNRKVTVKQLKEDYFKKIECFDSVEISGVEDRFNASLGTYHDLLKIIKDKDFLDNEENEDILEDIVLTLTLFEDREMIEERLKTYAHLFDDKVMKQLKRRRYTGWGRLSRKLINGIRDKQSGKTILDFLKSDGFANRNFMQLIHDDSLTFKEDIQKAQVSGQGDSLHEHIANLAGSPAIKKGILQTVKVVDELVKVMGRHKPENIVIEMARENQTTQKGQKNSRERMKRIEEGIKELGSQILKEHPVENTQLQNEKLYLYYLQNGRDMYVDQELDINRLSDYDVDHIVPQSFLKDDSIDNKVLTRSDKARGKSDNVPSEEVVKKMKNYWRQLLNAKLITQRKFDNLTKAERGGLSELDKAGFIKRQLVETRQITKHVAQILDSRMNTKYDENDKLIREVKVITLKSKLVSDFRKDFQFYKVREINNYHHAHDAYLNAVVGTALIKKYPKLESEFVYGDYKVYDVRKMIAKSEQEIGKATAKYFFYSNIMNFFKTEITLANGEIRKRPLIETNGETGEIVWDKGRDFATVRKVLSMPQVNIVKKTEVQTGGFSKESILPKRNSDKLIARKKDWDPKKYGGFDSPTVAYSVLVVAKVEKGKSKKLKSVKELLGITIMERSSFEKNPIDFLEAKGYKEVKKDLIIKLPKYSLFELENGRKRMLASAGELQKGNELALPSKYVNFLYLASHYEKLKGSPEDNEQKQLFVEQHKHYLDEIIEQISEFSKRVILADANLDKVLSAYNKHRDKPIREQAENIIHLFTLTNLGAPAAFKYFDTTIDRKRYTSTKEVLDATLIHQSITGLYETRIDLSQLGGDGGPAPEAAAKGSSGGTLNIEDEYRLHETSKEPDVSLGSTWLSDFPQAWAETGGMGLAVRQAPLIIPLKATSTPVSIKQYPMSQEARLGIKPHIQRLLDQGILVPCQSPWNTPLLPVKKPGTNDYRPVQDLREVNKRVEDIHPTVPNPYNLLSGLPPSHQWYTVLDLKDAFFCLRLHPTSQPLFAFEWRDPEMGISGQLTWTRLPQGFKNSPTLFNEALHRDLAGFRIQHPDLILLQYVDDLLLAATSELDCQQGTRALLQTLGDLGYRASAKKAQICQKQVKYLGYLLKEGQRWLTEARKETVMGQPIPKTPRQLREFLGTAGFCRLWIPGFAEMAAPLYPLTKPGTLFNWGPDQQKAFQEIKQALLTAPALGLPDLTKPFELFVDEKQGYAKGVLTQKLGPWRRPVAYLSKKLDPVAAGWPPCLRMVAAIAVLTKDAGKLTMGQPLVILAPHAVEALVKQPPDRWLSNARMTHYQALLLDTDRVQFGPVVALNPATLLPLPEEGLQHDCLDILAEAHGTRSDLMDQPLPDADHTWYTDGSSFLQEGQRKAGAAVTTETEVIWARALPAGTSAQRAELIALTQALKMAEGKKLNVYTDSRYAFATAHIHGEIYRRRGWLTSEGKEIKNKDEILALLKALFLPKRLSIIHCPGHQKGNSAEARGNRMADQAAREVATRETPETSTLLAGKRTADGSEFEKRTADGSEFESPKKKAKVE

SEQ ID NO: 2254 - protein, 2090 aa, synthetic construct
MPAAKRVKLDGGDKKYSIGLDIGTNSVGWAVITDEYKVPSKKFKVLGNTDRHSIKKNLIGALLFDSGETAEATRLKRTARRRYTRRKNRICYLQEIFSNEMAKVDDSFFHRLEESFLVEEDKKHERHPIFGNIVDEVAYHEKYPTIYHLRKKLVDSTDKADLRLIYLALAHMIKFRGHFLIEGDLNPDNSDVDKLFIQLVQTYNQLFEENPINASGVDAKAILSARLSKSRRLENLIAQLPGEKKNGLFGNLIALSLGLTPNFKSNFDLAEDAKLQLSKDTYDDDLDNLLAQIGDQYADLFLAAKNLSDAILLSDILRVNTEITKAPLSASMIKRYDEHHQDLTLLKALVRQQLPEKYKEIFFDQSKNGYAGYIDGGASQEEFYKFIKPILEKMDGTEELLVKLNREDLLRKQRTFDNGSIPHQIHLGELHAILRRQEDFYPFLKDNREKIEKILTFRIPYYVGPLARGNSRFAWMTRKSEETITPWNFEEVVDKGASAQSFIERMTNFDKNLPNEKVLPKHSLLYEYFTVYNELTKVKYVTEGMRKPAFLSGEQKKAIVDLLFKTNRKVTVKQLKEDYFKKIECFDSVEISGVEDRFNASLGTYHDLLKIIKDKDFLDNEENEDILEDIVLTLTLFEDREMIEERLKTYAHLFDDKVMKQLKRRRYTGWGRLSRKLINGIRDKQSGKTILDFLKSDGFANRNFMQLIHDDSLTFKEDIQKAQVSGQGDSLHEHIANLAGSPAIKKGILQTVKVVDELVKVMGRHKPENIVIEMARENQTTQKGQKNSRERMKRIEEGIKELGSQILKEHPVENTQLQNEKLYLYYLQNGRDMYVDQELDINRLSDYDVDHIVPQSFLKDDSIDNKVLTRSDKARGKSDNVPSEEVVKKMKNYWRQLLNAKLITQRKFDNLTKAERGGLSELDKAGFIKRQLVETRQITKHVAQILDSRMNTKYDENDKLIREVKVITLKSKLVSDFRKDFQFYKVREINNYHHAHDAYLNAVVGTALIKKYPKLESEFVYGDYKVYDVRKMIAKSEQEIGKATAKYFFYSNIMNFFKTEITLANGEIRKRPLIETNGETGEIVWDKGRDFATVRKVLSMPQVNIVKKTEVQTGGFSKESILPKRNSDKLIARKKDWDPKKYGGFDSPTVAYSVLVVAKVEKGKSKKLKSVKELLGITIMERSSFEKNPIDFLEAKGYKEVKKDLIIKLPKYSLFELENGRKRMLASAGELQKGNELALPSKYVNFLYLASHYEKLKGSPEDNEQKQLFVEQHKHYLDEIIEQISEFSKRVILADANLDKVLSAYNKHRDKPIREQAENIIHLFTLTNLGAPAAFKYFDTTIDRKRYTSTKEVLDATLIHQSITGLYETRIDLSQLGGDGGGGGGGGGTLNIEDEYRLHETSKEPDVSLGSTWLSDFPQAWAETGGMGLAVRQAPLIIPLKATSTPVSIKQYPMSQEARLGIKPHIQRLLDQGILVPCQSPWNTPLLPVKKPGTNDYRPVQDLREVNKRVEDIHPTVPNPYNLLSGLPPSHQWYTVLDLKDAFFCLRLHPTSQPLFAFEWRDPEMGISGQLTWTRLPQGFKNSPTLFNEALHRDLAGFRIQHPDLILLQYVDDLLLAATSELDCQQGTRALLQTLGDLGYRASAKKAQICQKQVKYLGYLLKEGQRWLTEARKETVMGQPIPKTPRQLREFLGTAGFCRLWIPGFAEMAAPLYPLTKPGTLFNWGPDQQKAFQEIKQALLTAPALGLPDLTKPFELFVDEKQGYAKGVLTQKLGPWRRPVAYLSKKLDPVAAGWPPCLRMVAAIAVLTKDAGKLTMGQPLVILAPHAVEALVKQPPDRWLSNARMTHYQALLLDTDRVQFGPVVALNPATLLPLPEEGLQHDCLDILAEAHGTRSDLMDQPLPDADHTWYTDGSSFLQEGQRKAGAAVTTETEVIWARALPAGTSAQRAELIALTQALKMAEGKKLNVYTDSRYAFATAHIHGEIYRRRGWLTSEGKEIKNKDEILALLKALFLPKRLSIIHCPGHQKGNSAEARGNRMADQAAREVATRETPETSTLLAGKRTADGSEFEKRTADGSEFESPKKKAKVE

SEQ ID NO: 2255 - protein, 2096 aa, synthetic construct
MPAAKRVKLDGGDKKYSIGLDIGTNSVGWAVITDEYKVPSKKFKVLGNTDRHSIKKNLIGALLFDSGETAEATRLKRTARRRYTRRKNRICYLQEIFSNEMAKVDDSFFHRLEESFLVEEDKKHERHPIFGNIVDEVAYHEKYPTIYHLRKKLVDSTDKADLRLIYLALAHMIKFRGHFLIEGDLNPDNSDVDKLFIQLVQTYNQLFEENPINASGVDAKAILSARLSKSRRLENLIAQLPGEKKNGLFGNLIALSLGLTPNFKSNFDLAEDAKLQLSKDTYDDDLDNLLAQIGDQYADLFLAAKNLSDAILLSDILRVNTEITKAPLSASMIKRYDEHHQDLTLLKALVRQQLPEKYKEIFFDQSKNGYAGYIDGGASQEEFYKFIKPILEKMDGTEELLVKLNREDLLRKQRTFDNGSIPHQIHLGELHAILRRQEDFYPFLKDNREKIEKILTFRIPYYVGPLARGNSRFAWMTRKSEETITPWNFEEVVDKGASAQSFIERMTNFDKNLPNEKVLPKHSLLYEYFTVYNELTKVKYVTEGMRKPAFLSGEQKKAIVDLLFKTNRKVTVKQLKEDYFKKIECFDSVEISGVEDRFNASLGTYHDLLKIIKDKDFLDNEENEDILEDIVLTLTLFEDREMIEERLKTYAHLFDDKVMKQLKRRRYTGWGRLSRKLINGIRDKQSGKTILDFLKSDGFANRNFMQLIHDDSLTFKEDIQKAQVSGQGDSLHEHIANLAGSPAIKKGILQTVKVVDELVKVMGRHKPENIVIEMARENQTTQKGQKNSRERMKRIEEGIKELGSQILKEHPVENTQLQNEKLYLYYLQNGRDMYVDQELDINRLSDYDVDHIVPQSFLKDDSIDNKVLTRSDKARGKSDNVPSEEVVKKMKNYWRQLLNAKLITQRKFDNLTKAERGGLSELDKAGFIKRQLVETRQITKHVAQILDSRMNTKYDENDKLIREVKVITLKSKLVSDFRKDFQFYKVREINNYHHAHDAYLNAVVGTALIKKYPKLESEFVYGDYKVYDVRKMIAKSEQEIGKATAKYFFYSNIMNFFKTEITLANGEIRKRPLIETNGETGEIVWDKGRDFATVRKVLSMPQVNIVKKTEVQTGGFSKESILPKRNSDKLIARKKDWDPKKYGGFDSPTVAYSVLVVAKVEKGKSKKLKSVKELLGITIMERSSFEKNPIDFLEAKGYKEVKKDLIIKLPKYSLFELENGRKRMLASAGELQKGNELALPSKYVNFLYLASHYEKLKGSPEDNEQKQLFVEQHKHYLDEIIEQISEFSKRVILADANLDKVLSAYNKHRDKPIREQAENIIHLFTLTNLGAPAAFKYFDTTIDRKRYTSTKEVLDATLIHQSITGLYETRIDLSQLGGDGGEAAAKPAPGSSGGTLNIEDEYRLHETSKEPDVSLGSTWLSDFPQAWAETGGMGLAVRQAPLIIPLKATSTPVSIKQYPMSQEARLGIKPHIQRLLDQGILVPCQSPWNTPLLPVKKPGTNDYRPVQDLREVNKRVEDIHPTVPNPYNLLSGLPPSHQWYTVLDLKDAFFCLRLHPTSQPLFAFEWRDPEMGISGQLTWTRLPQGFKNSPTLFNEALHRDLAGFRIQHPDLILLQYVDDLLLAATSELDCQQGTRALLQTLGDLGYRASAKKAQICQKQVKYLGYLLKEGQRWLTEARKETVMGQPIPKTPRQLREFLGTAGFCRLWIPGFAEMAAPLYPLTKPGTLFNWGPDQQKAFQEIKQALLTAPALGLPDLTKPFELFVDEKQGYAKGVLTQKLGPWRRPVAYLSKKLDPVAAGWPPCLRMVAAIAVLTKDAGKLTMGQPLVILAPHAVEALVKQPPDRWLSNARMTHYQALLLDTDRVQFGPVVALNPATLLPLPEEGLQHDCLDILAEAHGTRSDLMDQPLPDADHTWYTDGSSFLQEGQRKAGAAVTTETEVIWARALPAGTSAQRAELIALTQALKMAEGKKLNVYTDSRYAFATAHIHGEIYRRRGWLTSEGKEIKNKDEILALLKALFLPKRLSIIHCPGHQKGNSAEARGNRMADQAAREVATRETPETSTLLAGKRTADGSEFEKRTADGSEFESPKKKAKVE

SEQ ID NO: 2256 - protein, 2096 aa, synthetic construct
MPAAKRVKLDGGDKKYSIGLDIGTNSVGWAVITDEYKVPSKKFKVLGNTDRHSIKKNLIGALLFDSGETAEATRLKRTARRRYTRRKNRICYLQEIFSNEMAKVDDSFFHRLEESFLVEEDKKHERHPIFGNIVDEVAYHEKYPTIYHLRKKLVDSTDKADLRLIYLALAHMIKFRGHFLIEGDLNPDNSDVDKLFIQLVQTYNQLFEENPINASGVDAKAILSARLSKSRRLENLIAQLPGEKKNGLFGNLIALSLGLTPNFKSNFDLAEDAKLQLSKDTYDDDLDNLLAQIGDQYADLFLAAKNLSDAILLSDILRVNTEITKAPLSASMIKRYDEHHQDLTLLKALVRQQLPEKYKEIFFDQSKNGYAGYIDGGASQEEFYKFIKPILEKMDGTEELLVKLNREDLLRKQRTFDNGSIPHQIHLGELHAILRRQEDFYPFLKDNREKIEKILTFRIPYYVGPLARGNSRFAWMTRKSEETITPWNFEEVVDKGASAQSFIERMTNFDKNLPNEKVLPKHSLLYEYFTVYNELTKVKYVTEGMRKPAFLSGEQKKAIVDLLFKTNRKVTVKQLKEDYFKKIECFDSVEISGVEDRFNASLGTYHDLLKIIKDKDFLDNEENEDILEDIVLTLTLFEDREMIEERLKTYAHLFDDKVMKQLKRRRYTGWGRLSRKLINGIRDKQSGKTILDFLKSDGFANRNFMQLIHDDSLTFKEDIQKAQVSGQGDSLHEHIANLAGSPAIKKGILQTVKVVDELVKVMGRHKPENIVIEMARENQTTQKGQKNSRERMKRIEEGIKELGSQILKEHPVENTQLQNEKLYLYYLQNGRDMYVDQELDINRLSDYDVDHIVPQSFLKDDSIDNKVLTRSDKARGKSDNVPSEEVVKKMKNYWRQLLNAKLITQRKFDNLTKAERGGLSELDKAGFIKRQLVETRQITKHVAQILDSRMNTKYDENDKLIREVKVITLKSKLVSDFRKDFQFYKVREINNYHHAHDAYLNAVVGTALIKKYPKLESEFVYGDYKVYDVRKMIAKSEQEIGKATAKYFFYSNIMNFFKTEITLANGEIRKRPLIETNGETGEIVWDKGRDFATVRKVLSMPQVNIVKKTEVQTGGFSKESILPKRNSDKLIARKKDWDPKKYGGFDSPTVAYSVLVVAKVEKGKSKKLKSVKELLGITIMERSSFEKNPIDFLEAKGYKEVKKDLIIKLPKYSLFELENGRKRMLASAGELQKGNELALPSKYVNFLYLASHYEKLKGSPEDNEQKQLFVEQHKHYLDEIIEQISEFSKRVILADANLDKVLSAYNKHRDKPIREQAENIIHLFTLTNLGAPAAFKYFDTTIDRKRYTSTKEVLDATLIHQSITGLYETRIDLSQLGGDGGEAAAKGGGGGSGGTLNIEDEYRLHETSKEPDVSLGSTWLSDFPQAWAETGGMGLAVRQAPLIIPLKATSTPVSIKQYPMSQEARLGIKPHIQRLLDQGILVPCQSPWNTPLLPVKKPGTNDYRPVQDLREVNKRVEDIHPTVPNPYNLLSGLPPSHQWYTVLDLKDAFFCLRLHPTSQPLFAFEWRDPEMGISGQLTWTRLPQGFKNSPTLFNEALHRDLAGFRIQHPDLILLQYVDDLLLAATSELDCQQGTRALLQTLGDLGYRASAKKAQICQKQVKYLGYLLKEGQRWLTEARKETVMGQPIPKTPRQLREFLGTAGFCRLWIPGFAEMAAPLYPLTKPGTLFNWGPDQQKAFQEIKQALLTAPALGLPDLTKPFELFVDEKQGYAKGVLTQKLGPWRRPVAYLSKKLDPVAAGWPPCLRMVAAIAVLTKDAGKLTMGQPLVILAPHAVEALVKQPPDRWLSNARMTHYQALLLDTDRVQFGPVVALNPATLLPLPEEGLQHDCLDILAEAHGTRSDLMDQPLPDADHTWYTDGSSFLQEGQRKAGAAVTTETEVIWARALPAGTSAQRAELIALTQALKMAEGKKLNVYTDSRYAFATAHIHGEIYRRRGWLTSEGKEIKNKDEILALLKALFLPKRLSIIHCPGHQKGNSAEARGNRMADQAAREVATRETPETSTLLAGKRTADGSEFEKRTADGSEFESPKKKAKVE

SEQ ID NO: 2257 - protein, 2096 aa, synthetic construct
MPAAKRVKLDGGDKKYSIGLDIGTNSVGWAVITDEYKVPSKKFKVLGNTDRHSIKKNLIGALLFDSGETAEATRLKRTARRRYTRRKNRICYLQEIFSNEMAKVDDSFFHRLEESFLVEEDKKHERHPIFGNIVDEVAYHEKYPTIYHLRKKLVDSTDKADLRLIYLALAHMIKFRGHFLIEGDLNPDNSDVDKLFIQLVQTYNQLFEENPINASGVDAKAILSARLSKSRRLENLIAQLPGEKKNGLFGNLIALSLGLTPNFKSNFDLAEDAKLQLSKDTYDDDLDNLLAQIGDQYADLFLAAKNLSDAILLSDILRVNTEITKAPLSASMIKRYDEHHQDLTLLKALVRQQLPEKYKEIFFDQSKNGYAGYIDGGASQEEFYKFIKPILEKMDGTEELLVKLNREDLLRKQRTFDNGSIPHQIHLGELHAILRRQEDFYPFLKDNREKIEKILTFRIPYYVGPLARGNSRFAWMTRKSEETITPWNFEEVVDKGASAQSFIERMTNFDKNLPNEKVLPKHSLLYEYFTVYNELTKVKYVTEGMRKPAFLSGEQKKAIVDLLFKTNRKVTVKQLKEDYFKKIECFDSVEISGVEDRFNASLGTYHDLLKIIKDKDFLDNEENEDILEDIVLTLTLFEDREMIEERLKTYAHLFDDKVMKQLKRRRYTGWGRLSRKLINGIRDKQSGKTILDFLKSDGFANRNFMQLIHDDSLTFKEDIQKAQVSGQGDSLHEHIANLAGSPAIKKGILQTVKVVDELVKVMGRHKPENIVIEMARENQTTQKGQKNSRERMKRIEEGIKELGSQILKEHPVENTQLQNEKLYLYYLQNGRDMYVDQELDINRLSDYDVDHIVPQSFLKDDSIDNKVLTRSDKARGKSDNVPSEEVVKKMKNYWRQLLNAKLITQRKFDNLTKAERGGLSELDKAGFIKRQLVETRQITKHVAQILDSRMNTKYDENDKLIREVKVITLKSKLVSDFRKDFQFYKVREINNYHHAHDAYLNAVVGTALIKKYPKLESEFVYGDYKVYDVRKMIAKSEQEIGKATAKYFFYSNIMNFFKTEITLANGEIRKRPLIETNGETGEIVWDKGRDFATVRKVLSMPQVNIVKKTEVQTGGFSKESILPKRNSDKLIARKKDWDPKKYGGFDSPTVAYSVLVVAKVEKGKSKKLKSVKELLGITIMERSSFEKNPIDFLEAKGYKEVKKDLIIKLPKYSLFELENGRKRMLASAGELQKGNELALPSKYVNFLYLASHYEKLKGSPEDNEQKQLFVEQHKHYLDEIIEQISEFSKRVILADANLDKVLSAYNKHRDKPIREQAENIIHLFTLTNLGAPAAFKYFDTTIDRKRYTSTKEVLDATLIHQSITGLYETRIDLSQLGGDGGEAAAKGGSPAPGGTLNIEDEYRLHETSKEPDVSLGSTWLSDFPQAWAETGGMGLAVRQAPLIIPLKATSTPVSIKQYPMSQEARLGIKPHIQRLLDQGILVPCQSPWNTPLLPVKKPGTNDYRPVQDLREVNKRVEDIHPTVPNPYNLLSGLPPSHQWYTVLDLKDAFFCLRLHPTSQPLFAFEWRDPEMGISGQLTWTRLPQGFKNSPTLFNEALHRDLAGFRIQHPDLILLQYVDDLLLAATSELDCQQGTRALLQTLGDLGYRASAKKAQICQKQVKYLGYLLKEGQRWLTEARKETVMGQPIPKTPRQLREFLGTAGFCRLWIPGFAEMAAPLYPLTKPGTLFNWGPDQQKAFQEIKQALLTAPALGLPDLTKPFELFVDEKQGYAKGVLTQKLGPWRRPVAYLSKKLDPVAAGWPPCLRMVAAIAVLTKDAGKLTMGQPLVILAPHAVEALVKQPPDRWLSNARMTHYQALLLDTDRVQFGPVVALNPATLLPLPEEGLQHDCLDILAEAHGTRSDLMDQPLPDADHTWYTDGSSFLQEGQRKAGAAVTTETEVIWARALPAGTSAQRAELIALTQALKMAEGKKLNVYTDSRYAFATAHIHGEIYRRRGWLTSEGKEIKNKDEILALLKALFLPKRLSIIHCPGHQKGNSAEARGNRMADQAAREVATRETPETSTLLAGKRTADGSEFEKRTADGSEFESPKKKAKVE

SEQ ID NO: 2258 - protein, 2088 aa, synthetic construct
MPAAKRVKLDGGDKKYSIGLDIGTNSVGWAVITDEYKVPSKKFKVLGNTDRHSIKKNLIGALLFDSGETAEATRLKRTARRRYTRRKNRICYLQEIFSNEMAKVDDSFFHRLEESFLVEEDKKHERHPIFGNIVDEVAYHEKYPTIYHLRKKLVDSTDKADLRLIYLALAHMIKFRGHFLIEGDLNPDNSDVDKLFIQLVQTYNQLFEENPINASGVDAKAILSARLSKSRRLENLIAQLPGEKKNGLFGNLIALSLGLTPNFKSNFDLAEDAKLQLSKDTYDDDLDNLLAQIGDQYADLFLAAKNLSDAILLSDILRVNTEITKAPLSASMIKRYDEHHQDLTLLKALVRQQLPEKYKEIFFDQSKNGYAGYIDGGASQEEFYKFIKPILEKMDGTEELLVKLNREDLLRKQRTFDNGSIPHQIHLGELHAILRRQEDFYPFLKDNREKIEKILTFRIPYYVGPLARGNSRFAWMTRKSEETITPWNFEEVVDKGASAQSFIERMTNFDKNLPNEKVLPKHSLLYEYFTVYNELTKVKYVTEGMRKPAFLSGEQKKAIVDLLFKTNRKVTVKQLKEDYFKKIECFDSVEISGVEDRFNASLGTYHDLLKIIKDKDFLDNEENEDILEDIVLTLTLFEDREMIEERLKTYAHLFDDKVMKQLKRRRYTGWGRLSRKLINGIRDKQSGKTILDFLKSDGFANRNFMQLIHDDSLTFKEDIQKAQVSGQGDSLHEHIANLAGSPAIKKGILQTVKVVDELVKVMGRHKPENIVIEMARENQTTQKGQKNSRERMKRIEEGIKELGSQILKEHPVENTQLQNEKLYLYYLQNGRDMYVDQELDINRLSDYDVDHIVPQSFLKDDSIDNKVLTRSDKARGKSDNVPSEEVVKKMKNYWRQLLNAKLITQRKFDNLTKAERGGLSELDKAGFIKRQLVETRQITKHVAQILDSRMNTKYDENDKLIREVKVITLKSKLVSDFRKDFQFYKVREINNYHHAHDAYLNAVVGTALIKKYPKLESEFVYGDYKVYDVRKMIAKSEQEIGKATAKYFFYSNIMNFFKTEITLANGEIRKRPLIETNGETGEIVWDKGRDFATVRKVLSMPQVNIVKKTEVQTGGFSKESILPKRNSDKLIARKKDWDPKKYGGFDSPTVAYSVLVVAKVEKGKSKKLKSVKELLGITIMERSSFEKNPIDFLEAKGYKEVKKDLIIKLPKYSLFELENGRKRMLASAGELQKGNELALPSKYVNFLYLASHYEKLKGSPEDNEQKQLFVEQHKHYLDEIIEQISEFSKRVILADANLDKVLSAYNKHRDKPIREQAENIIHLFTLTNLGAPAAFKYFDTTIDRKRYTSTKEVLDATLIHQSITGLYETRIDLSQLGGDGGPAPGGTLNIEDEYRLHETSKEPDVSLGSTWLSDFPQAWAETGGMGLAVRQAPLIIPLKATSTPVSIKQYPMSQEARLGIKPHIQRLLDQGILVPCQSPWNTPLLPVKKPGTNDYRPVQDLREVNKRVEDIHPTVPNPYNLLSGLPPSHQWYTVLDLKDAFFCLRLHPTSQPLFAFEWRDPEMGISGQLTWTRLPQGFKNSPTLFNEALHRDLAGFRIQHPDLILLQYVDDLLLAATSELDCQQGTRALLQTLGDLGYRASAKKAQICQKQVKYLGYLLKEGQRWLTEARKETVMGQPIPKTPRQLREFLGTAGFCRLWIPGFAEMAAPLYPLTKPGTLFNWGPDQQKAFQEIKQALLTAPALGLPDLTKPFELFVDEKQGYAKGVLTQKLGPWRRPVAYLSKKLDPVAAGWPPCLRMVAAIAVLTKDAGKLTMGQPLVILAPHAVEALVKQPPDRWLSNARMTHYQALLLDTDRVQFGPVVALNPATLLPLPEEGLQHDCLDILAEAHGTRSDLMDQPLPDADHTWYTDGSSFLQEGQRKAGAAVTTETEVIWARALPAGTSAQRAELIALTQALKMAEGKKLNVYTDSRYAFATAHIHGEIYRRRGWLTSEGKEIKNKDEILALLKALFLPKRLSIIHCPGHQKGNSAEARGNRMADQAAREVATRETPETSTLLAGKRTADGSEFEKRTADGSEFESPKKKAKVE

SEQ ID NO: 2259 - protein, 2094 aa, synthetic construct
MPAAKRVKLDGGDKKYSIGLDIGTNSVGWAVITDEYKVPSKKFKVLGNTDRHSIKKNLIGALLFDSGETAEATRLKRTARRRYTRRKNRICYLQEIFSNEMAKVDDSFFHRLEESFLVEEDKKHERHPIFGNIVDEVAYHEKYPTIYHLRKKLVDSTDKADLRLIYLALAHMIKFRGHFLIEGDLNPDNSDVDKLFIQLVQTYNQLFEENPINASGVDAKAILSARLSKSRRLENLIAQLPGEKKNGLFGNLIALSLGLTPNFKSNFDLAEDAKLQLSKDTYDDDLDNLLAQIGDQYADLFLAAKNLSDAILLSDILRVNTEITKAPLSASMIKRYDEHHQDLTLLKALVRQQLPEKYKEIFFDQSKNGYAGYIDGGASQEEFYKFIKPILEKMDGTEELLVKLNREDLLRKQRTFDNGSIPHQIHLGELHAILRRQEDFYPFLKDNREKIEKILTFRIPYYVGPLARGNSRFAWMTRKSEETITPWNFEEVVDKGASAQSFIERMTNFDKNLPNEKVLPKHSLLYEYFTVYNELTKVKYVTEGMRKPAFLSGEQKKAIVDLLFKTNRKVTVKQLKEDYFKKIECFDSVEISGVEDRFNASLGTYHDLLKIIKDKDFLDNEENEDILEDIVLTLTLFEDREMIEERLKTYAHLFDDKVMKQLKRRRYTGWGRLSRKLINGIRDKQSGKTILDFLKSDGFANRNFMQLIHDDSLTFKEDIQKAQVSGQGDSLHEHIANLAGSPAIKKGILQTVKVVDELVKVMGRHKPENIVIEMARENQTTQKGQKNSRERMKRIEEGIKELGSQILKEHPVENTQLQNEKLYLYYLQNGRDMYVDQELDINRLSDYDVDHIVPQSFLKDDSIDNKVLTRSDKARGKSDNVPSEEVVKKMKNYWRQLLNAKLITQRKFDNLTKAERGGLSELDKAGFIKRQLVETRQITKHVAQILDSRMNTKYDENDKLIREVKVITLKSKLVSDFRKDFQFYKVREINNYHHAHDAYLNAVVGTALIKKYPKLESEFVYGDYKVYDVRKMIAKSEQEIGKATAKYFFYSNIMNFFKTEITLANGEIRKRPLIETNGETGEIVWDKGRDFATVRKVLSMPQVNIVKKTEVQTGGFSKESILPKRNSDKLIARKKDWDPKKYGGFDSPTVAYSVLVVAKVEKGKSKKLKSVKELLGITIMERSSFEKNPIDFLEAKGYKEVKKDLIIKLPKYSLFELENGRKRMLASAGELQKGNELALPSKYVNFLYLASHYEKLKGSPEDNEQKQLFVEQHKHYLDEIIEQISEFSKRVILADANLDKVLSAYNKHRDKPIREQAENIIHLFTLTNLGAPAAFKYFDTTIDRKRYTSTKEVLDATLIHQSITGLYETRIDLSQLGGDGGGGSGGGPAPGGTLNIEDEYRLHETSKEPDVSLGSTWLSDFPQAWAETGGMGLAVRQAPLIIPLKATSTPVSIKQYPMSQEARLGIKPHIQRLLDQGILVPCQSPWNTPLLPVKKPGTNDYRPVQDLREVNKRVEDIHPTVPNPYNLLSGLPPSHQWYTVLDLKDAFFCLRLHPTSQPLFAFEWRDPEMGISGQLTWTRLPQGFKNSPTLFNEALHRDLAGFRIQHPDLILLQYVDDLLLAATSELDCQQGTRALLQTLGDLGYRASAKKAQICQKQVKYLGYLLKEGQRWLTEARKETVMGQPIPKTPRQLREFLGTAGFCRLWIPGFAEMAAPLYPLTKPGTLFNWGPDQQKAFQEIKQALLTAPALGLPDLTKPFELFVDEKQGYAKGVLTQKLGPWRRPVAYLSKKLDPVAAGWPPCLRMVAAIAVLTKDAGKLTMGQPLVILAPHAVEALVKQPPDRWLSNARMTHYQALLLDTDRVQFGPVVALNPATLLPLPEEGLQHDCLDILAEAHGTRSDLMDQPLPDADHTWYTDGSSFLQEGQRKAGAAVTTETEVIWARALPAGTSAQRAELIALTQALKMAEGKKLNVYTDSRYAFATAHIHGEIYRRRGWLTSEGKEIKNKDEILALLKALFLPKRLSIIHCPGHQKGNSAEARGNRMADQAAREVATRETPETSTLLAGKRTADGSEFEKRTADGSEFESPKKKAKVE

SEQ ID NO: 2260 - protein, 2094 aa, synthetic construct
MPAAKRVKLDGGDKKYSIGLDIGTNSVGWAVITDEYKVPSKKFKVLGNTDRHSIKKNLIGALLFDSGETAEATRLKRTARRRYTRRKNRICYLQEIFSNEMAKVDDSFFHRLEESFLVEEDKKHERHPIFGNIVDEVAYHEKYPTIYHLRKKLVDSTDKADLRLIYLALAHMIKFRGHFLIEGDLNPDNSDVDKLFIQLVQTYNQLFEENPINASGVDAKAILSARLSKSRRLENLIAQLPGEKKNGLFGNLIALSLGLTPNFKSNFDLAEDAKLQLSKDTYDDDLDNLLAQIGDQYADLFLAAKNLSDAILLSDILRVNTEITKAPLSASMIKRYDEHHQDLTLLKALVRQQLPEKYKEIFFDQSKNGYAGYIDGGASQEEFYKFIKPILEKMDGTEELLVKLNREDLLRKQRTFDNGSIPHQIHLGELHAILRRQEDFYPFLKDNREKIEKILTFRIPYYVGPLARGNSRFAWMTRKSEETITPWNFEEVVDKGASAQSFIERMTNFDKNLPNEKVLPKHSLLYEYFTVYNELTKVKYVTEGMRKPAFLSGEQKKAIVDLLFKTNRKVTVKQLKEDYFKKIECFDSVEISGVEDRFNASLGTYHDLLKIIKDKDFLDNEENEDILEDIVLTLTLFEDREMIEERLKTYAHLFDDKVMKQLKRRRYTGWGRLSRKLINGIRDKQSGKTILDFLKSDGFANRNFMQLIHDDSLTFKEDIQKAQVSGQGDSLHEHIANLAGSPAIKKGILQTVKVVDELVKVMGRHKPENIVIEMARENQTTQKGQKNSRERMKRIEEGIKELGSQILKEHPVENTQLQNEKLYLYYLQNGRDMYVDQELDINRLSDYDVDHIVPQSFLKDDSIDNKVLTRSDKARGKSDNVPSEEVVKKMKNYWRQLLNAKLITQRKFDNLTKAERGGLSELDKAGFIKRQLVETRQITKHVAQILDSRMNTKYDENDKLIREVKVITLKSKLVSDFRKDFQFYKVREINNYHHAHDAYLNAVVGTALIKKYPKLESEFVYGDYKVYDVRKMIAKSEQEIGKATAKYFFYSNIMNFFKTEITLANGEIRKRPLIETNGETGEIVWDKGRDFATVRKVLSMPQVNIVKKTEVQTGGFSKESILPKRNSDKLIARKKDWDPKKYGGFDSPTVAYSVLVVAKVEKGKSKKLKSVKELLGITIMERSSFEKNPIDFLEAKGYKEVKKDLIIKLPKYSLFELENGRKRMLASAGELQKGNELALPSKYVNFLYLASHYEKLKGSPEDNEQKQLFVEQHKHYLDEIIEQISEFSKRVILADANLDKVLSAYNKHRDKPIREQAENIIHLFTLTNLGAPAAFKYFDTTIDRKRYTSTKEVLDATLIHQSITGLYETRIDLSQLGGDGGGGSPAPGSSGGTLNIEDEYRLHETSKEPDVSLGSTWLSDFPQAWAETGGMGLAVRQAPLIIPLKATSTPVSIKQYPMSQEARLGIKPHIQRLLDQGILVPCQSPWNTPLLPVKKPGTNDYRPVQDLREVNKRVEDIHPTVPNPYNLLSGLPPSHQWYTVLDLKDAFFCLRLHPTSQPLFAFEWRDPEMGISGQLTWTRLPQGFKNSPTLFNEALHRDLAGFRIQHPDLILLQYVDDLLLAATSELDCQQGTRALLQTLGDLGYRASAKKAQICQKQVKYLGYLLKEGQRWLTEARKETVMGQPIPKTPRQLREFLGTAGFCRLWIPGFAEMAAPLYPLTKPGTLFNWGPDQQKAFQEIKQALLTAPALGLPDLTKPFELFVDEKQGYAKGVLTQKLGPWRRPVAYLSKKLDPVAAGWPPCLRMVAAIAVLTKDAGKLTMGQPLVILAPHAVEALVKQPPDRWLSNARMTHYQALLLDTDRVQFGPVVALNPATLLPLPEEGLQHDCLDILAEAHGTRSDLMDQPLPDADHTWYTDGSSFLQEGQRKAGAAVTTETEVIWARALPAGTSAQRAELIALTQALKMAEGKKLNVYTDSRYAFATAHIHGEIYRRRGWLTSEGKEIKNKDEILALLKALFLPKRLSIIHCPGHQKGNSAEARGNRMADQAAREVATRETPETSTLLAGKRTADGSEFEKRTADGSEFESPKKKAKVE

SEQ ID NO: 2261 - protein, 2096 aa, synthetic construct
MPAAKRVKLDGGDKKYSIGLDIGTNSVGWAVITDEYKVPSKKFKVLGNTDRHSIKKNLIGALLFDSGETAEATRLKRTARRRYTRRKNRICYLQEIFSNEMAKVDDSFFHRLEESFLVEEDKKHERHPIFGNIVDEVAYHEKYPTIYHLRKKLVDSTDKADLRLIYLALAHMIKFRGHFLIEGDLNPDNSDVDKLFIQLVQTYNQLFEENPINASGVDAKAILSARLSKSRRLENLIAQLPGEKKNGLFGNLIALSLGLTPNFKSNFDLAEDAKLQLSKDTYDDDLDNLLAQIGDQYADLFLAAKNLSDAILLSDILRVNTEITKAPLSASMIKRYDEHHQDLTLLKALVRQQLPEKYKEIFFDQSKNGYAGYIDGGASQEEFYKFIKPILEKMDGTEELLVKLNREDLLRKQRTFDNGSIPHQIHLGELHAILRRQEDFYPFLKDNREKIEKILTFRIPYYVGPLARGNSRFAWMTRKSEETITPWNFEEVVDKGASAQSFIERMTNFDKNLPNEKVLPKHSLLYEYFTVYNELTKVKYVTEGMRKPAFLSGEQKKAIVDLLFKTNRKVTVKQLKEDYFKKIECFDSVEISGVEDRFNASLGTYHDLLKIIKDKDFLDNEENEDILEDIVLTLTLFEDREMIEERLKTYAHLFDDKVMKQLKRRRYTGWGRLSRKLINGIRDKQSGKTILDFLKSDGFANRNFMQLIHDDSLTFKEDIQKAQVSGQGDSLHEHIANLAGSPAIKKGILQTVKVVDELVKVMGRHKPENIVIEMARENQTTQKGQKNSRERMKRIEEGIKELGSQILKEHPVENTQLQNEKLYLYYLQNGRDMYVDQELDINRLSDYDVDHIVPQSFLKDDSIDNKVLTRSDKARGKSDNVPSEEVVKKMKNYWRQLLNAKLITQRKFDNLTKAERGGLSELDKAGFIKRQLVETRQITKHVAQILDSRMNTKYDENDKLIREVKVITLKSKLVSDFRKDFQFYKVREINNYHHAHDAYLNAVVGTALIKKYPKLESEFVYGDYKVYDVRKMIAKSEQEIGKATAKYFFYSNIMNFFKTEITLANGEIRKRPLIETNGETGEIVWDKGRDFATVRKVLSMPQVNIVKKTEVQTGGFSKESILPKRNSDKLIARKKDWDPKKYGGFDSPTVAYSVLVVAKVEKGKSKKLKSVKELLGITIMERSSFEKNPIDFLEAKGYKEVKKDLIIKLPKYSLFELENGRKRMLASAGELQKGNELALPSKYVNFLYLASHYEKLKGSPEDNEQKQLFVEQHKHYLDEIIEQISEFSKRVILADANLDKVLSAYNKHRDKPIREQAENIIHLFTLTNLGAPAAFKYFDTTIDRKRYTSTKEVLDATLIHQSITGLYETRIDLSQLGGDGGEAAAKGGGGSSGGTLNIEDEYRLHETSKEPDVSLGSTWLSDFPQAWAETGGMGLAVRQAPLIIPLKATSTPVSIKQYPMSQEARLGIKPHIQRLLDQGILVPCQSPWNTPLLPVKKPGTNDYRPVQDLREVNKRVEDIHPTVPNPYNLLSGLPPSHQWYTVLDLKDAFFCLRLHPTSQPLFAFEWRDPEMGISGQLTWTRLPQGFKNSPTLFNEALHRDLAGFRIQHPDLILLQYVDDLLLAATSELDCQQGTRALLQTLGDLGYRASAKKAQICQKQVKYLGYLLKEGQRWLTEARKETVMGQPIPKTPRQLREFLGTAGFCRLWIPGFAEMAAPLYPLTKPGTLFNWGPDQQKAFQEIKQALLTAPALGLPDLTKPFELFVDEKQGYAKGVLTQKLGPWRRPVAYLSKKLDPVAAGWPPCLRMVAAIAVLTKDAGKLTMGQPLVILAPHAVEALVKQPPDRWLSNARMTHYQALLLDTDRVQFGPVVALNPATLLPLPEEGLQHDCLDILAEAHGTRSDLMDQPLPDADHTWYTDGSSFLQEGQRKAGAAVTTETEVIWARALPAGTSAQRAELIALTQALKMAEGKKLNVYTDSRYAFATAHIHGEIYRRRGWLTSEGKEIKNKDEILALLKALFLPKRLSIIHCPGHQKGNSAEARGNRMADQAAREVATRETPETSTLLAGKRTADGSEFEKRTADGSEFESPKKKAKVE

SEQ ID NO: 2262 - protein, 2094 aa, synthetic construct
MPAAKRVKLDGGDKKYSIGLDIGTNSVGWAVITDEYKVPSKKFKVLGNTDRHSIKKNLIGALLFDSGETAEATRLKRTARRRYTRRKNRICYLQEIFSNEMAKVDDSFFHRLEESFLVEEDKKHERHPIFGNIVDEVAYHEKYPTIYHLRKKLVDSTDKADLRLIYLALAHMIKFRGHFLIEGDLNPDNSDVDKLFIQLVQTYNQLFEENPINASGVDAKAILSARLSKSRRLENLIAQLPGEKKNGLFGNLIALSLGLTPNFKSNFDLAEDAKLQLSKDTYDDDLDNLLAQIGDQYADLFLAAKNLSDAILLSDILRVNTEITKAPLSASMIKRYDEHHQDLTLLKALVRQQLPEKYKEIFFDQSKNGYAGYIDGGASQEEFYKFIKPILEKMDGTEELLVKLNREDLLRKQRTFDNGSIPHQIHLGELHAILRRQEDFYPFLKDNREKIEKILTFRIPYYVGPLARGNSRFAWMTRKSEETITPWNFEEVVDKGASAQSFIERMTNFDKNLPNEKVLPKHSLLYEYFTVYNELTKVKYVTEGMRKPAFLSGEQKKAIVDLLFKTNRKVTVKQLKEDYFKKIECFDSVEISGVEDRFNASLGTYHDLLKIIKDKDFLDNEENEDILEDIVLTLTLFEDREMIEERLKTYAHLFDDKVMKQLKRRRYTGWGRLSRKLINGIRDKQSGKTILDFLKSDGFANRNFMQLIHDDSLTFKEDIQKAQVSGQGDSLHEHIANLAGSPAIKKGILQTVKVVDELVKVMGRHKPENIVIEMARENQTTQKGQKNSRERMKRIEEGIKELGSQILKEHPVENTQLQNEKLYLYYLQNGRDMYVDQELDINRLSDYDVDHIVPQSFLKDDSIDNKVLTRSDKARGKSDNVPSEEVVKKMKNYWRQLLNAKLITQRKFDNLTKAERGGLSELDKAGFIKRQLVETRQITKHVAQILDSRMNTKYDENDKLIREVKVITLKSKLVSDFRKDFQFYKVREINNYHHAHDAYLNAVVGTALIKKYPKLESEFVYGDYKVYDVRKMIAKSEQEIGKATAKYFFYSNIMNFFKTEITLANGEIRKRPLIETNGETGEIVWDKGRDFATVRKVLSMPQVNIVKKTEVQTGGFSKESILPKRNSDKLIARKKDWDPKKYGGFDSPTVAYSVLVVAKVEKGKSKKLKSVKELLGITIMERSSFEKNPIDFLEAKGYKEVKKDLIIKLPKYSLFELENGRKRMLASAGELQKGNELALPSKYVNFLYLASHYEKLKGSPEDNEQKQLFVEQHKHYLDEIIEQISEFSKRVILADANLDKVLSAYNKHRDKPIREQAENIIHLFTLTNLGAPAAFKYFDTTIDRKRYTSTKEVLDATLIHQSITGLYETRIDLSQLGGDGGPAPGSSGGGGGTLNIEDEYRLHETSKEPDVSLGSTWLSDFPQAWAETGGMGLAVRQAPLIIPLKATSTPVSIKQYPMSQEARLGIKPHIQRLLDQGILVPCQSPWNTPLLPVKKPGTNDYRPVQDLREVNKRVEDIHPTVPNPYNLLSGLPPSHQWYTVLDLKDAFFCLRLHPTSQPLFAFEWRDPEMGISGQLTWTRLPQGFKNSPTLFNEALHRDLAGFRIQHPDLILLQYVDDLLLAATSELDCQQGTRALLQTLGDLGYRASAKKAQICQKQVKYLGYLLKEGQRWLTEARKETVMGQPIPKTPRQLREFLGTAGFCRLWIPGFAEMAAPLYPLTKPGTLFNWGPDQQKAFQEIKQALLTAPALGLPDLTKPFELFVDEKQGYAKGVLTQKLGPWRRPVAYLSKKLDPVAAGWPPCLRMVAAIAVLTKDAGKLTMGQPLVILAPHAVEALVKQPPDRWLSNARMTHYQALLLDTDRVQFGPVVALNPATLLPLPEEGLQHDCLDILAEAHGTRSDLMDQPLPDADHTWYTDGSSFLQEGQRKAGAAVTTETEVIWARALPAGTSAQRAELIALTQALKMAEGKKLNVYTDSRYAFATAHIHGEIYRRRGWLTSEGKEIKNKDEILALLKALFLPKRLSIIHCPGHQKGNSAEARGNRMADQAAREVATRETPETSTLLAGKRTADGSEFEKRTADGSEFESPKKKAKVE

SEQ ID NO: 2263 - protein, 2096 aa, synthetic construct
MPAAKRVKLDGGDKKYSIGLDIGTNSVGWAVITDEYKVPSKKFKVLGNTDRHSIKKNLIGALLFDSGETAEATRLKRTARRRYTRRKNRICYLQEIFSNEMAKVDDSFFHRLEESFLVEEDKKHERHPIFGNIVDEVAYHEKYPTIYHLRKKLVDSTDKADLRLIYLALAHMIKFRGHFLIEGDLNPDNSDVDKLFIQLVQTYNQLFEENPINASGVDAKAILSARLSKSRRLENLIAQLPGEKKNGLFGNLIALSLGLTPNFKSNFDLAEDAKLQLSKDTYDDDLDNLLAQIGDQYADLFLAAKNLSDAILLSDILRVNTEITKAPLSASMIKRYDEHHQDLTLLKALVRQQLPEKYKEIFFDQSKNGYAGYIDGGASQEEFYKFIKPILEKMDGTEELLVKLNREDLLRKQRTFDNGSIPHQIHLGELHAILRRQEDFYPFLKDNREKIEKILTFRIPYYVGPLARGNSRFAWMTRKSEETITPWNFEEVVDKGASAQSFIERMTNFDKNLPNEKVLPKHSLLYEYFTVYNELTKVKYVTEGMRKPAFLSGEQKKAIVDLLFKTNRKVTVKQLKEDYFKKIECFDSVEISGVEDRFNASLGTYHDLLKIIKDKDFLDNEENEDILEDIVLTLTLFEDREMIEERLKTYAHLFDDKVMKQLKRRRYTGWGRLSRKLINGIRDKQSGKTILDFLKSDGFANRNFMQLIHDDSLTFKEDIQKAQVSGQGDSLHEHIANLAGSPAIKKGILQTVKVVDELVKVMGRHKPENIVIEMARENQTTQKGQKNSRERMKRIEEGIKELGSQILKEHPVENTQLQNEKLYLYYLQNGRDMYVDQELDINRLSDYDVDHIVPQSFLKDDSIDNKVLTRSDKARGKSDNVPSEEVVKKMKNYWRQLLNAKLITQRKFDNLTKAERGGLSELDKAGFIKRQLVETRQITKHVAQILDSRMNTKYDENDKLIREVKVITLKSKLVSDFRKDFQFYKVREINNYHHAHDAYLNAVVGTALIKKYPKLESEFVYGDYKVYDVRKMIAKSEQEIGKATAKYFFYSNIMNFFKTEITLANGEIRKRPLIETNGETGEIVWDKGRDFATVRKVLSMPQVNIVKKTEVQTGGFSKESILPKRNSDKLIARKKDWDPKKYGGFDSPTVAYSVLVVAKVEKGKSKKLKSVKELLGITIMERSSFEKNPIDFLEAKGYKEVKKDLIIKLPKYSLFELENGRKRMLASAGELQKGNELALPSKYVNFLYLASHYEKLKGSPEDNEQKQLFVEQHKHYLDEIIEQISEFSKRVILADANLDKVLSAYNKHRDKPIREQAENIIHLFTLTNLGAPAAFKYFDTTIDRKRYTSTKEVLDATLIHQSITGLYETRIDLSQLGGDGGGGSGSSEAAAKGGTLNIEDEYRLHETSKEPDVSLGSTWLSDFPQAWAETGGMGLAVRQAPLIIPLKATSTPVSIKQYPMSQEARLGIKPHIQRLLDQGILVPCQSPWNTPLLPVKKPGTNDYRPVQDLREVNKRVEDIHPTVPNPYNLLSGLPPSHQWYTVLDLKDAFFCLRLHPTSQPLFAFEWRDPEMGISGQLTWTRLPQGFKNSPTLFNEALHRDLAGFRIQHPDLILLQYVDDLLLAATSELDCQQGTRALLQTLGDLGYRASAKKAQICQKQVKYLGYLLKEGQRWLTEARKETVMGQPIPKTPRQLREFLGTAGFCRLWIPGFAEMAAPLYPLTKPGTLFNWGPDQQKAFQEIKQALLTAPALGLPDLTKPFELFVDEKQGYAKGVLTQKLGPWRRPVAYLSKKLDPVAAGWPPCLRMVAAIAVLTKDAGKLTMGQPLVILAPHAVEALVKQPPDRWLSNARMTHYQALLLDTDRVQFGPVVALNPATLLPLPEEGLQHDCLDILAEAHGTRSDLMDQPLPDADHTWYTDGSSFLQEGQRKAGAAVTTETEVIWARALPAGTSAQRAELIALTQALKMAEGKKLNVYTDSRYAFATAHIHGEIYRRRGWLTSEGKEIKNKDEILALLKALFLPKRLSIIHCPGHQKGNSAEARGNRMADQAAREVATRETPETSTLLAGKRTADGSEFEKRTADGSEFESPKKKAKVE

SEQ ID NO: 2264 - protein, 2091 aa, synthetic construct
MPAAKRVKLDGGDKKYSIGLDIGTNSVGWAVITDEYKVPSKKFKVLGNTDRHSIKKNLIGALLFDSGETAEATRLKRTARRRYTRRKNRICYLQEIFSNEMAKVDDSFFHRLEESFLVEEDKKHERHPIFGNIVDEVAYHEKYPTIYHLRKKLVDSTDKADLRLIYLALAHMIKFRGHFLIEGDLNPDNSDVDKLFIQLVQTYNQLFEENPINASGVDAKAILSARLSKSRRLENLIAQLPGEKKNGLFGNLIALSLGLTPNFKSNFDLAEDAKLQLSKDTYDDDLDNLLAQIGDQYADLFLAAKNLSDAILLSDILRVNTEITKAPLSASMIKRYDEHHQDLTLLKALVRQQLPEKYKEIFFDQSKNGYAGYIDGGASQEEFYKFIKPILEKMDGTEELLVKLNREDLLRKQRTFDNGSIPHQIHLGELHAILRRQEDFYPFLKDNREKIEKILTFRIPYYVGPLARGNSRFAWMTRKSEETITPWNFEEVVDKGASAQSFIERMTNFDKNLPNEKVLPKHSLLYEYFTVYNELTKVKYVTEGMRKPAFLSGEQKKAIVDLLFKTNRKVTVKQLKEDYFKKIECFDSVEISGVEDRFNASLGTYHDLLKIIKDKDFLDNEENEDILEDIVLTLTLFEDREMIEERLKTYAHLFDDKVMKQLKRRRYTGWGRLSRKLINGIRDKQSGKTILDFLKSDGFANRNFMQLIHDDSLTFKEDIQKAQVSGQGDSLHEHIANLAGSPAIKKGILQTVKVVDELVKVMGRHKPENIVIEMARENQTTQKGQKNSRERMKRIEEGIKELGSQILKEHPVENTQLQNEKLYLYYLQNGRDMYVDQELDINRLSDYDVDHIVPQSFLKDDSIDNKVLTRSDKARGKSDNVPSEEVVKKMKNYWRQLLNAKLITQRKFDNLTKAERGGLSELDKAGFIKRQLVETRQITKHVAQILDSRMNTKYDENDKLIREVKVITLKSKLVSDFRKDFQFYKVREINNYHHAHDAYLNAVVGTALIKKYPKLESEFVYGDYKVYDVRKMIAKSEQEIGKATAKYFFYSNIMNFFKTEITLANGEIRKRPLIETNGETGEIVWDKGRDFATVRKVLSMPQVNIVKKTEVQTGGFSKESILPKRNSDKLIARKKDWDPKKYGGFDSPTVAYSVLVVAKVEKGKSKKLKSVKELLGITIMERSSFEKNPIDFLEAKGYKEVKKDLIIKLPKYSLFELENGRKRMLASAGELQKGNELALPSKYVNFLYLASHYEKLKGSPEDNEQKQLFVEQHKHYLDEIIEQISEFSKRVILADANLDKVLSAYNKHRDKPIREQAENIIHLFTLTNLGAPAAFKYFDTTIDRKRYTSTKEVLDATLIHQSITGLYETRIDLSQLGGDGGGSSGGGGGTLNIEDEYRLHETSKEPDVSLGSTWLSDFPQAWAETGGMGLAVRQAPLIIPLKATSTPVSIKQYPMSQEARLGIKPHIQRLLDQGILVPCQSPWNTPLLPVKKPGTNDYRPVQDLREVNKRVEDIHPTVPNPYNLLSGLPPSHQWYTVLDLKDAFFCLRLHPTSQPLFAFEWRDPEMGISGQLTWTRLPQGFKNSPTLFNEALHRDLAGFRIQHPDLILLQYVDDLLLAATSELDCQQGTRALLQTLGDLGYRASAKKAQICQKQVKYLGYLLKEGQRWLTEARKETVMGQPIPKTPRQLREFLGTAGFCRLWIPGFAEMAAPLYPLTKPGTLFNWGPDQQKAFQEIKQALLTAPALGLPDLTKPFELFVDEKQGYAKGVLTQKLGPWRRPVAYLSKKLDPVAAGWPPCLRMVAAIAVLTKDAGKLTMGQPLVILAPHAVEALVKQPPDRWLSNARMTHYQALLLDTDRVQFGPVVALNPATLLPLPEEGLQHDCLDILAEAHGTRSDLMDQPLPDADHTWYTDGSSFLQEGQRKAGAAVTTETEVIWARALPAGTSAQRAELIALTQALKMAEGKKLNVYTDSRYAFATAHIHGEIYRRRGWLTSEGKEIKNKDEILALLKALFLPKRLSIIHCPGHQKGNSAEARGNRMADQAAREVATRETPETSTLLAGKRTADGSEFEKRTADGSEFESPKKKAKVE

SEQ ID NO: 2265 - protein, 2094 aa, synthetic construct
MPAAKRVKLDGGDKKYSIGLDIGTNSVGWAVITDEYKVPSKKFKVLGNTDRHSIKKNLIGALLFDSGETAEATRLKRTARRRYTRRKNRICYLQEIFSNEMAKVDDSFFHRLEESFLVEEDKKHERHPIFGNIVDEVAYHEKYPTIYHLRKKLVDSTDKADLRLIYLALAHMIKFRGHFLIEGDLNPDNSDVDKLFIQLVQTYNQLFEENPINASGVDAKAILSARLSKSRRLENLIAQLPGEKKNGLFGNLIALSLGLTPNFKSNFDLAEDAKLQLSKDTYDDDLDNLLAQIGDQYADLFLAAKNLSDAILLSDILRVNTEITKAPLSASMIKRYDEHHQDLTLLKALVRQQLPEKYKEIFFDQSKNGYAGYIDGGASQEEFYKFIKPILEKMDGTEELLVKLNREDLLRKQRTFDNGSIPHQIHLGELHAILRRQEDFYPFLKDNREKIEKILTFRIPYYVGPLARGNSRFAWMTRKSEETITPWNFEEVVDKGASAQSFIERMTNFDKNLPNEKVLPKHSLLYEYFTVYNELTKVKYVTEGMRKPAFLSGEQKKAIVDLLFKTNRKVTVKQLKEDYFKKIECFDSVEISGVEDRFNASLGTYHDLLKIIKDKDFLDNEENEDILEDIVLTLTLFEDREMIEERLKTYAHLFDDKVMKQLKRRRYTGWGRLSRKLINGIRDKQSGKTILDFLKSDGFANRNFMQLIHDDSLTFKEDIQKAQVSGQGDSLHEHIANLAGSPAIKKGILQTVKVVDELVKVMGRHKPENIVIEMARENQTTQKGQKNSRERMKRIEEGIKELGSQILKEHPVENTQLQNEKLYLYYLQNGRDMYVDQELDINRLSDYDVDHIVPQSFLKDDSIDNKVLTRSDKARGKSDNVPSEEVVKKMKNYWRQLLNAKLITQRKFDNLTKAERGGLSELDKAGFIKRQLVETRQITKHVAQILDSRMNTKYDENDKLIREVKVITLKSKLVSDFRKDFQFYKVREINNYHHAHDAYLNAVVGTALIKKYPKLESEFVYGDYKVYDVRKMIAKSEQEIGKATAKYFFYSNIMNFFKTEITLANGEIRKRPLIETNGETGEIVWDKGRDFATVRKVLSMPQVNIVKKTEVQTGGFSKESILPKRNSDKLIARKKDWDPKKYGGFDSPTVAYSVLVVAKVEKGKSKKLKSVKELLGITIMERSSFEKNPIDFLEAKGYKEVKKDLIIKLPKYSLFELENGRKRMLASAGELQKGNELALPSKYVNFLYLASHYEKLKGSPEDNEQKQLFVEQHKHYLDEIIEQISEFSKRVILADANLDKVLSAYNKHRDKPIREQAENIIHLFTLTNLGAPAAFKYFDTTIDRKRYTSTKEVLDATLIHQSITGLYETRIDLSQLGGDGGGGSGSSPAPGGTLNIEDEYRLHETSKEPDVSLGSTWLSDFPQAWAETGGMGLAVRQAPLIIPLKATSTPVSIKQYPMSQEARLGIKPHIQRLLDQGILVPCQSPWNTPLLPVKKPGTNDYRPVQDLREVNKRVEDIHPTVPNPYNLLSGLPPSHQWYTVLDLKDAFFCLRLHPTSQPLFAFEWRDPEMGISGQLTWTRLPQGFKNSPTLFNEALHRDLAGFRIQHPDLILLQYVDDLLLAATSELDCQQGTRALLQTLGDLGYRASAKKAQICQKQVKYLGYLLKEGQRWLTEARKETVMGQPIPKTPRQLREFLGTAGFCRLWIPGFAEMAAPLYPLTKPGTLFNWGPDQQKAFQEIKQALLTAPALGLPDLTKPFELFVDEKQGYAKGVLTQKLGPWRRPVAYLSKKLDPVAAGWPPCLRMVAAIAVLTKDAGKLTMGQPLVILAPHAVEALVKQPPDRWLSNARMTHYQALLLDTDRVQFGPVVALNPATLLPLPEEGLQHDCLDILAEAHGTRSDLMDQPLPDADHTWYTDGSSFLQEGQRKAGAAVTTETEVIWARALPAGTSAQRAELIALTQALKMAEGKKLNVYTDSRYAFATAHIHGEIYRRRGWLTSEGKEIKNKDEILALLKALFLPKRLSIIHCPGHQKGNSAEARGNRMADQAAREVATRETPETSTLLAGKRTADGSEFEKRTADGSEFESPKKKAKVE

SEQ ID NO: 2266 - protein, 2096 aa, synthetic construct
MPAAKRVKLDGGDKKYSIGLDIGTNSVGWAVITDEYKVPSKKFKVLGNTDRHSIKKNLIGALLFDSGETAEATRLKRTARRRYTRRKNRICYLQEIFSNEMAKVDDSFFHRLEESFLVEEDKKHERHPIFGNIVDEVAYHEKYPTIYHLRKKLVDSTDKADLRLIYLALAHMIKFRGHFLIEGDLNPDNSDVDKLFIQLVQTYNQLFEENPINASGVDAKAILSARLSKSRRLENLIAQLPGEKKNGLFGNLIALSLGLTPNFKSNFDLAEDAKLQLSKDTYDDDLDNLLAQIGDQYADLFLAAKNLSDAILLSDILRVNTEITKAPLSASMIKRYDEHHQDLTLLKALVRQQLPEKYKEIFFDQSKNGYAGYIDGGASQEEFYKFIKPILEKMDGTEELLVKLNREDLLRKQRTFDNGSIPHQIHLGELHAILRRQEDFYPFLKDNREKIEKILTFRIPYYVGPLARGNSRFAWMTRKSEETITPWNFEEVVDKGASAQSFIERMTNFDKNLPNEKVLPKHSLLYEYFTVYNELTKVKYVTEGMRKPAFLSGEQKKAIVDLLFKTNRKVTVKQLKEDYFKKIECFDSVEISGVEDRFNASLGTYHDLLKIIKDKDFLDNEENEDILEDIVLTLTLFEDREMIEERLKTYAHLFDDKVMKQLKRRRYTGWGRLSRKLINGIRDKQSGKTILDFLKSDGFANRNFMQLIHDDSLTFKEDIQKAQVSGQGDSLHEHIANLAGSPAIKKGILQTVKVVDELVKVMGRHKPENIVIEMARENQTTQKGQKNSRERMKRIEEGIKELGSQILKEHPVENTQLQNEKLYLYYLQNGRDMYVDQELDINRLSDYDVDHIVPQSFLKDDSIDNKVLTRSDKARGKSDNVPSEEVVKKMKNYWRQLLNAKLITQRKFDNLTKAERGGLSELDKAGFIKRQLVETRQITKHVAQILDSRMNTKYDENDKLIREVKVITLKSKLVSDFRKDFQFYKVREINNYHHAHDAYLNAVVGTALIKKYPKLESEFVYGDYKVYDVRKMIAKSEQEIGKATAKYFFYSNIMNFFKTEITLANGEIRKRPLIETNGETGEIVWDKGRDFATVRKVLSMPQVNIVKKTEVQTGGFSKESILPKRNSDKLIARKKDWDPKKYGGFDSPTVAYSVLVVAKVEKGKSKKLKSVKELLGITIMERSSFEKNPIDFLEAKGYKEVKKDLIIKLPKYSLFELENGRKRMLASAGELQKGNELALPSKYVNFLYLASHYEKLKGSPEDNEQKQLFVEQHKHYLDEIIEQISEFSKRVILADANLDKVLSAYNKHRDKPIREQAENIIHLFTLTNLGAPAAFKYFDTTIDRKRYTSTKEVLDATLIHQSITGLYETRIDLSQLGGDGGGGSGGGEAAAKGGTLNIEDEYRLHETSKEPDVSLGSTWLSDFPQAWAETGGMGLAVRQAPLIIPLKATSTPVSIKQYPMSQEARLGIKPHIQRLLDQGILVPCQSPWNTPLLPVKKPGTNDYRPVQDLREVNKRVEDIHPTVPNPYNLLSGLPPSHQWYTVLDLKDAFFCLRLHPTSQPLFAFEWRDPEMGISGQLTWTRLPQGFKNSPTLFNEALHRDLAGFRIQHPDLILLQYVDDLLLAATSELDCQQGTRALLQTLGDLGYRASAKKAQICQKQVKYLGYLLKEGQRWLTEARKETVMGQPIPKTPRQLREFLGTAGFCRLWIPGFAEMAAPLYPLTKPGTLFNWGPDQQKAFQEIKQALLTAPALGLPDLTKPFELFVDEKQGYAKGVLTQKLGPWRRPVAYLSKKLDPVAAGWPPCLRMVAAIAVLTKDAGKLTMGQPLVILAPHAVEALVKQPPDRWLSNARMTHYQALLLDTDRVQFGPVVALNPATLLPLPEEGLQHDCLDILAEAHGTRSDLMDQPLPDADHTWYTDGSSFLQEGQRKAGAAVTTETEVIWARALPAGTSAQRAELIALTQALKMAEGKKLNVYTDSRYAFATAHIHGEIYRRRGWLTSEGKEIKNKDEILALLKALFLPKRLSIIHCPGHQKGNSAEARGNRMADQAAREVATRETPETSTLLAGKRTADGSEFEKRTADGSEFESPKKKAKVE

SEQ ID NO: 2267 - protein, 2092 aa, synthetic construct
MPAAKRVKLDGGDKKYSIGLDIGTNSVGWAVITDEYKVPSKKFKVLGNTDRHSIKKNLIGALLFDSGETAEATRLKRTARRRYTRRKNRICYLQEIFSNEMAKVDDSFFHRLEESFLVEEDKKHERHPIFGNIVDEVAYHEKYPTIYHLRKKLVDSTDKADLRLIYLALAHMIKFRGHFLIEGDLNPDNSDVDKLFIQLVQTYNQLFEENPINASGVDAKAILSARLSKSRRLENLIAQLPGEKKNGLFGNLIALSLGLTPNFKSNFDLAEDAKLQLSKDTYDDDLDNLLAQIGDQYADLFLAAKNLSDAILLSDILRVNTEITKAPLSASMIKRYDEHHQDLTLLKALVRQQLPEKYKEIFFDQSKNGYAGYIDGGASQEEFYKFIKPILEKMDGTEELLVKLNREDLLRKQRTFDNGSIPHQIHLGELHAILRRQEDFYPFLKDNREKIEKILTFRIPYYVGPLARGNSRFAWMTRKSEETITPWNFEEVVDKGASAQSFIERMTNFDKNLPNEKVLPKHSLLYEYFTVYNELTKVKYVTEGMRKPAFLSGEQKKAIVDLLFKTNRKVTVKQLKEDYFKKIECFDSVEISGVEDRFNASLGTYHDLLKIIKDKDFLDNEENEDILEDIVLTLTLFEDREMIEERLKTYAHLFDDKVMKQLKRRRYTGWGRLSRKLINGIRDKQSGKTILDFLKSDGFANRNFMQLIHDDSLTFKEDIQKAQVSGQGDSLHEHIANLAGSPAIKKGILQTVKVVDELVKVMGRHKPENIVIEMARENQTTQKGQKNSRERMKRIEEGIKELGSQILKEHPVENTQLQNEKLYLYYLQNGRDMYVDQELDINRLSDYDVDHIVPQSFLKDDSIDNKVLTRSDKARGKSDNVPSEEVVKKMKNYWRQLLNAKLITQRKFDNLTKAERGGLSELDKAGFIKRQLVETRQITKHVAQILDSRMNTKYDENDKLIREVKVITLKSKLVSDFRKDFQFYKVREINNYHHAHDAYLNAVVGTALIKKYPKLESEFVYGDYKVYDVRKMIAKSEQEIGKATAKYFFYSNIMNFFKTEITLANGEIRKRPLIETNGETGEIVWDKGRDFATVRKVLSMPQVNIVKKTEVQTGGFSKESILPKRNSDKLIARKKDWDPKKYGGFDSPTVAYSVLVVAKVEKGKSKKLKSVKELLGITIMERSSFEKNPIDFLEAKGYKEVKKDLIIKLPKYSLFELENGRKRMLASAGELQKGNELALPSKYVNFLYLASHYEKLKGSPEDNEQKQLFVEQHKHYLDEIIEQISEFSKRVILADANLDKVLSAYNKHRDKPIREQAENIIHLFTLTNLGAPAAFKYFDTTIDRKRYTSTKEVLDATLIHQSITGLYETRIDLSQLGGDGGGGGGGGGGGTLNIEDEYRLHETSKEPDVSLGSTWLSDFPQAWAETGGMGLAVRQAPLIIPLKATSTPVSIKQYPMSQEARLGIKPHIQRLLDQGILVPCQSPWNTPLLPVKKPGTNDYRPVQDLREVNKRVEDIHPTVPNPYNLLSGLPPSHQWYTVLDLKDAFFCLRLHPTSQPLFAFEWRDPEMGISGQLTWTRLPQGFKNSPTLFNEALHRDLAGFRIQHPDLILLQYVDDLLLAATSELDCQQGTRALLQTLGDLGYRASAKKAQICQKQVKYLGYLLKEGQRWLTEARKETVMGQPIPKTPRQLREFLGTAGFCRLWIPGFAEMAAPLYPLTKPGTLFNWGPDQQKAFQEIKQALLTAPALGLPDLTKPFELFVDEKQGYAKGVLTQKLGPWRRPVAYLSKKLDPVAAGWPPCLRMVAAIAVLTKDAGKLTMGQPLVILAPHAVEALVKQPPDRWLSNARMTHYQALLLDTDRVQFGPVVALNPATLLPLPEEGLQHDCLDILAEAHGTRSDLMDQPLPDADHTWYTDGSSFLQEGQRKAGAAVTTETEVIWARALPAGTSAQRAELIALTQALKMAEGKKLNVYTDSRYAFATAHIHGEIYRRRGWLTSEGKEIKNKDEILALLKALFLPKRLSIIHCPGHQKGNSAEARGNRMADQAAREVATRETPETSTLLAGKRTADGSEFEKRTADGSEFESPKKKAKVE

SEQ ID NO: 2268 - protein, 2089 aa, synthetic construct
MPAAKRVKLDGGDKKYSIGLDIGTNSVGWAVITDEYKVPSKKFKVLGNTDRHSIKKNLIGALLFDSGETAEATRLKRTARRRYTRRKNRICYLQEIFSNEMAKVDDSFFHRLEESFLVEEDKKHERHPIFGNIVDEVAYHEKYPTIYHLRKKLVDSTDKADLRLIYLALAHMIKFRGHFLIEGDLNPDNSDVDKLFIQLVQTYNQLFEENPINASGVDAKAILSARLSKSRRLENLIAQLPGEKKNGLFGNLIALSLGLTPNFKSNFDLAEDAKLQLSKDTYDDDLDNLLAQIGDQYADLFLAAKNLSDAILLSDILRVNTEITKAPLSASMIKRYDEHHQDLTLLKALVRQQLPEKYKEIFFDQSKNGYAGYIDGGASQEEFYKFIKPILEKMDGTEELLVKLNREDLLRKQRTFDNGSIPHQIHLGELHAILRRQEDFYPFLKDNREKIEKILTFRIPYYVGPLARGNSRFAWMTRKSEETITPWNFEEVVDKGASAQSFIERMTNFDKNLPNEKVLPKHSLLYEYFTVYNELTKVKYVTEGMRKPAFLSGEQKKAIVDLLFKTNRKVTVKQLKEDYFKKIECFDSVEISGVEDRFNASLGTYHDLLKIIKDKDFLDNEENEDILEDIVLTLTLFEDREMIEERLKTYAHLFDDKVMKQLKRRRYTGWGRLSRKLINGIRDKQSGKTILDFLKSDGFANRNFMQLIHDDSLTFKEDIQKAQVSGQGDSLHEHIANLAGSPAIKKGILQTVKVVDELVKVMGRHKPENIVIEMARENQTTQKGQKNSRERMKRIEEGIKELGSQILKEHPVENTQLQNEKLYLYYLQNGRDMYVDQELDINRLSDYDVDHIVPQSFLKDDSIDNKVLTRSDKARGKSDNVPSEEVVKKMKNYWRQLLNAKLITQRKFDNLTKAERGGLSELDKAGFIKRQLVETRQITKHVAQILDSRMNTKYDENDKLIREVKVITLKSKLVSDFRKDFQFYKVREINNYHHAHDAYLNAVVGTALIKKYPKLESEFVYGDYKVYDVRKMIAKSEQEIGKATAKYFFYSNIMNFFKTEITLANGEIRKRPLIETNGETGEIVWDKGRDFATVRKVLSMPQVNIVKKTEVQTGGFSKESILPKRNSDKLIARKKDWDPKKYGGFDSPTVAYSVLVVAKVEKGKSKKLKSVKELLGITIMERSSFEKNPIDFLEAKGYKEVKKDLIIKLPKYSLFELENGRKRMLASAGELQKGNELALPSKYVNFLYLASHYEKLKGSPEDNEQKQLFVEQHKHYLDEIIEQISEFSKRVILADANLDKVLSAYNKHRDKPIREQAENIIHLFTLTNLGAPAAFKYFDTTIDRKRYTSTKEVLDATLIHQSITGLYETRIDLSQLGGDGGGGGGGGTLNIEDEYRLHETSKEPDVSLGSTWLSDFPQAWAETGGMGLAVRQAPLIIPLKATSTPVSIKQYPMSQEARLGIKPHIQRLLDQGILVPCQSPWNTPLLPVKKPGTNDYRPVQDLREVNKRVEDIHPTVPNPYNLLSGLPPSHQWYTVLDLKDAFFCLRLHPTSQPLFAFEWRDPEMGISGQLTWTRLPQGFKNSPTLFNEALHRDLAGFRIQHPDLILLQYVDDLLLAATSELDCQQGTRALLQTLGDLGYRASAKKAQICQKQVKYLGYLLKEGQRWLTEARKETVMGQPIPKTPRQLREFLGTAGFCRLWIPGFAEMAAPLYPLTKPGTLFNWGPDQQKAFQEIKQALLTAPALGLPDLTKPFELFVDEKQGYAKGVLTQKLGPWRRPVAYLSKKLDPVAAGWPPCLRMVAAIAVLTKDAGKLTMGQPLVILAPHAVEALVKQPPDRWLSNARMTHYQALLLDTDRVQFGPVVALNPATLLPLPEEGLQHDCLDILAEAHGTRSDLMDQPLPDADHTWYTDGSSFLQEGQRKAGAAVTTETEVIWARALPAGTSAQRAELIALTQALKMAEGKKLNVYTDSRYAFATAHIHGEIYRRRGWLTSEGKEIKNKDEILALLKALFLPKRLSIIHCPGHQKGNSAEARGNRMADQAAREVATRETPETSTLLAGKRTADGSEFEKRTADGSEFESPKKKAKVE

SEQ ID NO: 2269 - protein, 2096 aa, synthetic construct
MPAAKRVKLDGGDKKYSIGLDIGTNSVGWAVITDEYKVPSKKFKVLGNTDRHSIKKNLIGALLFDSGETAEATRLKRTARRRYTRRKNRICYLQEIFSNEMAKVDDSFFHRLEESFLVEEDKKHERHPIFGNIVDEVAYHEKYPTIYHLRKKLVDSTDKADLRLIYLALAHMIKFRGHFLIEGDLNPDNSDVDKLFIQLVQTYNQLFEENPINASGVDAKAILSARLSKSRRLENLIAQLPGEKKNGLFGNLIALSLGLTPNFKSNFDLAEDAKLQLSKDTYDDDLDNLLAQIGDQYADLFLAAKNLSDAILLSDILRVNTEITKAPLSASMIKRYDEHHQDLTLLKALVRQQLPEKYKEIFFDQSKNGYAGYIDGGASQEEFYKFIKPILEKMDGTEELLVKLNREDLLRKQRTFDNGSIPHQIHLGELHAILRRQEDFYPFLKDNREKIEKILTFRIPYYVGPLARGNSRFAWMTRKSEETITPWNFEEVVDKGASAQSFIERMTNFDKNLPNEKVLPKHSLLYEYFTVYNELTKVKYVTEGMRKPAFLSGEQKKAIVDLLFKTNRKVTVKQLKEDYFKKIECFDSVEISGVEDRFNASLGTYHDLLKIIKDKDFLDNEENEDILEDIVLTLTLFEDREMIEERLKTYAHLFDDKVMKQLKRRRYTGWGRLSRKLINGIRDKQSGKTILDFLKSDGFANRNFMQLIHDDSLTFKEDIQKAQVSGQGDSLHEHIANLAGSPAIKKGILQTVKVVDELVKVMGRHKPENIVIEMARENQTTQKGQKNSRERMKRIEEGIKELGSQILKEHPVENTQLQNEKLYLYYLQNGRDMYVDQELDINRLSDYDVDHIVPQSFLKDDSIDNKVLTRSDKARGKSDNVPSEEVVKKMKNYWRQLLNAKLITQRKFDNLTKAERGGLSELDKAGFIKRQLVETRQITKHVAQILDSRMNTKYDENDKLIREVKVITLKSKLVSDFRKDFQFYKVREINNYHHAHDAYLNAVVGTALIKKYPKLESEFVYGDYKVYDVRKMIAKSEQEIGKATAKYFFYSNIMNFFKTEITLANGEIRKRPLIETNGETGEIVWDKGRDFATVRKVLSMPQVNIVKKTEVQTGGFSKESILPKRNSDKLIARKKDWDPKKYGGFDSPTVAYSVLVVAKVEKGKSKKLKSVKELLGITIMERSSFEKNPIDFLEAKGYKEVKKDLIIKLPKYSLFELENGRKRMLASAGELQKGNELALPSKYVNFLYLASHYEKLKGSPEDNEQKQLFVEQHKHYLDEIIEQISEFSKRVILADANLDKVLSAYNKHRDKPIREQAENIIHLFTLTNLGAPAAFKYFDTTIDRKRYTSTKEVLDATLIHQSITGLYETRIDLSQLGGDGGPAPEAAAKGGGGGTLNIEDEYRLHETSKEPDVSLGSTWLSDFPQAWAETGGMGLAVRQAPLIIPLKATSTPVSIKQYPMSQEARLGIKPHIQRLLDQGILVPCQSPWNTPLLPVKKPGTNDYRPVQDLREVNKRVEDIHPTVPNPYNLLSGLPPSHQWYTVLDLKDAFFCLRLHPTSQPLFAFEWRDPEMGISGQLTWTRLPQGFKNSPTLFNEALHRDLAGFRIQHPDLILLQYVDDLLLAATSELDCQQGTRALLQTLGDLGYRASAKKAQICQKQVKYLGYLLKEGQRWLTEARKETVMGQPIPKTPRQLREFLGTAGFCRLWIPGFAEMAAPLYPLTKPGTLFNWGPDQQKAFQEIKQALLTAPALGLPDLTKPFELFVDEKQGYAKGVLTQKLGPWRRPVAYLSKKLDPVAAGWPPCLRMVAAIAVLTKDAGKLTMGQPLVILAPHAVEALVKQPPDRWLSNARMTHYQALLLDTDRVQFGPVVALNPATLLPLPEEGLQHDCLDILAEAHGTRSDLMDQPLPDADHTWYTDGSSFLQEGQRKAGAAVTTETEVIWARALPAGTSAQRAELIALTQALKMAEGKKLNVYTDSRYAFATAHIHGEIYRRRGWLTSEGKEIKNKDEILALLKALFLPKRLSIIHCPGHQKGNSAEARGNRMADQAAREVATRETPETSTLLAGKRTADGSEFEKRTADGSEFESPKKKAKVE

SEQ ID NO: 2270 - protein, 2091 aa, synthetic construct
MPAAKRVKLDGGDKKYSIGLDIGTNSVGWAVITDEYKVPSKKFKVLGNTDRHSIKKNLIGALLFDSGETAEATRLKRTARRRYTRRKNRICYLQEIFSNEMAKVDDSFFHRLEESFLVEEDKKHERHPIFGNIVDEVAYHEKYPTIYHLRKKLVDSTDKADLRLIYLALAHMIKFRGHFLIEGDLNPDNSDVDKLFIQLVQTYNQLFEENPINASGVDAKAILSARLSKSRRLENLIAQLPGEKKNGLFGNLIALSLGLTPNFKSNFDLAEDAKLQLSKDTYDDDLDNLLAQIGDQYADLFLAAKNLSDAILLSDILRVNTEITKAPLSASMIKRYDEHHQDLTLLKALVRQQLPEKYKEIFFDQSKNGYAGYIDGGASQEEFYKFIKPILEKMDGTEELLVKLNREDLLRKQRTFDNGSIPHQIHLGELHAILRRQEDFYPFLKDNREKIEKILTFRIPYYVGPLARGNSRFAWMTRKSEETITPWNFEEVVDKGASAQSFIERMTNFDKNLPNEKVLPKHSLLYEYFTVYNELTKVKYVTEGMRKPAFLSGEQKKAIVDLLFKTNRKVTVKQLKEDYFKKIECFDSVEISGVEDRFNASLGTYHDLLKIIKDKDFLDNEENEDILEDIVLTLTLFEDREMIEERLKTYAHLFDDKVMKQLKRRRYTGWGRLSRKLINGIRDKQSGKTILDFLKSDGFANRNFMQLIHDDSLTFKEDIQKAQVSGQGDSLHEHIANLAGSPAIKKGILQTVKVVDELVKVMGRHKPENIVIEMARENQTTQKGQKNSRERMKRIEEGIKELGSQILKEHPVENTQLQNEKLYLYYLQNGRDMYVDQELDINRLSDYDVDHIVPQSFLKDDSIDNKVLTRSDKARGKSDNVPSEEVVKKMKNYWRQLLNAKLITQRKFDNLTKAERGGLSELDKAGFIKRQLVETRQITKHVAQILDSRMNTKYDENDKLIREVKVITLKSKLVSDFRKDFQFYKVREINNYHHAHDAYLNAVVGTALIKKYPKLESEFVYGDYKVYDVRKMIAKSEQEIGKATAKYFFYSNIMNFFKTEITLANGEIRKRPLIETNGETGEIVWDKGRDFATVRKVLSMPQVNIVKKTEVQTGGFSKESILPKRNSDKLIARKKDWDPKKYGGFDSPTVAYSVLVVAKVEKGKSKKLKSVKELLGITIMERSSFEKNPIDFLEAKGYKEVKKDLIIKLPKYSLFELENGRKRMLASAGELQKGNELALPSKYVNFLYLASHYEKLKGSPEDNEQKQLFVEQHKHYLDEIIEQISEFSKRVILADANLDKVLSAYNKHRDKPIREQAENIIHLFTLTNLGAPAAFKYFDTTIDRKRYTSTKEVLDATLIHQSITGLYETRIDLSQLGGDGGGGSGSSGGTLNIEDEYRLHETSKEPDVSLGSTWLSDFPQAWAETGGMGLAVRQAPLIIPLKATSTPVSIKQYPMSQEARLGIKPHIQRLLDQGILVPCQSPWNTPLLPVKKPGTNDYRPVQDLREVNKRVEDIHPTVPNPYNLLSGLPPSHQWYTVLDLKDAFFCLRLHPTSQPLFAFEWRDPEMGISGQLTWTRLPQGFKNSPTLFNEALHRDLAGFRIQHPDLILLQYVDDLLLAATSELDCQQGTRALLQTLGDLGYRASAKKAQICQKQVKYLGYLLKEGQRWLTEARKETVMGQPIPKTPRQLREFLGTAGFCRLWIPGFAEMAAPLYPLTKPGTLFNWGPDQQKAFQEIKQALLTAPALGLPDLTKPFELFVDEKQGYAKGVLTQKLGPWRRPVAYLSKKLDPVAAGWPPCLRMVAAIAVLTKDAGKLTMGQPLVILAPHAVEALVKQPPDRWLSNARMTHYQALLLDTDRVQFGPVVALNPATLLPLPEEGLQHDCLDILAEAHGTRSDLMDQPLPDADHTWYTDGSSFLQEGQRKAGAAVTTETEVIWARALPAGTSAQRAELIALTQALKMAEGKKLNVYTDSRYAFATAHIHGEIYRRRGWLTSEGKEIKNKDEILALLKALFLPKRLSIIHCPGHQKGNSAEARGNRMADQAAREVATRETPETSTLLAGKRTADGSEFEKRTADGSEFESPKKKAKVE

SEQ ID NO: 2271 - protein, 2091 aa, synthetic construct
MPAAKRVKLDGGDKKYSIGLDIGTNSVGWAVITDEYKVPSKKFKVLGNTDRHSIKKNLIGALLFDSGETAEATRLKRTARRRYTRRKNRICYLQEIFSNEMAKVDDSFFHRLEESFLVEEDKKHERHPIFGNIVDEVAYHEKYPTIYHLRKKLVDSTDKADLRLIYLALAHMIKFRGHFLIEGDLNPDNSDVDKLFIQLVQTYNQLFEENPINASGVDAKAILSARLSKSRRLENLIAQLPGEKKNGLFGNLIALSLGLTPNFKSNFDLAEDAKLQLSKDTYDDDLDNLLAQIGDQYADLFLAAKNLSDAILLSDILRVNTEITKAPLSASMIKRYDEHHQDLTLLKALVRQQLPEKYKEIFFDQSKNGYAGYIDGGASQEEFYKFIKPILEKMDGTEELLVKLNREDLLRKQRTFDNGSIPHQIHLGELHAILRRQEDFYPFLKDNREKIEKILTFRIPYYVGPLARGNSRFAWMTRKSEETITPWNFEEVVDKGASAQSFIERMTNFDKNLPNEKVLPKHSLLYEYFTVYNELTKVKYVTEGMRKPAFLSGEQKKAIVDLLFKTNRKVTVKQLKEDYFKKIECFDSVEISGVEDRFNASLGTYHDLLKIIKDKDFLDNEENEDILEDIVLTLTLFEDREMIEERLKTYAHLFDDKVMKQLKRRRYTGWGRLSRKLINGIRDKQSGKTILDFLKSDGFANRNFMQLIHDDSLTFKEDIQKAQVSGQGDSLHEHIANLAGSPAIKKGILQTVKVVDELVKVMGRHKPENIVIEMARENQTTQKGQKNSRERMKRIEEGIKELGSQILKEHPVENTQLQNEKLYLYYLQNGRDMYVDQELDINRLSDYDVDHIVPQSFLKDDSIDNKVLTRSDKARGKSDNVPSEEVVKKMKNYWRQLLNAKLITQRKFDNLTKAERGGLSELDKAGFIKRQLVETRQITKHVAQILDSRMNTKYDENDKLIREVKVITLKSKLVSDFRKDFQFYKVREINNYHHAHDAYLNAVVGTALIKKYPKLESEFVYGDYKVYDVRKMIAKSEQEIGKATAKYFFYSNIMNFFKTEITLANGEIRKRPLIETNGETGEIVWDKGRDFATVRKVLSMPQVNIVKKTEVQTGGFSKESILPKRNSDKLIARKKDWDPKKYGGFDSPTVAYSVLVVAKVEKGKSKKLKSVKELLGITIMERSSFEKNPIDFLEAKGYKEVKKDLIIKLPKYSLFELENGRKRMLASAGELQKGNELALPSKYVNFLYLASHYEKLKGSPEDNEQKQLFVEQHKHYLDEIIEQISEFSKRVILADANLDKVLSAYNKHRDKPIREQAENIIHLFTLTNLGAPAAFKYFDTTIDRKRYTSTKEVLDATLIHQSITGLYETRIDLSQLGGDGGPAPGSSGGTLNIEDEYRLHETSKEPDVSLGSTWLSDFPQAWAETGGMGLAVRQAPLIIPLKATSTPVSIKQYPMSQEARLGIKPHIQRLLDQGILVPCQSPWNTPLLPVKKPGTNDYRPVQDLREVNKRVEDIHPTVPNPYNLLSGLPPSHQWYTVLDLKDAFFCLRLHPTSQPLFAFEWRDPEMGISGQLTWTRLPQGFKNSPTLFNEALHRDLAGFRIQHPDLILLQYVDDLLLAATSELDCQQGTRALLQTLGDLGYRASAKKAQICQKQVKYLGYLLKEGQRWLTEARKETVMGQPIPKTPRQLREFLGTAGFCRLWIPGFAEMAAPLYPLTKPGTLFNWGPDQQKAFQEIKQALLTAPALGLPDLTKPFELFVDEKQGYAKGVLTQKLGPWRRPVAYLSKKLDPVAAGWPPCLRMVAAIAVLTKDAGKLTMGQPLVILAPHAVEALVKQPPDRWLSNARMTHYQALLLDTDRVQFGPVVALNPATLLPLPEEGLQHDCLDILAEAHGTRSDLMDQPLPDADHTWYTDGSSFLQEGQRKAGAAVTTETEVIWARALPAGTSAQRAELIALTQALKMAEGKKLNVYTDSRYAFATAHIHGEIYRRRGWLTSEGKEIKNKDEILALLKALFLPKRLSIIHCPGHQKGNSAEARGNRMADQAAREVATRETPETSTLLAGKRTADGSEFEKRTADGSEFESPKKKAKVE

SEQ ID NO: 2272 - protein, 2094 aa, synthetic construct
MPAAKRVKLDGGDKKYSIGLDIGTNSVGWAVITDEYKVPSKKFKVLGNTDRHSIKKNLIGALLFDSGETAEATRLKRTARRRYTRRKNRICYLQEIFSNEMAKVDDSFFHRLEESFLVEEDKKHERHPIFGNIVDEVAYHEKYPTIYHLRKKLVDSTDKADLRLIYLALAHMIKFRGHFLIEGDLNPDNSDVDKLFIQLVQTYNQLFEENPINASGVDAKAILSARLSKSRRLENLIAQLPGEKKNGLFGNLIALSLGLTPNFKSNFDLAEDAKLQLSKDTYDDDLDNLLAQIGDQYADLFLAAKNLSDAILLSDILRVNTEITKAPLSASMIKRYDEHHQDLTLLKALVRQQLPEKYKEIFFDQSKNGYAGYIDGGASQEEFYKFIKPILEKMDGTEELLVKLNREDLLRKQRTFDNGSIPHQIHLGELHAILRRQEDFYPFLKDNREKIEKILTFRIPYYVGPLARGNSRFAWMTRKSEETITPWNFEEVVDKGASAQSFIERMTNFDKNLPNEKVLPKHSLLYEYFTVYNELTKVKYVTEGMRKPAFLSGEQKKAIVDLLFKTNRKVTVKQLKEDYFKKIECFDSVEISGVEDRFNASLGTYHDLLKIIKDKDFLDNEENEDILEDIVLTLTLFEDREMIEERLKTYAHLFDDKVMKQLKRRRYTGWGRLSRKLINGIRDKQSGKTILDFLKSDGFANRNFMQLIHDDSLTFKEDIQKAQVSGQGDSLHEHIANLAGSPAIKKGILQTVKVVDELVKVMGRHKPENIVIEMARENQTTQKGQKNSRERMKRIEEGIKELGSQILKEHPVENTQLQNEKLYLYYLQNGRDMYVDQELDINRLSDYDVDHIVPQSFLKDDSIDNKVLTRSDKARGKSDNVPSEEVVKKMKNYWRQLLNAKLITQRKFDNLTKAERGGLSELDKAGFIKRQLVETRQITKHVAQILDSRMNTKYDENDKLIREVKVITLKSKLVSDFRKDFQFYKVREINNYHHAHDAYLNAVVGTALIKKYPKLESEFVYGDYKVYDVRKMIAKSEQEIGKATAKYFFYSNIMNFFKTEITLANGEIRKRPLIETNGETGEIVWDKGRDFATVRKVLSMPQVNIVKKTEVQTGGFSKESILPKRNSDKLIARKKDWDPKKYGGFDSPTVAYSVLVVAKVEKGKSKKLKSVKELLGITIMERSSFEKNPIDFLEAKGYKEVKKDLIIKLPKYSLFELENGRKRMLASAGELQKGNELALPSKYVNFLYLASHYEKLKGSPEDNEQKQLFVEQHKHYLDEIIEQISEFSKRVILADANLDKVLSAYNKHRDKPIREQAENIIHLFTLTNLGAPAAFKYFDTTIDRKRYTSTKEVLDATLIHQSITGLYETRIDLSQLGGDGGGGSPAPGGGGGTLNIEDEYRLHETSKEPDVSLGSTWLSDFPQAWAETGGMGLAVRQAPLIIPLKATSTPVSIKQYPMSQEARLGIKPHIQRLLDQGILVPCQSPWNTPLLPVKKPGTNDYRPVQDLREVNKRVEDIHPTVPNPYNLLSGLPPSHQWYTVLDLKDAFFCLRLHPTSQPLFAFEWRDPEMGISGQLTWTRLPQGFKNSPTLFNEALHRDLAGFRIQHPDLILLQYVDDLLLAATSELDCQQGTRALLQTLGDLGYRASAKKAQICQKQVKYLGYLLKEGQRWLTEARKETVMGQPIPKTPRQLREFLGTAGFCRLWIPGFAEMAAPLYPLTKPGTLFNWGPDQQKAFQEIKQALLTAPALGLPDLTKPFELFVDEKQGYAKGVLTQKLGPWRRPVAYLSKKLDPVAAGWPPCLRMVAAIAVLTKDAGKLTMGQPLVILAPHAVEALVKQPPDRWLSNARMTHYQALLLDTDRVQFGPVVALNPATLLPLPEEGLQHDCLDILAEAHGTRSDLMDQPLPDADHTWYTDGSSFLQEGQRKAGAAVTTETEVIWARALPAGTSAQRAELIALTQALKMAEGKKLNVYTDSRYAFATAHIHGEIYRRRGWLTSEGKEIKNKDEILALLKALFLPKRLSIIHCPGHQKGNSAEARGNRMADQAAREVATRETPETSTLLAGKRTADGSEFEKRTADGSEFESPKKKAKVE

SEQ ID NO: 2273 - protein, 2096 aa, synthetic construct
MPAAKRVKLDGGDKKYSIGLDIGTNSVGWAVITDEYKVPSKKFKVLGNTDRHSIKKNLIGALLFDSGETAEATRLKRTARRRYTRRKNRICYLQEIFSNEMAKVDDSFFHRLEESFLVEEDKKHERHPIFGNIVDEVAYHEKYPTIYHLRKKLVDSTDKADLRLIYLALAHMIKFRGHFLIEGDLNPDNSDVDKLFIQLVQTYNQLFEENPINASGVDAKAILSARLSKSRRLENLIAQLPGEKKNGLFGNLIALSLGLTPNFKSNFDLAEDAKLQLSKDTYDDDLDNLLAQIGDQYADLFLAAKNLSDAILLSDILRVNTEITKAPLSASMIKRYDEHHQDLTLLKALVRQQLPEKYKEIFFDQSKNGYAGYIDGGASQEEFYKFIKPILEKMDGTEELLVKLNREDLLRKQRTFDNGSIPHQIHLGELHAILRRQEDFYPFLKDNREKIEKILTFRIPYYVGPLARGNSRFAWMTRKSEETITPWNFEEVVDKGASAQSFIERMTNFDKNLPNEKVLPKHSLLYEYFTVYNELTKVKYVTEGMRKPAFLSGEQKKAIVDLLFKTNRKVTVKQLKEDYFKKIECFDSVEISGVEDRFNASLGTYHDLLKIIKDKDFLDNEENEDILEDIVLTLTLFEDREMIEERLKTYAHLFDDKVMKQLKRRRYTGWGRLSRKLINGIRDKQSGKTILDFLKSDGFANRNFMQLIHDDSLTFKEDIQKAQVSGQGDSLHEHIANLAGSPAIKKGILQTVKVVDELVKVMGRHKPENIVIEMARENQTTQKGQKNSRERMKRIEEGIKELGSQILKEHPVENTQLQNEKLYLYYLQNGRDMYVDQELDINRLSDYDVDHIVPQSFLKDDSIDNKVLTRSDKARGKSDNVPSEEVVKKMKNYWRQLLNAKLITQRKFDNLTKAERGGLSELDKAGFIKRQLVETRQITKHVAQILDSRMNTKYDENDKLIREVKVITLKSKLVSDFRKDFQFYKVREINNYHHAHDAYLNAVVGTALIKKYPKLESEFVYGDYKVYDVRKMIAKSEQEIGKATAKYFFYSNIMNFFKTEITLANGEIRKRPLIETNGETGEIVWDKGRDFATVRKVLSMPQVNIVKKTEVQTGGFSKESILPKRNSDKLIARKKDWDPKKYGGFDSPTVAYSVLVVAKVEKGKSKKLKSVKELLGITIMERSSFEKNPIDFLEAKGYKEVKKDLIIKLPKYSLFELENGRKRMLASAGELQKGNELALPSKYVNFLYLASHYEKLKGSPEDNEQKQLFVEQHKHYLDEIIEQISEFSKRVILADANLDKVLSAYNKHRDKPIREQAENIIHLFTLTNLGAPAAFKYFDTTIDRKRYTSTKEVLDATLIHQSITGLYETRIDLSQLGGDGGGSSGGSEAAAKGGTLNIEDEYRLHETSKEPDVSLGSTWLSDFPQAWAETGGMGLAVRQAPLIIPLKATSTPVSIKQYPMSQEARLGIKPHIQRLLDQGILVPCQSPWNTPLLPVKKPGTNDYRPVQDLREVNKRVEDIHPTVPNPYNLLSGLPPSHQWYTVLDLKDAFFCLRLHPTSQPLFAFEWRDPEMGISGQLTWTRLPQGFKNSPTLFNEALHRDLAGFRIQHPDLILLQYVDDLLLAATSELDCQQGTRALLQTLGDLGYRASAKKAQICQKQVKYLGYLLKEGQRWLTEARKETVMGQPIPKTPRQLREFLGTAGFCRLWIPGFAEMAAPLYPLTKPGTLFNWGPDQQKAFQEIKQALLTAPALGLPDLTKPFELFVDEKQGYAKGVLTQKLGPWRRPVAYLSKKLDPVAAGWPPCLRMVAAIAVLTKDAGKLTMGQPLVILAPHAVEALVKQPPDRWLSNARMTHYQALLLDTDRVQFGPVVALNPATLLPLPEEGLQHDCLDILAEAHGTRSDLMDQPLPDADHTWYTDGSSFLQEGQRKAGAAVTTETEVIWARALPAGTSAQRAELIALTQALKMAEGKKLNVYTDSRYAFATAHIHGEIYRRRGWLTSEGKEIKNKDEILALLKALFLPKRLSIIHCPGHQKGNSAEARGNRMADQAAREVATRETPETSTLLAGKRTADGSEFEKRTADGSEFESPKKKAKVE

SEQ ID NO: 2274 - protein, 2094 aa, synthetic construct
MPAAKRVKLDGGDKKYSIGLDIGTNSVGWAVITDEYKVPSKKFKVLGNTDRHSIKKNLIGALLFDSGETAEATRLKRTARRRYTRRKNRICYLQEIFSNEMAKVDDSFFHRLEESFLVEEDKKHERHPIFGNIVDEVAYHEKYPTIYHLRKKLVDSTDKADLRLIYLALAHMIKFRGHFLIEGDLNPDNSDVDKLFIQLVQTYNQLFEENPINASGVDAKAILSARLSKSRRLENLIAQLPGEKKNGLFGNLIALSLGLTPNFKSNFDLAEDAKLQLSKDTYDDDLDNLLAQIGDQYADLFLAAKNLSDAILLSDILRVNTEITKAPLSASMIKRYDEHHQDLTLLKALVRQQLPEKYKEIFFDQSKNGYAGYIDGGASQEEFYKFIKPILEKMDGTEELLVKLNREDLLRKQRTFDNGSIPHQIHLGELHAILRRQEDFYPFLKDNREKIEKILTFRIPYYVGPLARGNSRFAWMTRKSEETITPWNFEEVVDKGASAQSFIERMTNFDKNLPNEKVLPKHSLLYEYFTVYNELTKVKYVTEGMRKPAFLSGEQKKAIVDLLFKTNRKVTVKQLKEDYFKKIECFDSVEISGVEDRFNASLGTYHDLLKIIKDKDFLDNEENEDILEDIVLTLTLFEDREMIEERLKTYAHLFDDKVMKQLKRRRYTGWGRLSRKLINGIRDKQSGKTILDFLKSDGFANRNFMQLIHDDSLTFKEDIQKAQVSGQGDSLHEHIANLAGSPAIKKGILQTVKVVDELVKVMGRHKPENIVIEMARENQTTQKGQKNSRERMKRIEEGIKELGSQILKEHPVENTQLQNEKLYLYYLQNGRDMYVDQELDINRLSDYDVDHIVPQSFLKDDSIDNKVLTRSDKARGKSDNVPSEEVVKKMKNYWRQLLNAKLITQRKFDNLTKAERGGLSELDKAGFIKRQLVETRQITKHVAQILDSRMNTKYDENDKLIREVKVITLKSKLVSDFRKDFQFYKVREINNYHHAHDAYLNAVVGTALIKKYPKLESEFVYGDYKVYDVRKMIAKSEQEIGKATAKYFFYSNIMNFFKTEITLANGEIRKRPLIETNGETGEIVWDKGRDFATVRKVLSMPQVNIVKKTEVQTGGFSKESILPKRNSDKLIARKKDWDPKKYGGFDSPTVAYSVLVVAKVEKGKSKKLKSVKELLGITIMERSSFEKNPIDFLEAKGYKEVKKDLIIKLPKYSLFELENGRKRMLASAGELQKGNELALPSKYVNFLYLASHYEKLKGSPEDNEQKQLFVEQHKHYLDEIIEQISEFSKRVILADANLDKVLSAYNKHRDKPIREQAENIIHLFTLTNLGAPAAFKYFDTTIDRKRYTSTKEVLDATLIHQSITGLYETRIDLSQLGGDGGGGSGGSGGSGGTLNIEDEYRLHETSKEPDVSLGSTWLSDFPQAWAETGGMGLAVRQAPLIIPLKATSTPVSIKQYPMSQEARLGIKPHIQRLLDQGILVPCQSPWNTPLLPVKKPGTNDYRPVQDLREVNKRVEDIHPTVPNPYNLLSGLPPSHQWYTVLDLKDAFFCLRLHPTSQPLFAFEWRDPEMGISGQLTWTRLPQGFKNSPTLFNEALHRDLAGFRIQHPDLILLQYVDDLLLAATSELDCQQGTRALLQTLGDLGYRASAKKAQICQKQVKYLGYLLKEGQRWLTEARKETVMGQPIPKTPRQLREFLGTAGFCRLWIPGFAEMAAPLYPLTKPGTLFNWGPDQQKAFQEIKQALLTAPALGLPDLTKPFELFVDEKQGYAKGVLTQKLGPWRRPVAYLSKKLDPVAAGWPPCLRMVAAIAVLTKDAGKLTMGQPLVILAPHAVEALVKQPPDRWLSNARMTHYQALLLDTDRVQFGPVVALNPATLLPLPEEGLQHDCLDILAEAHGTRSDLMDQPLPDADHTWYTDGSSFLQEGQRKAGAAVTTETEVIWARALPAGTSAQRAELIALTQALKMAEGKKLNVYTDSRYAFATAHIHGEIYRRRGWLTSEGKEIKNKDEILALLKALFLPKRLSIIHCPGHQKGNSAEARGNRMADQAAREVATRETPETSTLLAGKRTADGSEFEKRTADGSEFESPKKKAKVE

SEQ ID NO: 2275 - protein, 2096 aa, synthetic construct
MPAAKRVKLDGGDKKYSIGLDIGTNSVGWAVITDEYKVPSKKFKVLGNTDRHSIKKNLIGALLFDSGETAEATRLKRTARRRYTRRKNRICYLQEIFSNEMAKVDDSFFHRLEESFLVEEDKKHERHPIFGNIVDEVAYHEKYPTIYHLRKKLVDSTDKADLRLIYLALAHMIKFRGHFLIEGDLNPDNSDVDKLFIQLVQTYNQLFEENPINASGVDAKAILSARLSKSRRLENLIAQLPGEKKNGLFGNLIALSLGLTPNFKSNFDLAEDAKLQLSKDTYDDDLDNLLAQIGDQYADLFLAAKNLSDAILLSDILRVNTEITKAPLSASMIKRYDEHHQDLTLLKALVRQQLPEKYKEIFFDQSKNGYAGYIDGGASQEEFYKFIKPILEKMDGTEELLVKLNREDLLRKQRTFDNGSIPHQIHLGELHAILRRQEDFYPFLKDNREKIEKILTFRIPYYVGPLARGNSRFAWMTRKSEETITPWNFEEVVDKGASAQSFIERMTNFDKNLPNEKVLPKHSLLYEYFTVYNELTKVKYVTEGMRKPAFLSGEQKKAIVDLLFKTNRKVTVKQLKEDYFKKIECFDSVEISGVEDRFNASLGTYHDLLKIIKDKDFLDNEENEDILEDIVLTLTLFEDREMIEERLKTYAHLFDDKVMKQLKRRRYTGWGRLSRKLINGIRDKQSGKTILDFLKSDGFANRNFMQLIHDDSLTFKEDIQKAQVSGQGDSLHEHIANLAGSPAIKKGILQTVKVVDELVKVMGRHKPENIVIEMARENQTTQKGQKNSRERMKRIEEGIKELGSQILKEHPVENTQLQNEKLYLYYLQNGRDMYVDQELDINRLSDYDVDHIVPQSFLKDDSIDNKVLTRSDKARGKSDNVPSEEVVKKMKNYWRQLLNAKLITQRKFDNLTKAERGGLSELDKAGFIKRQLVETRQITKHVAQILDSRMNTKYDENDKLIREVKVITLKSKLVSDFRKDFQFYKVREINNYHHAHDAYLNAVVGTALIKKYPKLESEFVYGDYKVYDVRKMIAKSEQEIGKATAKYFFYSNIMNFFKTEITLANGEIRKRPLIETNGETGEIVWDKGRDFATVRKVLSMPQVNIVKKTEVQTGGFSKESILPKRNSDKLIARKKDWDPKKYGGFDSPTVAYSVLVVAKVEKGKSKKLKSVKELLGITIMERSSFEKNPIDFLEAKGYKEVKKDLIIKLPKYSLFELENGRKRMLASAGELQKGNELALPSKYVNFLYLASHYEKLKGSPEDNEQKQLFVEQHKHYLDEIIEQISEFSKRVILADANLDKVLSAYNKHRDKPIREQAENIIHLFTLTNLGAPAAFKYFDTTIDRKRYTSTKEVLDATLIHQSITGLYETRIDLSQLGGDGGGGGEAAAKGGSGGTLNIEDEYRLHETSKEPDVSLGSTWLSDFPQAWAETGGMGLAVRQAPLIIPLKATSTPVSIKQYPMSQEARLGIKPHIQRLLDQGILVPCQSPWNTPLLPVKKPGTNDYRPVQDLREVNKRVEDIHPTVPNPYNLLSGLPPSHQWYTVLDLKDAFFCLRLHPTSQPLFAFEWRDPEMGISGQLTWTRLPQGFKNSPTLFNEALHRDLAGFRIQHPDLILLQYVDDLLLAATSELDCQQGTRALLQTLGDLGYRASAKKAQICQKQVKYLGYLLKEGQRWLTEARKETVMGQPIPKTPRQLREFLGTAGFCRLWIPGFAEMAAPLYPLTKPGTLFNWGPDQQKAFQEIKQALLTAPALGLPDLTKPFELFVDEKQGYAKGVLTQKLGPWRRPVAYLSKKLDPVAAGWPPCLRMVAAIAVLTKDAGKLTMGQPLVILAPHAVEALVKQPPDRWLSNARMTHYQALLLDTDRVQFGPVVALNPATLLPLPEEGLQHDCLDILAEAHGTRSDLMDQPLPDADHTWYTDGSSFLQEGQRKAGAAVTTETEVIWARALPAGTSAQRAELIALTQALKMAEGKKLNVYTDSRYAFATAHIHGEIYRRRGWLTSEGKEIKNKDEILALLKALFLPKRLSIIHCPGHQKGNSAEARGNRMADQAAREVATRETPETSTLLAGKRTADGSEFEKRTADGSEFESPKKKAKVE

SEQ ID NO: 2276 - protein, 2095 aa, synthetic construct
MPAAKRVKLDGGDKKYSIGLDIGTNSVGWAVITDEYKVPSKKFKVLGNTDRHSIKKNLIGALLFDSGETAEATRLKRTARRRYTRRKNRICYLQEIFSNEMAKVDDSFFHRLEESFLVEEDKKHERHPIFGNIVDEVAYHEKYPTIYHLRKKLVDSTDKADLRLIYLALAHMIKFRGHFLIEGDLNPDNSDVDKLFIQLVQTYNQLFEENPINASGVDAKAILSARLSKSRRLENLIAQLPGEKKNGLFGNLIALSLGLTPNFKSNFDLAEDAKLQLSKDTYDDDLDNLLAQIGDQYADLFLAAKNLSDAILLSDILRVNTEITKAPLSASMIKRYDEHHQDLTLLKALVRQQLPEKYKEIFFDQSKNGYAGYIDGGASQEEFYKFIKPILEKMDGTEELLVKLNREDLLRKQRTFDNGSIPHQIHLGELHAILRRQEDFYPFLKDNREKIEKILTFRIPYYVGPLARGNSRFAWMTRKSEETITPWNFEEVVDKGASAQSFIERMTNFDKNLPNEKVLPKHSLLYEYFTVYNELTKVKYVTEGMRKPAFLSGEQKKAIVDLLFKTNRKVTVKQLKEDYFKKIECFDSVEISGVEDRFNASLGTYHDLLKIIKDKDFLDNEENEDILEDIVLTLTLFEDREMIEERLKTYAHLFDDKVMKQLKRRRYTGWGRLSRKLINGIRDKQSGKTILDFLKSDGFANRNFMQLIHDDSLTFKEDIQKAQVSGQGDSLHEHIANLAGSPAIKKGILQTVKVVDELVKVMGRHKPENIVIEMARENQTTQKGQKNSRERMKRIEEGIKELGSQILKEHPVENTQLQNEKLYLYYLQNGRDMYVDQELDINRLSDYDVDHIVPQSFLKDDSIDNKVLTRSDKARGKSDNVPSEEVVKKMKNYWRQLLNAKLITQRKFDNLTKAERGGLSELDKAGFIKRQLVETRQITKHVAQILDSRMNTKYDENDKLIREVKVITLKSKLVSDFRKDFQFYKVREINNYHHAHDAYLNAVVGTALIKKYPKLESEFVYGDYKVYDVRKMIAKSEQEIGKATAKYFFYSNIMNFFKTEITLANGEIRKRPLIETNGETGEIVWDKGRDFATVRKVLSMPQVNIVKKTEVQTGGFSKESILPKRNSDKLIARKKDWDPKKYGGFDSPTVAYSVLVVAKVEKGKSKKLKSVKELLGITIMERSSFEKNPIDFLEAKGYKEVKKDLIIKLPKYSLFELENGRKRMLASAGELQKGNELALPSKYVNFLYLASHYEKLKGSPEDNEQKQLFVEQHKHYLDEIIEQISEFSKRVILADANLDKVLSAYNKHRDKPIREQAENIIHLFTLTNLGAPAAFKYFDTTIDRKRYTSTKEVLDATLIHQSITGLYETRIDLSQLGGDGGGGGGSGGGGSGGTLNIEDEYRLHETSKEPDVSLGSTWLSDFPQAWAETGGMGLAVRQAPLIIPLKATSTPVSIKQYPMSQEARLGIKPHIQRLLDQGILVPCQSPWNTPLLPVKKPGTNDYRPVQDLREVNKRVEDIHPTVPNPYNLLSGLPPSHQWYTVLDLKDAFFCLRLHPTSQPLFAFEWRDPEMGISGQLTWTRLPQGFKNSPTLFNEALHRDLAGFRIQHPDLILLQYVDDLLLAATSELDCQQGTRALLQTLGDLGYRASAKKAQICQKQVKYLGYLLKEGQRWLTEARKETVMGQPIPKTPRQLREFLGTAGFCRLWIPGFAEMAAPLYPLTKPGTLFNWGPDQQKAFQEIKQALLTAPALGLPDLTKPFELFVDEKQGYAKGVLTQKLGPWRRPVAYLSKKLDPVAAGWPPCLRMVAAIAVLTKDAGKLTMGQPLVILAPHAVEALVKQPPDRWLSNARMTHYQALLLDTDRVQFGPVVALNPATLLPLPEEGLQHDCLDILAEAHGTRSDLMDQPLPDADHTWYTDGSSFLQEGQRKAGAAVTTETEVIWARALPAGTSAQRAELIALTQALKMAEGKKLNVYTDSRYAFATAHIHGEIYRRRGWLTSEGKEIKNKDEILALLKALFLPKRLSIIHCPGHQKGNSAEARGNRMADQAAREVATRETPETSTLLAGKRTADGSEFEKRTADGSEFESPKKKAKVE

SEQ ID NO: 2277 - protein, 2096 aa, synthetic construct
MPAAKRVKLDGGDKKYSIGLDIGTNSVGWAVITDEYKVPSKKFKVLGNTDRHSIKKNLIGALLFDSGETAEATRLKRTARRRYTRRKNRICYLQEIFSNEMAKVDDSFFHRLEESFLVEEDKKHERHPIFGNIVDEVAYHEKYPTIYHLRKKLVDSTDKADLRLIYLALAHMIKFRGHFLIEGDLNPDNSDVDKLFIQLVQTYNQLFEENPINASGVDAKAILSARLSKSRRLENLIAQLPGEKKNGLFGNLIALSLGLTPNFKSNFDLAEDAKLQLSKDTYDDDLDNLLAQIGDQYADLFLAAKNLSDAILLSDILRVNTEITKAPLSASMIKRYDEHHQDLTLLKALVRQQLPEKYKEIFFDQSKNGYAGYIDGGASQEEFYKFIKPILEKMDGTEELLVKLNREDLLRKQRTFDNGSIPHQIHLGELHAILRRQEDFYPFLKDNREKIEKILTFRIPYYVGPLARGNSRFAWMTRKSEETITPWNFEEVVDKGASAQSFIERMTNFDKNLPNEKVLPKHSLLYEYFTVYNELTKVKYVTEGMRKPAFLSGEQKKAIVDLLFKTNRKVTVKQLKEDYFKKIECFDSVEISGVEDRFNASLGTYHDLLKIIKDKDFLDNEENEDILEDIVLTLTLFEDREMIEERLKTYAHLFDDKVMKQLKRRRYTGWGRLSRKLINGIRDKQSGKTILDFLKSDGFANRNFMQLIHDDSLTFKEDIQKAQVSGQGDSLHEHIANLAGSPAIKKGILQTVKVVDELVKVMGRHKPENIVIEMARENQTTQKGQKNSRERMKRIEEGIKELGSQILKEHPVENTQLQNEKLYLYYLQNGRDMYVDQELDINRLSDYDVDHIVPQSFLKDDSIDNKVLTRSDKARGKSDNVPSEEVVKKMKNYWRQLLNAKLITQRKFDNLTKAERGGLSELDKAGFIKRQLVETRQITKHVAQILDSRMNTKYDENDKLIREVKVITLKSKLVSDFRKDFQFYKVREINNYHHAHDAYLNAVVGTALIKKYPKLESEFVYGDYKVYDVRKMIAKSEQEIGKATAKYFFYSNIMNFFKTEITLANGEIRKRPLIETNGETGEIVWDKGRDFATVRKVLSMPQVNIVKKTEVQTGGFSKESILPKRNSDKLIARKKDWDPKKYGGFDSPTVAYSVLVVAKVEKGKSKKLKSVKELLGITIMERSSFEKNPIDFLEAKGYKEVKKDLIIKLPKYSLFELENGRKRMLASAGELQKGNELALPSKYVNFLYLASHYEKLKGSPEDNEQKQLFVEQHKHYLDEIIEQISEFSKRVILADANLDKVLSAYNKHRDKPIREQAENIIHLFTLTNLGAPAAFKYFDTTIDRKRYTSTKEVLDATLIHQSITGLYETRIDLSQLGGDGGEAAAKPAPGGSGGTLNIEDEYRLHETSKEPDVSLGSTWLSDFPQAWAETGGMGLAVRQAPLIIPLKATSTPVSIKQYPMSQEARLGIKPHIQRLLDQGILVPCQSPWNTPLLPVKKPGTNDYRPVQDLREVNKRVEDIHPTVPNPYNLLSGLPPSHQWYTVLDLKDAFFCLRLHPTSQPLFAFEWRDPEMGISGQLTWTRLPQGFKNSPTLFNEALHRDLAGFRIQHPDLILLQYVDDLLLAATSELDCQQGTRALLQTLGDLGYRASAKKAQICQKQVKYLGYLLKEGQRWLTEARKETVMGQPIPKTPRQLREFLGTAGFCRLWIPGFAEMAAPLYPLTKPGTLFNWGPDQQKAFQEIKQALLTAPALGLPDLTKPFELFVDEKQGYAKGVLTQKLGPWRRPVAYLSKKLDPVAAGWPPCLRMVAAIAVLTKDAGKLTMGQPLVILAPHAVEALVKQPPDRWLSNARMTHYQALLLDTDRVQFGPVVALNPATLLPLPEEGLQHDCLDILAEAHGTRSDLMDQPLPDADHTWYTDGSSFLQEGQRKAGAAVTTETEVIWARALPAGTSAQRAELIALTQALKMAEGKKLNVYTDSRYAFATAHIHGEIYRRRGWLTSEGKEIKNKDEILALLKALFLPKRLSIIHCPGHQKGNSAEARGNRMADQAAREVATRETPETSTLLAGKRTADGSEFEKRTADGSEFESPKKKAKVE

SEQ ID NO: 2278 - protein, 2096 aa, synthetic construct
MPAAKRVKLDGGDKKYSIGLDIGTNSVGWAVITDEYKVPSKKFKVLGNTDRHSIKKNLIGALLFDSGETAEATRLKRTARRRYTRRKNRICYLQEIFSNEMAKVDDSFFHRLEESFLVEEDKKHERHPIFGNIVDEVAYHEKYPTIYHLRKKLVDSTDKADLRLIYLALAHMIKFRGHFLIEGDLNPDNSDVDKLFIQLVQTYNQLFEENPINASGVDAKAILSARLSKSRRLENLIAQLPGEKKNGLFGNLIALSLGLTPNFKSNFDLAEDAKLQLSKDTYDDDLDNLLAQIGDQYADLFLAAKNLSDAILLSDILRVNTEITKAPLSASMIKRYDEHHQDLTLLKALVRQQLPEKYKEIFFDQSKNGYAGYIDGGASQEEFYKFIKPILEKMDGTEELLVKLNREDLLRKQRTFDNGSIPHQIHLGELHAILRRQEDFYPFLKDNREKIEKILTFRIPYYVGPLARGNSRFAWMTRKSEETITPWNFEEVVDKGASAQSFIERMTNFDKNLPNEKVLPKHSLLYEYFTVYNELTKVKYVTEGMRKPAFLSGEQKKAIVDLLFKTNRKVTVKQLKEDYFKKIECFDSVEISGVEDRFNASLGTYHDLLKIIKDKDFLDNEENEDILEDIVLTLTLFEDREMIEERLKTYAHLFDDKVMKQLKRRRYTGWGRLSRKLINGIRDKQSGKTILDFLKSDGFANRNFMQLIHDDSLTFKEDIQKAQVSGQGDSLHEHIANLAGSPAIKKGILQTVKVVDELVKVMGRHKPENIVIEMARENQTTQKGQKNSRERMKRIEEGIKELGSQILKEHPVENTQLQNEKLYLYYLQNGRDMYVDQELDINRLSDYDVDHIVPQSFLKDDSIDNKVLTRSDKARGKSDNVPSEEVVKKMKNYWRQLLNAKLITQRKFDNLTKAERGGLSELDKAGFIKRQLVETRQITKHVAQILDSRMNTKYDENDKLIREVKVITLKSKLVSDFRKDFQFYKVREINNYHHAHDAYLNAVVGTALIKKYPKLESEFVYGDYKVYDVRKMIAKSEQEIGKATAKYFFYSNIMNFFKTEITLANGEIRKRPLIETNGETGEIVWDKGRDFATVRKVLSMPQVNIVKKTEVQTGGFSKESILPKRNSDKLIARKKDWDPKKYGGFDSPTVAYSVLVVAKVEKGKSKKLKSVKELLGITIMERSSFEKNPIDFLEAKGYKEVKKDLIIKLPKYSLFELENGRKRMLASAGELQKGNELALPSKYVNFLYLASHYEKLKGSPEDNEQKQLFVEQHKHYLDEIIEQISEFSKRVILADANLDKVLSAYNKHRDKPIREQAENIIHLFTLTNLGAPAAFKYFDTTIDRKRYTSTKEVLDATLIHQSITGLYETRIDLSQLGGDGGEAAAKGGGPAPGGTLNIEDEYRLHETSKEPDVSLGSTWLSDFPQAWAETGGMGLAVRQAPLIIPLKATSTPVSIKQYPMSQEARLGIKPHIQRLLDQGILVPCQSPWNTPLLPVKKPGTNDYRPVQDLREVNKRVEDIHPTVPNPYNLLSGLPPSHQWYTVLDLKDAFFCLRLHPTSQPLFAFEWRDPEMGISGQLTWTRLPQGFKNSPTLFNEALHRDLAGFRIQHPDLILLQYVDDLLLAATSELDCQQGTRALLQTLGDLGYRASAKKAQICQKQVKYLGYLLKEGQRWLTEARKETVMGQPIPKTPRQLREFLGTAGFCRLWIPGFAEMAAPLYPLTKPGTLFNWGPDQQKAFQEIKQALLTAPALGLPDLTKPFELFVDEKQGYAKGVLTQKLGPWRRPVAYLSKKLDPVAAGWPPCLRMVAAIAVLTKDAGKLTMGQPLVILAPHAVEALVKQPPDRWLSNARMTHYQALLLDTDRVQFGPVVALNPATLLPLPEEGLQHDCLDILAEAHGTRSDLMDQPLPDADHTWYTDGSSFLQEGQRKAGAAVTTETEVIWARALPAGTSAQRAELIALTQALKMAEGKKLNVYTDSRYAFATAHIHGEIYRRRGWLTSEGKEIKNKDEILALLKALFLPKRLSIIHCPGHQKGNSAEARGNRMADQAAREVATRETPETSTLLAGKRTADGSEFEKRTADGSEFESPKKKAKVE

SEQ ID NO: 2279 - protein, 2096 aa, synthetic construct
MPAAKRVKLDGGDKKYSIGLDIGTNSVGWAVITDEYKVPSKKFKVLGNTDRHSIKKNLIGALLFDSGETAEATRLKRTARRRYTRRKNRICYLQEIFSNEMAKVDDSFFHRLEESFLVEEDKKHERHPIFGNIVDEVAYHEKYPTIYHLRKKLVDSTDKADLRLIYLALAHMIKFRGHFLIEGDLNPDNSDVDKLFIQLVQTYNQLFEENPINASGVDAKAILSARLSKSRRLENLIAQLPGEKKNGLFGNLIALSLGLTPNFKSNFDLAEDAKLQLSKDTYDDDLDNLLAQIGDQYADLFLAAKNLSDAILLSDILRVNTEITKAPLSASMIKRYDEHHQDLTLLKALVRQQLPEKYKEIFFDQSKNGYAGYIDGGASQEEFYKFIKPILEKMDGTEELLVKLNREDLLRKQRTFDNGSIPHQIHLGELHAILRRQEDFYPFLKDNREKIEKILTFRIPYYVGPLARGNSRFAWMTRKSEETITPWNFEEVVDKGASAQSFIERMTNFDKNLPNEKVLPKHSLLYEYFTVYNELTKVKYVTEGMRKPAFLSGEQKKAIVDLLFKTNRKVTVKQLKEDYFKKIECFDSVEISGVEDRFNASLGTYHDLLKIIKDKDFLDNEENEDILEDIVLTLTLFEDREMIEERLKTYAHLFDDKVMKQLKRRRYTGWGRLSRKLINGIRDKQSGKTILDFLKSDGFANRNFMQLIHDDSLTFKEDIQKAQVSGQGDSLHEHIANLAGSPAIKKGILQTVKVVDELVKVMGRHKPENIVIEMARENQTTQKGQKNSRERMKRIEEGIKELGSQILKEHPVENTQLQNEKLYLYYLQNGRDMYVDQELDINRLSDYDVDHIVPQSFLKDDSIDNKVLTRSDKARGKSDNVPSEEVVKKMKNYWRQLLNAKLITQRKFDNLTKAERGGLSELDKAGFIKRQLVETRQITKHVAQILDSRMNTKYDENDKLIREVKVITLKSKLVSDFRKDFQFYKVREINNYHHAHDAYLNAVVGTALIKKYPKLESEFVYGDYKVYDVRKMIAKSEQEIGKATAKYFFYSNIMNFFKTEITLANGEIRKRPLIETNGETGEIVWDKGRDFATVRKVLSMPQVNIVKKTEVQTGGFSKESILPKRNSDKLIARKKDWDPKKYGGFDSPTVAYSVLVVAKVEKGKSKKLKSVKELLGITIMERSSFEKNPIDFLEAKGYKEVKKDLIIKLPKYSLFELENGRKRMLASAGELQKGNELALPSKYVNFLYLASHYEKLKGSPEDNEQKQLFVEQHKHYLDEIIEQISEFSKRVILADANLDKVLSAYNKHRDKPIREQAENIIHLFTLTNLGAPAAFKYFDTTIDRKRYTSTKEVLDATLIHQSITGLYETRIDLSQLGGDGGGGGEAAAKPAPGGTLNIEDEYRLHETSKEPDVSLGSTWLSDFPQAWAETGGMGLAVRQAPLIIPLKATSTPVSIKQYPMSQEARLGIKPHIQRLLDQGILVPCQSPWNTPLLPVKKPGTNDYRPVQDLREVNKRVEDIHPTVPNPYNLLSGLPPSHQWYTVLDLKDAFFCLRLHPTSQPLFAFEWRDPEMGISGQLTWTRLPQGFKNSPTLFNEALHRDLAGFRIQHPDLILLQYVDDLLLAATSELDCQQGTRALLQTLGDLGYRASAKKAQICQKQVKYLGYLLKEGQRWLTEARKETVMGQPIPKTPRQLREFLGTAGFCRLWIPGFAEMAAPLYPLTKPGTLFNWGPDQQKAFQEIKQALLTAPALGLPDLTKPFELFVDEKQGYAKGVLTQKLGPWRRPVAYLSKKLDPVAAGWPPCLRMVAAIAVLTKDAGKLTMGQPLVILAPHAVEALVKQPPDRWLSNARMTHYQALLLDTDRVQFGPVVALNPATLLPLPEEGLQHDCLDILAEAHGTRSDLMDQPLPDADHTWYTDGSSFLQEGQRKAGAAVTTETEVIWARALPAGTSAQRAELIALTQALKMAEGKKLNVYTDSRYAFATAHIHGEIYRRRGWLTSEGKEIKNKDEILALLKALFLPKRLSIIHCPGHQKGNSAEARGNRMADQAAREVATRETPETSTLLAGKRTADGSEFEKRTADGSEFESPKKKAKVE

SEQ ID NO: 2280 - protein, 2100 aa, synthetic construct
MPAAKRVKLDGGDKKYSIGLDIGTNSVGWAVITDEYKVPSKKFKVLGNTDRHSIKKNLIGALLFDSGETAEATRLKRTARRRYTRRKNRICYLQEIFSNEMAKVDDSFFHRLEESFLVEEDKKHERHPIFGNIVDEVAYHEKYPTIYHLRKKLVDSTDKADLRLIYLALAHMIKFRGHFLIEGDLNPDNSDVDKLFIQLVQTYNQLFEENPINASGVDAKAILSARLSKSRRLENLIAQLPGEKKNGLFGNLIALSLGLTPNFKSNFDLAEDAKLQLSKDTYDDDLDNLLAQIGDQYADLFLAAKNLSDAILLSDILRVNTEITKAPLSASMIKRYDEHHQDLTLLKALVRQQLPEKYKEIFFDQSKNGYAGYIDGGASQEEFYKFIKPILEKMDGTEELLVKLNREDLLRKQRTFDNGSIPHQIHLGELHAILRRQEDFYPFLKDNREKIEKILTFRIPYYVGPLARGNSRFAWMTRKSEETITPWNFEEVVDKGASAQSFIERMTNFDKNLPNEKVLPKHSLLYEYFTVYNELTKVKYVTEGMRKPAFLSGEQKKAIVDLLFKTNRKVTVKQLKEDYFKKIECFDSVEISGVEDRFNASLGTYHDLLKIIKDKDFLDNEENEDILEDIVLTLTLFEDREMIEERLKTYAHLFDDKVMKQLKRRRYTGWGRLSRKLINGIRDKQSGKTILDFLKSDGFANRNFMQLIHDDSLTFKEDIQKAQVSGQGDSLHEHIANLAGSPAIKKGILQTVKVVDELVKVMGRHKPENIVIEMARENQTTQKGQKNSRERMKRIEEGIKELGSQILKEHPVENTQLQNEKLYLYYLQNGRDMYVDQELDINRLSDYDVDHIVPQSFLKDDSIDNKVLTRSDKARGKSDNVPSEEVVKKMKNYWRQLLNAKLITQRKFDNLTKAERGGLSELDKAGFIKRQLVETRQITKHVAQILDSRMNTKYDENDKLIREVKVITLKSKLVSDFRKDFQFYKVREINNYHHAHDAYLNAVVGTALIKKYPKLESEFVYGDYKVYDVRKMIAKSEQEIGKATAKYFFYSNIMNFFKTEITLANGEIRKRPLIETNGETGEIVWDKGRDFATVRKVLSMPQVNIVKKTEVQTGGFSKESILPKRNSDKLIARKKDWDPKKYGGFDSPTVAYSVLVVAKVEKGKSKKLKSVKELLGITIMERSSFEKNPIDFLEAKGYKEVKKDLIIKLPKYSLFELENGRKRMLASAGELQKGNELALPSKYVNFLYLASHYEKLKGSPEDNEQKQLFVEQHKHYLDEIIEQISEFSKRVILADANLDKVLSAYNKHRDKPIREQAENIIHLFTLTNLGAPAAFKYFDTTIDRKRYTSTKEVLDATLIHQSITGLYETRIDLSQLGGDGGGSSGSSGSSGSSGSSGGTLNIEDEYRLHETSKEPDVSLGSTWLSDFPQAWAETGGMGLAVRQAPLIIPLKATSTPVSIKQYPMSQEARLGIKPHIQRLLDQGILVPCQSPWNTPLLPVKKPGTNDYRPVQDLREVNKRVEDIHPTVPNPYNLLSGLPPSHQWYTVLDLKDAFFCLRLHPTSQPLFAFEWRDPEMGISGQLTWTRLPQGFKNSPTLFNEALHRDLAGFRIQHPDLILLQYVDDLLLAATSELDCQQGTRALLQTLGDLGYRASAKKAQICQKQVKYLGYLLKEGQRWLTEARKETVMGQPIPKTPRQLREFLGTAGFCRLWIPGFAEMAAPLYPLTKPGTLFNWGPDQQKAFQEIKQALLTAPALGLPDLTKPFELFVDEKQGYAKGVLTQKLGPWRRPVAYLSKKLDPVAAGWPPCLRMVAAIAVLTKDAGKLTMGQPLVILAPHAVEALVKQPPDRWLSNARMTHYQALLLDTDRVQFGPVVALNPATLLPLPEEGLQHDCLDILAEAHGTRSDLMDQPLPDADHTWYTDGSSFLQEGQRKAGAAVTTETEVIWARALPAGTSAQRAELIALTQALKMAEGKKLNVYTDSRYAFATAHIHGEIYRRRGWLTSEGKEIKNKDEILALLKALFLPKRLSIIHCPGHQKGNSAEARGNRMADQAAREVATRETPETSTLLAGKRTADGSEFEKRTADGSEFESPKKKAKVE

SEQ ID NO: 2281 - protein, 2093 aa, synthetic construct
MPAAKRVKLDGGDKKYSIGLDIGTNSVGWAVITDEYKVPSKKFKVLGNTDRHSIKKNLIGALLFDSGETAEATRLKRTARRRYTRRKNRICYLQEIFSNEMAKVDDSFFHRLEESFLVEEDKKHERHPIFGNIVDEVAYHEKYPTIYHLRKKLVDSTDKADLRLIYLALAHMIKFRGHFLIEGDLNPDNSDVDKLFIQLVQTYNQLFEENPINASGVDAKAILSARLSKSRRLENLIAQLPGEKKNGLFGNLIALSLGLTPNFKSNFDLAEDAKLQLSKDTYDDDLDNLLAQIGDQYADLFLAAKNLSDAILLSDILRVNTEITKAPLSASMIKRYDEHHQDLTLLKALVRQQLPEKYKEIFFDQSKNGYAGYIDGGASQEEFYKFIKPILEKMDGTEELLVKLNREDLLRKQRTFDNGSIPHQIHLGELHAILRRQEDFYPFLKDNREKIEKILTFRIPYYVGPLARGNSRFAWMTRKSEETITPWNFEEVVDKGASAQSFIERMTNFDKNLPNEKVLPKHSLLYEYFTVYNELTKVKYVTEGMRKPAFLSGEQKKAIVDLLFKTNRKVTVKQLKEDYFKKIECFDSVEISGVEDRFNASLGTYHDLLKIIKDKDFLDNEENEDILEDIVLTLTLFEDREMIEERLKTYAHLFDDKVMKQLKRRRYTGWGRLSRKLINGIRDKQSGKTILDFLKSDGFANRNFMQLIHDDSLTFKEDIQKAQVSGQGDSLHEHIANLAGSPAIKKGILQTVKVVDELVKVMGRHKPENIVIEMARENQTTQKGQKNSRERMKRIEEGIKELGSQILKEHPVENTQLQNEKLYLYYLQNGRDMYVDQELDINRLSDYDVDHIVPQSFLKDDSIDNKVLTRSDKARGKSDNVPSEEVVKKMKNYWRQLLNAKLITQRKFDNLTKAERGGLSELDKAGFIKRQLVETRQITKHVAQILDSRMNTKYDENDKLIREVKVITLKSKLVSDFRKDFQFYKVREINNYHHAHDAYLNAVVGTALIKKYPKLESEFVYGDYKVYDVRKMIAKSEQEIGKATAKYFFYSNIMNFFKTEITLANGEIRKRPLIETNGETGEIVWDKGRDFATVRKVLSMPQVNIVKKTEVQTGGFSKESILPKRNSDKLIARKKDWDPKKYGGFDSPTVAYSVLVVAKVEKGKSKKLKSVKELLGITIMERSSFEKNPIDFLEAKGYKEVKKDLIIKLPKYSLFELENGRKRMLASAGELQKGNELALPSKYVNFLYLASHYEKLKGSPEDNEQKQLFVEQHKHYLDEIIEQISEFSKRVILADANLDKVLSAYNKHRDKPIREQAENIIHLFTLTNLGAPAAFKYFDTTIDRKRYTSTKEVLDATLIHQSITGLYETRIDLSQLGGDGGEAAAKGGGGGTLNIEDEYRLHETSKEPDVSLGSTWLSDFPQAWAETGGMGLAVRQAPLIIPLKATSTPVSIKQYPMSQEARLGIKPHIQRLLDQGILVPCQSPWNTPLLPVKKPGTNDYRPVQDLREVNKRVEDIHPTVPNPYNLLSGLPPSHQWYTVLDLKDAFFCLRLHPTSQPLFAFEWRDPEMGISGQLTWTRLPQGFKNSPTLFNEALHRDLAGFRIQHPDLILLQYVDDLLLAATSELDCQQGTRALLQTLGDLGYRASAKKAQICQKQVKYLGYLLKEGQRWLTEARKETVMGQPIPKTPRQLREFLGTAGFCRLWIPGFAEMAAPLYPLTKPGTLFNWGPDQQKAFQEIKQALLTAPALGLPDLTKPFELFVDEKQGYAKGVLTQKLGPWRRPVAYLSKKLDPVAAGWPPCLRMVAAIAVLTKDAGKLTMGQPLVILAPHAVEALVKQPPDRWLSNARMTHYQALLLDTDRVQFGPVVALNPATLLPLPEEGLQHDCLDILAEAHGTRSDLMDQPLPDADHTWYTDGSSFLQEGQRKAGAAVTTETEVIWARALPAGTSAQRAELIALTQALKMAEGKKLNVYTDSRYAFATAHIHGEIYRRRGWLTSEGKEIKNKDEILALLKALFLPKRLSIIHCPGHQKGNSAEARGNRMADQAAREVATRETPETSTLLAGKRTADGSEFEKRTADGSEFESPKKKAKVE

SEQ ID NO: 2282 - protein, 2096 aa, synthetic construct
MPAAKRVKLDGGDKKYSIGLDIGTNSVGWAVITDEYKVPSKKFKVLGNTDRHSIKKNLIGALLFDSGETAEATRLKRTARRRYTRRKNRICYLQEIFSNEMAKVDDSFFHRLEESFLVEEDKKHERHPIFGNIVDEVAYHEKYPTIYHLRKKLVDSTDKADLRLIYLALAHMIKFRGHFLIEGDLNPDNSDVDKLFIQLVQTYNQLFEENPINASGVDAKAILSARLSKSRRLENLIAQLPGEKKNGLFGNLIALSLGLTPNFKSNFDLAEDAKLQLSKDTYDDDLDNLLAQIGDQYADLFLAAKNLSDAILLSDILRVNTEITKAPLSASMIKRYDEHHQDLTLLKALVRQQLPEKYKEIFFDQSKNGYAGYIDGGASQEEFYKFIKPILEKMDGTEELLVKLNREDLLRKQRTFDNGSIPHQIHLGELHAILRRQEDFYPFLKDNREKIEKILTFRIPYYVGPLARGNSRFAWMTRKSEETITPWNFEEVVDKGASAQSFIERMTNFDKNLPNEKVLPKHSLLYEYFTVYNELTKVKYVTEGMRKPAFLSGEQKKAIVDLLFKTNRKVTVKQLKEDYFKKIECFDSVEISGVEDRFNASLGTYHDLLKIIKDKDFLDNEENEDILEDIVLTLTLFEDREMIEERLKTYAHLFDDKVMKQLKRRRYTGWGRLSRKLINGIRDKQSGKTILDFLKSDGFANRNFMQLIHDDSLTFKEDIQKAQVSGQGDSLHEHIANLAGSPAIKKGILQTVKVVDELVKVMGRHKPENIVIEMARENQTTQKGQKNSRERMKRIEEGIKELGSQILKEHPVENTQLQNEKLYLYYLQNGRDMYVDQELDINRLSDYDVDHIVPQSFLKDDSIDNKVLTRSDKARGKSDNVPSEEVVKKMKNYWRQLLNAKLITQRKFDNLTKAERGGLSELDKAGFIKRQLVETRQITKHVAQILDSRMNTKYDENDKLIREVKVITLKSKLVSDFRKDFQFYKVREINNYHHAHDAYLNAVVGTALIKKYPKLESEFVYGDYKVYDVRKMIAKSEQEIGKATAKYFFYSNIMNFFKTEITLANGEIRKRPLIETNGETGEIVWDKGRDFATVRKVLSMPQVNIVKKTEVQTGGFSKESILPKRNSDKLIARKKDWDPKKYGGFDSPTVAYSVLVVAKVEKGKSKKLKSVKELLGITIMERSSFEKNPIDFLEAKGYKEVKKDLIIKLPKYSLFELENGRKRMLASAGELQKGNELALPSKYVNFLYLASHYEKLKGSPEDNEQKQLFVEQHKHYLDEIIEQISEFSKRVILADANLDKVLSAYNKHRDKPIREQAENIIHLFTLTNLGAPAAFKYFDTTIDRKRYTSTKEVLDATLIHQSITGLYETRIDLSQLGGDGGGSSPAPEAAAKGGTLNIEDEYRLHETSKEPDVSLGSTWLSDFPQAWAETGGMGLAVRQAPLIIPLKATSTPVSIKQYPMSQEARLGIKPHIQRLLDQGILVPCQSPWNTPLLPVKKPGTNDYRPVQDLREVNKRVEDIHPTVPNPYNLLSGLPPSHQWYTVLDLKDAFFCLRLHPTSQPLFAFEWRDPEMGISGQLTWTRLPQGFKNSPTLFNEALHRDLAGFRIQHPDLILLQYVDDLLLAATSELDCQQGTRALLQTLGDLGYRASAKKAQICQKQVKYLGYLLKEGQRWLTEARKETVMGQPIPKTPRQLREFLGTAGFCRLWIPGFAEMAAPLYPLTKPGTLFNWGPDQQKAFQEIKQALLTAPALGLPDLTKPFELFVDEKQGYAKGVLTQKLGPWRRPVAYLSKKLDPVAAGWPPCLRMVAAIAVLTKDAGKLTMGQPLVILAPHAVEALVKQPPDRWLSNARMTHYQALLLDTDRVQFGPVVALNPATLLPLPEEGLQHDCLDILAEAHGTRSDLMDQPLPDADHTWYTDGSSFLQEGQRKAGAAVTTETEVIWARALPAGTSAQRAELIALTQALKMAEGKKLNVYTDSRYAFATAHIHGEIYRRRGWLTSEGKEIKNKDEILALLKALFLPKRLSIIHCPGHQKGNSAEARGNRMADQAAREVATRETPETSTLLAGKRTADGSEFEKRTADGSEFESPKKKAKVE

SEQ ID NO: 2283 - protein, 2094 aa, synthetic construct
MPAAKRVKLDGGDKKYSIGLDIGTNSVGWAVITDEYKVPSKKFKVLGNTDRHSIKKNLIGALLFDSGETAEATRLKRTARRRYTRRKNRICYLQEIFSNEMAKVDDSFFHRLEESFLVEEDKKHERHPIFGNIVDEVAYHEKYPTIYHLRKKLVDSTDKADLRLIYLALAHMIKFRGHFLIEGDLNPDNSDVDKLFIQLVQTYNQLFEENPINASGVDAKAILSARLSKSRRLENLIAQLPGEKKNGLFGNLIALSLGLTPNFKSNFDLAEDAKLQLSKDTYDDDLDNLLAQIGDQYADLFLAAKNLSDAILLSDILRVNTEITKAPLSASMIKRYDEHHQDLTLLKALVRQQLPEKYKEIFFDQSKNGYAGYIDGGASQEEFYKFIKPILEKMDGTEELLVKLNREDLLRKQRTFDNGSIPHQIHLGELHAILRRQEDFYPFLKDNREKIEKILTFRIPYYVGPLARGNSRFAWMTRKSEETITPWNFEEVVDKGASAQSFIERMTNFDKNLPNEKVLPKHSLLYEYFTVYNELTKVKYVTEGMRKPAFLSGEQKKAIVDLLFKTNRKVTVKQLKEDYFKKIECFDSVEISGVEDRFNASLGTYHDLLKIIKDKDFLDNEENEDILEDIVLTLTLFEDREMIEERLKTYAHLFDDKVMKQLKRRRYTGWGRLSRKLINGIRDKQSGKTILDFLKSDGFANRNFMQLIHDDSLTFKEDIQKAQVSGQGDSLHEHIANLAGSPAIKKGILQTVKVVDELVKVMGRHKPENIVIEMARENQTTQKGQKNSRERMKRIEEGIKELGSQILKEHPVENTQLQNEKLYLYYLQNGRDMYVDQELDINRLSDYDVDHIVPQSFLKDDSIDNKVLTRSDKARGKSDNVPSEEVVKKMKNYWRQLLNAKLITQRKFDNLTKAERGGLSELDKAGFIKRQLVETRQITKHVAQILDSRMNTKYDENDKLIREVKVITLKSKLVSDFRKDFQFYKVREINNYHHAHDAYLNAVVGTALIKKYPKLESEFVYGDYKVYDVRKMIAKSEQEIGKATAKYFFYSNIMNFFKTEITLANGEIRKRPLIETNGETGEIVWDKGRDFATVRKVLSMPQVNIVKKTEVQTGGFSKESILPKRNSDKLIARKKDWDPKKYGGFDSPTVAYSVLVVAKVEKGKSKKLKSVKELLGITIMERSSFEKNPIDFLEAKGYKEVKKDLIIKLPKYSLFELENGRKRMLASAGELQKGNELALPSKYVNFLYLASHYEKLKGSPEDNEQKQLFVEQHKHYLDEIIEQISEFSKRVILADANLDKVLSAYNKHRDKPIREQAENIIHLFTLTNLGAPAAFKYFDTTIDRKRYTSTKEVLDATLIHQSITGLYETRIDLSQLGGDGGGSSPAPGGGGGTLNIEDEYRLHETSKEPDVSLGSTWLSDFPQAWAETGGMGLAVRQAPLIIPLKATSTPVSIKQYPMSQEARLGIKPHIQRLLDQGILVPCQSPWNTPLLPVKKPGTNDYRPVQDLREVNKRVEDIHPTVPNPYNLLSGLPPSHQWYTVLDLKDAFFCLRLHPTSQPLFAFEWRDPEMGISGQLTWTRLPQGFKNSPTLFNEALHRDLAGFRIQHPDLILLQYVDDLLLAATSELDCQQGTRALLQTLGDLGYRASAKKAQICQKQVKYLGYLLKEGQRWLTEARKETVMGQPIPKTPRQLREFLGTAGFCRLWIPGFAEMAAPLYPLTKPGTLFNWGPDQQKAFQEIKQALLTAPALGLPDLTKPFELFVDEKQGYAKGVLTQKLGPWRRPVAYLSKKLDPVAAGWPPCLRMVAAIAVLTKDAGKLTMGQPLVILAPHAVEALVKQPPDRWLSNARMTHYQALLLDTDRVQFGPVVALNPATLLPLPEEGLQHDCLDILAEAHGTRSDLMDQPLPDADHTWYTDGSSFLQEGQRKAGAAVTTETEVIWARALPAGTSAQRAELIALTQALKMAEGKKLNVYTDSRYAFATAHIHGEIYRRRGWLTSEGKEIKNKDEILALLKALFLPKRLSIIHCPGHQKGNSAEARGNRMADQAAREVATRETPETSTLLAGKRTADGSEFEKRTADGSEFESPKKKAKVE

SEQ ID NO: 2284 - protein, 2090 aa, synthetic construct
MPAAKRVKLDGGDKKYSIGLDIGTNSVGWAVITDEYKVPSKKFKVLGNTDRHSIKKNLIGALLFDSGETAEATRLKRTARRRYTRRKNRICYLQEIFSNEMAKVDDSFFHRLEESFLVEEDKKHERHPIFGNIVDEVAYHEKYPTIYHLRKKLVDSTDKADLRLIYLALAHMIKFRGHFLIEGDLNPDNSDVDKLFIQLVQTYNQLFEENPINASGVDAKAILSARLSKSRRLENLIAQLPGEKKNGLFGNLIALSLGLTPNFKSNFDLAEDAKLQLSKDTYDDDLDNLLAQIGDQYADLFLAAKNLSDAILLSDILRVNTEITKAPLSASMIKRYDEHHQDLTLLKALVRQQLPEKYKEIFFDQSKNGYAGYIDGGASQEEFYKFIKPILEKMDGTEELLVKLNREDLLRKQRTFDNGSIPHQIHLGELHAILRRQEDFYPFLKDNREKIEKILTFRIPYYVGPLARGNSRFAWMTRKSEETITPWNFEEVVDKGASAQSFIERMTNFDKNLPNEKVLPKHSLLYEYFTVYNELTKVKYVTEGMRKPAFLSGEQKKAIVDLLFKTNRKVTVKQLKEDYFKKIECFDSVEISGVEDRFNASLGTYHDLLKIIKDKDFLDNEENEDILEDIVLTLTLFEDREMIEERLKTYAHLFDDKVMKQLKRRRYTGWGRLSRKLINGIRDKQSGKTILDFLKSDGFANRNFMQLIHDDSLTFKEDIQKAQVSGQGDSLHEHIANLAGSPAIKKGILQTVKVVDELVKVMGRHKPENIVIEMARENQTTQKGQKNSRERMKRIEEGIKELGSQILKEHPVENTQLQNEKLYLYYLQNGRDMYVDQELDINRLSDYDVDHIVPQSFLKDDSIDNKVLTRSDKARGKSDNVPSEEVVKKMKNYWRQLLNAKLITQRKFDNLTKAERGGLSELDKAGFIKRQLVETRQITKHVAQILDSRMNTKYDENDKLIREVKVITLKSKLVSDFRKDFQFYKVREINNYHHAHDAYLNAVVGTALIKKYPKLESEFVYGDYKVYDVRKMIAKSEQEIGKATAKYFFYSNIMNFFKTEITLANGEIRKRPLIETNGETGEIVWDKGRDFATVRKVLSMPQVNIVKKTEVQTGGFSKESILPKRNSDKLIARKKDWDPKKYGGFDSPTVAYSVLVVAKVEKGKSKKLKSVKELLGITIMERSSFEKNPIDFLEAKGYKEVKKDLIIKLPKYSLFELENGRKRMLASAGELQKGNELALPSKYVNFLYLASHYEKLKGSPEDNEQKQLFVEQHKHYLDEIIEQISEFSKRVILADANLDKVLSAYNKHRDKPIREQAENIIHLFTLTNLGAPAAFKYFDTTIDRKRYTSTKEVLDATLIHQSITGLYETRIDLSQLGGDGGEAAAKGGTLNIEDEYRLHETSKEPDVSLGSTWLSDFPQAWAETGGMGLAVRQAPLIIPLKATSTPVSIKQYPMSQEARLGIKPHIQRLLDQGILVPCQSPWNTPLLPVKKPGTNDYRPVQDLREVNKRVEDIHPTVPNPYNLLSGLPPSHQWYTVLDLKDAFFCLRLHPTSQPLFAFEWRDPEMGISGQLTWTRLPQGFKNSPTLFNEALHRDLAGFRIQHPDLILLQYVDDLLLAATSELDCQQGTRALLQTLGDLGYRASAKKAQICQKQVKYLGYLLKEGQRWLTEARKETVMGQPIPKTPRQLREFLGTAGFCRLWIPGFAEMAAPLYPLTKPGTLFNWGPDQQKAFQEIKQALLTAPALGLPDLTKPFELFVDEKQGYAKGVLTQKLGPWRRPVAYLSKKLDPVAAGWPPCLRMVAAIAVLTKDAGKLTMGQPLVILAPHAVEALVKQPPDRWLSNARMTHYQALLLDTDRVQFGPVVALNPATLLPLPEEGLQHDCLDILAEAHGTRSDLMDQPLPDADHTWYTDGSSFLQEGQRKAGAAVTTETEVIWARALPAGTSAQRAELIALTQALKMAEGKKLNVYTDSRYAFATAHIHGEIYRRRGWLTSEGKEIKNKDEILALLKALFLPKRLSIIHCPGHQKGNSAEARGNRMADQAAREVATRETPETSTLLAGKRTADGSEFEKRTADGSEFESPKKKAKVE

SEQ ID NO: 2285 - protein, 2091 aa, synthetic construct
MPAAKRVKLDGGDKKYSIGLDIGTNSVGWAVITDEYKVPSKKFKVLGNTDRHSIKKNLIGALLFDSGETAEATRLKRTARRRYTRRKNRICYLQEIFSNEMAKVDDSFFHRLEESFLVEEDKKHERHPIFGNIVDEVAYHEKYPTIYHLRKKLVDSTDKADLRLIYLALAHMIKFRGHFLIEGDLNPDNSDVDKLFIQLVQTYNQLFEENPINASGVDAKAILSARLSKSRRLENLIAQLPGEKKNGLFGNLIALSLGLTPNFKSNFDLAEDAKLQLSKDTYDDDLDNLLAQIGDQYADLFLAAKNLSDAILLSDILRVNTEITKAPLSASMIKRYDEHHQDLTLLKALVRQQLPEKYKEIFFDQSKNGYAGYIDGGASQEEFYKFIKPILEKMDGTEELLVKLNREDLLRKQRTFDNGSIPHQIHLGELHAILRRQEDFYPFLKDNREKIEKILTFRIPYYVGPLARGNSRFAWMTRKSEETITPWNFEEVVDKGASAQSFIERMTNFDKNLPNEKVLPKHSLLYEYFTVYNELTKVKYVTEGMRKPAFLSGEQKKAIVDLLFKTNRKVTVKQLKEDYFKKIECFDSVEISGVEDRFNASLGTYHDLLKIIKDKDFLDNEENEDILEDIVLTLTLFEDREMIEERLKTYAHLFDDKVMKQLKRRRYTGWGRLSRKLINGIRDKQSGKTILDFLKSDGFANRNFMQLIHDDSLTFKEDIQKAQVSGQGDSLHEHIANLAGSPAIKKGILQTVKVVDELVKVMGRHKPENIVIEMARENQTTQKGQKNSRERMKRIEEGIKELGSQILKEHPVENTQLQNEKLYLYYLQNGRDMYVDQELDINRLSDYDVDHIVPQSFLKDDSIDNKVLTRSDKARGKSDNVPSEEVVKKMKNYWRQLLNAKLITQRKFDNLTKAERGGLSELDKAGFIKRQLVETRQITKHVAQILDSRMNTKYDENDKLIREVKVITLKSKLVSDFRKDFQFYKVREINNYHHAHDAYLNAVVGTALIKKYPKLESEFVYGDYKVYDVRKMIAKSEQEIGKATAKYFFYSNIMNFFKTEITLANGEIRKRPLIETNGETGEIVWDKGRDFATVRKVLSMPQVNIVKKTEVQTGGFSKESILPKRNSDKLIARKKDWDPKKYGGFDSPTVAYSVLVVAKVEKGKSKKLKSVKELLGITIMERSSFEKNPIDFLEAKGYKEVKKDLIIKLPKYSLFELENGRKRMLASAGELQKGNELALPSKYVNFLYLASHYEKLKGSPEDNEQKQLFVEQHKHYLDEIIEQISEFSKRVILADANLDKVLSAYNKHRDKPIREQAENIIHLFTLTNLGAPAAFKYFDTTIDRKRYTSTKEVLDATLIHQSITGLYETRIDLSQLGGDGGGSSPAPGGTLNIEDEYRLHETSKEPDVSLGSTWLSDFPQAWAETGGMGLAVRQAPLIIPLKATSTPVSIKQYPMSQEARLGIKPHIQRLLDQGILVPCQSPWNTPLLPVKKPGTNDYRPVQDLREVNKRVEDIHPTVPNPYNLLSGLPPSHQWYTVLDLKDAFFCLRLHPTSQPLFAFEWRDPEMGISGQLTWTRLPQGFKNSPTLFNEALHRDLAGFRIQHPDLILLQYVDDLLLAATSELDCQQGTRALLQTLGDLGYRASAKKAQICQKQVKYLGYLLKEGQRWLTEARKETVMGQPIPKTPRQLREFLGTAGFCRLWIPGFAEMAAPLYPLTKPGTLFNWGPDQQKAFQEIKQALLTAPALGLPDLTKPFELFVDEKQGYAKGVLTQKLGPWRRPVAYLSKKLDPVAAGWPPCLRMVAAIAVLTKDAGKLTMGQPLVILAPHAVEALVKQPPDRWLSNARMTHYQALLLDTDRVQFGPVVALNPATLLPLPEEGLQHDCLDILAEAHGTRSDLMDQPLPDADHTWYTDGSSFLQEGQRKAGAAVTTETEVIWARALPAGTSAQRAELIALTQALKMAEGKKLNVYTDSRYAFATAHIHGEIYRRRGWLTSEGKEIKNKDEILALLKALFLPKRLSIIHCPGHQKGNSAEARGNRMADQAAREVATRETPETSTLLAGKRTADGSEFEKRTADGSEFESPKKKAKVE

SEQ ID NO: 2286 - protein, 2096 aa, synthetic construct
MPAAKRVKLDGGDKKYSIGLDIGTNSVGWAVITDEYKVPSKKFKVLGNTDRHSIKKNLIGALLFDSGETAEATRLKRTARRRYTRRKNRICYLQEIFSNEMAKVDDSFFHRLEESFLVEEDKKHERHPIFGNIVDEVAYHEKYPTIYHLRKKLVDSTDKADLRLIYLALAHMIKFRGHFLIEGDLNPDNSDVDKLFIQLVQTYNQLFEENPINASGVDAKAILSARLSKSRRLENLIAQLPGEKKNGLFGNLIALSLGLTPNFKSNFDLAEDAKLQLSKDTYDDDLDNLLAQIGDQYADLFLAAKNLSDAILLSDILRVNTEITKAPLSASMIKRYDEHHQDLTLLKALVRQQLPEKYKEIFFDQSKNGYAGYIDGGASQEEFYKFIKPILEKMDGTEELLVKLNREDLLRKQRTFDNGSIPHQIHLGELHAILRRQEDFYPFLKDNREKIEKILTFRIPYYVGPLARGNSRFAWMTRKSEETITPWNFEEVVDKGASAQSFIERMTNFDKNLPNEKVLPKHSLLYEYFTVYNELTKVKYVTEGMRKPAFLSGEQKKAIVDLLFKTNRKVTVKQLKEDYFKKIECFDSVEISGVEDRFNASLGTYHDLLKIIKDKDFLDNEENEDILEDIVLTLTLFEDREMIEERLKTYAHLFDDKVMKQLKRRRYTGWGRLSRKLINGIRDKQSGKTILDFLKSDGFANRNFMQLIHDDSLTFKEDIQKAQVSGQGDSLHEHIANLAGSPAIKKGILQTVKVVDELVKVMGRHKPENIVIEMARENQTTQKGQKNSRERMKRIEEGIKELGSQILKEHPVENTQLQNEKLYLYYLQNGRDMYVDQELDINRLSDYDVDHIVPQSFLKDDSIDNKVLTRSDKARGKSDNVPSEEVVKKMKNYWRQLLNAKLITQRKFDNLTKAERGGLSELDKAGFIKRQLVETRQITKHVAQILDSRMNTKYDENDKLIREVKVITLKSKLVSDFRKDFQFYKVREINNYHHAHDAYLNAVVGTALIKKYPKLESEFVYGDYKVYDVRKMIAKSEQEIGKATAKYFFYSNIMNFFKTEITLANGEIRKRPLIETNGETGEIVWDKGRDFATVRKVLSMPQVNIVKKTEVQTGGFSKESILPKRNSDKLIARKKDWDPKKYGGFDSPTVAYSVLVVAKVEKGKSKKLKSVKELLGITIMERSSFEKNPIDFLEAKGYKEVKKDLIIKLPKYSLFELENGRKRMLASAGELQKGNELALPSKYVNFLYLASHYEKLKGSPEDNEQKQLFVEQHKHYLDEIIEQISEFSKRVILADANLDKVLSAYNKHRDKPIREQAENIIHLFTLTNLGAPAAFKYFDTTIDRKRYTSTKEVLDATLIHQSITGLYETRIDLSQLGGDGGGGSPAPEAAAKGGTLNIEDEYRLHETSKEPDVSLGSTWLSDFPQAWAETGGMGLAVRQAPLIIPLKATSTPVSIKQYPMSQEARLGIKPHIQRLLDQGILVPCQSPWNTPLLPVKKPGTNDYRPVQDLREVNKRVEDIHPTVPNPYNLLSGLPPSHQWYTVLDLKDAFFCLRLHPTSQPLFAFEWRDPEMGISGQLTWTRLPQGFKNSPTLFNEALHRDLAGFRIQHPDLILLQYVDDLLLAATSELDCQQGTRALLQTLGDLGYRASAKKAQICQKQVKYLGYLLKEGQRWLTEARKETVMGQPIPKTPRQLREFLGTAGFCRLWIPGFAEMAAPLYPLTKPGTLFNWGPDQQKAFQEIKQALLTAPALGLPDLTKPFELFVDEKQGYAKGVLTQKLGPWRRPVAYLSKKLDPVAAGWPPCLRMVAAIAVLTKDAGKLTMGQPLVILAPHAVEALVKQPPDRWLSNARMTHYQALLLDTDRVQFGPVVALNPATLLPLPEEGLQHDCLDILAEAHGTRSDLMDQPLPDADHTWYTDGSSFLQEGQRKAGAAVTTETEVIWARALPAGTSAQRAELIALTQALKMAEGKKLNVYTDSRYAFATAHIHGEIYRRRGWLTSEGKEIKNKDEILALLKALFLPKRLSIIHCPGHQKGNSAEARGNRMADQAAREVATRETPETSTLLAGKRTADGSEFEKRTADGSEFESPKKKAKVE

SEQ ID NO: 2287 - protein, 2096 aa, synthetic construct
MPAAKRVKLDGGDKKYSIGLDIGTNSVGWAVITDEYKVPSKKFKVLGNTDRHSIKKNLIGALLFDSGETAEATRLKRTARRRYTRRKNRICYLQEIFSNEMAKVDDSFFHRLEESFLVEEDKKHERHPIFGNIVDEVAYHEKYPTIYHLRKKLVDSTDKADLRLIYLALAHMIKFRGHFLIEGDLNPDNSDVDKLFIQLVQTYNQLFEENPINASGVDAKAILSARLSKSRRLENLIAQLPGEKKNGLFGNLIALSLGLTPNFKSNFDLAEDAKLQLSKDTYDDDLDNLLAQIGDQYADLFLAAKNLSDAILLSDILRVNTEITKAPLSASMIKRYDEHHQDLTLLKALVRQQLPEKYKEIFFDQSKNGYAGYIDGGASQEEFYKFIKPILEKMDGTEELLVKLNREDLLRKQRTFDNGSIPHQIHLGELHAILRRQEDFYPFLKDNREKIEKILTFRIPYYVGPLARGNSRFAWMTRKSEETITPWNFEEVVDKGASAQSFIERMTNFDKNLPNEKVLPKHSLLYEYFTVYNELTKVKYVTEGMRKPAFLSGEQKKAIVDLLFKTNRKVTVKQLKEDYFKKIECFDSVEISGVEDRFNASLGTYHDLLKIIKDKDFLDNEENEDILEDIVLTLTLFEDREMIEERLKTYAHLFDDKVMKQLKRRRYTGWGRLSRKLINGIRDKQSGKTILDFLKSDGFANRNFMQLIHDDSLTFKEDIQKAQVSGQGDSLHEHIANLAGSPAIKKGILQTVKVVDELVKVMGRHKPENIVIEMARENQTTQKGQKNSRERMKRIEEGIKELGSQILKEHPVENTQLQNEKLYLYYLQNGRDMYVDQELDINRLSDYDVDHIVPQSFLKDDSIDNKVLTRSDKARGKSDNVPSEEVVKKMKNYWRQLLNAKLITQRKFDNLTKAERGGLSELDKAGFIKRQLVETRQITKHVAQILDSRMNTKYDENDKLIREVKVITLKSKLVSDFRKDFQFYKVREINNYHHAHDAYLNAVVGTALIKKYPKLESEFVYGDYKVYDVRKMIAKSEQEIGKATAKYFFYSNIMNFFKTEITLANGEIRKRPLIETNGETGEIVWDKGRDFATVRKVLSMPQVNIVKKTEVQTGGFSKESILPKRNSDKLIARKKDWDPKKYGGFDSPTVAYSVLVVAKVEKGKSKKLKSVKELLGITIMERSSFEKNPIDFLEAKGYKEVKKDLIIKLPKYSLFELENGRKRMLASAGELQKGNELALPSKYVNFLYLASHYEKLKGSPEDNEQKQLFVEQHKHYLDEIIEQISEFSKRVILADANLDKVLSAYNKHRDKPIREQAENIIHLFTLTNLGAPAAFKYFDTTIDRKRYTSTKEVLDATLIHQSITGLYETRIDLSQLGGDGGGGSEAAAKGGGGGTLNIEDEYRLHETSKEPDVSLGSTWLSDFPQAWAETGGMGLAVRQAPLIIPLKATSTPVSIKQYPMSQEARLGIKPHIQRLLDQGILVPCQSPWNTPLLPVKKPGTNDYRPVQDLREVNKRVEDIHPTVPNPYNLLSGLPPSHQWYTVLDLKDAFFCLRLHPTSQPLFAFEWRDPEMGISGQLTWTRLPQGFKNSPTLFNEALHRDLAGFRIQHPDLILLQYVDDLLLAATSELDCQQGTRALLQTLGDLGYRASAKKAQICQKQVKYLGYLLKEGQRWLTEARKETVMGQPIPKTPRQLREFLGTAGFCRLWIPGFAEMAAPLYPLTKPGTLFNWGPDQQKAFQEIKQALLTAPALGLPDLTKPFELFVDEKQGYAKGVLTQKLGPWRRPVAYLSKKLDPVAAGWPPCLRMVAAIAVLTKDAGKLTMGQPLVILAPHAVEALVKQPPDRWLSNARMTHYQALLLDTDRVQFGPVVALNPATLLPLPEEGLQHDCLDILAEAHGTRSDLMDQPLPDADHTWYTDGSSFLQEGQRKAGAAVTTETEVIWARALPAGTSAQRAELIALTQALKMAEGKKLNVYTDSRYAFATAHIHGEIYRRRGWLTSEGKEIKNKDEILALLKALFLPKRLSIIHCPGHQKGNSAEARGNRMADQAAREVATRETPETSTLLAGKRTADGSEFEKRTADGSEFESPKKKAKVE

SEQ ID NO: 2288 - protein, 2094 aa, synthetic construct
MPAAKRVKLDGGDKKYSIGLDIGTNSVGWAVITDEYKVPSKKFKVLGNTDRHSIKKNLIGALLFDSGETAEATRLKRTARRRYTRRKNRICYLQEIFSNEMAKVDDSFFHRLEESFLVEEDKKHERHPIFGNIVDEVAYHEKYPTIYHLRKKLVDSTDKADLRLIYLALAHMIKFRGHFLIEGDLNPDNSDVDKLFIQLVQTYNQLFEENPINASGVDAKAILSARLSKSRRLENLIAQLPGEKKNGLFGNLIALSLGLTPNFKSNFDLAEDAKLQLSKDTYDDDLDNLLAQIGDQYADLFLAAKNLSDAILLSDILRVNTEITKAPLSASMIKRYDEHHQDLTLLKALVRQQLPEKYKEIFFDQSKNGYAGYIDGGASQEEFYKFIKPILEKMDGTEELLVKLNREDLLRKQRTFDNGSIPHQIHLGELHAILRRQEDFYPFLKDNREKIEKILTFRIPYYVGPLARGNSRFAWMTRKSEETITPWNFEEVVDKGASAQSFIERMTNFDKNLPNEKVLPKHSLLYEYFTVYNELTKVKYVTEGMRKPAFLSGEQKKAIVDLLFKTNRKVTVKQLKEDYFKKIECFDSVEISGVEDRFNASLGTYHDLLKIIKDKDFLDNEENEDILEDIVLTLTLFEDREMIEERLKTYAHLFDDKVMKQLKRRRYTGWGRLSRKLINGIRDKQSGKTILDFLKSDGFANRNFMQLIHDDSLTFKEDIQKAQVSGQGDSLHEHIANLAGSPAIKKGILQTVKVVDELVKVMGRHKPENIVIEMARENQTTQKGQKNSRERMKRIEEGIKELGSQILKEHPVENTQLQNEKLYLYYLQNGRDMYVDQELDINRLSDYDVDHIVPQSFLKDDSIDNKVLTRSDKARGKSDNVPSEEVVKKMKNYWRQLLNAKLITQRKFDNLTKAERGGLSELDKAGFIKRQLVETRQITKHVAQILDSRMNTKYDENDKLIREVKVITLKSKLVSDFRKDFQFYKVREINNYHHAHDAYLNAVVGTALIKKYPKLESEFVYGDYKVYDVRKMIAKSEQEIGKATAKYFFYSNIMNFFKTEITLANGEIRKRPLIETNGETGEIVWDKGRDFATVRKVLSMPQVNIVKKTEVQTGGFSKESILPKRNSDKLIARKKDWDPKKYGGFDSPTVAYSVLVVAKVEKGKSKKLKSVKELLGITIMERSSFEKNPIDFLEAKGYKEVKKDLIIKLPKYSLFELENGRKRMLASAGELQKGNELALPSKYVNFLYLASHYEKLKGSPEDNEQKQLFVEQHKHYLDEIIEQISEFSKRVILADANLDKVLSAYNKHRDKPIREQAENIIHLFTLTNLGAPAAFKYFDTTIDRKRYTSTKEVLDATLIHQSITGLYETRIDLSQLGGDGGGSSPAPGGSGGTLNIEDEYRLHETSKEPDVSLGSTWLSDFPQAWAETGGMGLAVRQAPLIIPLKATSTPVSIKQYPMSQEARLGIKPHIQRLLDQGILVPCQSPWNTPLLPVKKPGTNDYRPVQDLREVNKRVEDIHPTVPNPYNLLSGLPPSHQWYTVLDLKDAFFCLRLHPTSQPLFAFEWRDPEMGISGQLTWTRLPQGFKNSPTLFNEALHRDLAGFRIQHPDLILLQYVDDLLLAATSELDCQQGTRALLQTLGDLGYRASAKKAQICQKQVKYLGYLLKEGQRWLTEARKETVMGQPIPKTPRQLREFLGTAGFCRLWIPGFAEMAAPLYPLTKPGTLFNWGPDQQKAFQEIKQALLTAPALGLPDLTKPFELFVDEKQGYAKGVLTQKLGPWRRPVAYLSKKLDPVAAGWPPCLRMVAAIAVLTKDAGKLTMGQPLVILAPHAVEALVKQPPDRWLSNARMTHYQALLLDTDRVQFGPVVALNPATLLPLPEEGLQHDCLDILAEAHGTRSDLMDQPLPDADHTWYTDGSSFLQEGQRKAGAAVTTETEVIWARALPAGTSAQRAELIALTQALKMAEGKKLNVYTDSRYAFATAHIHGEIYRRRGWLTSEGKEIKNKDEILALLKALFLPKRLSIIHCPGHQKGNSAEARGNRMADQAAREVATRETPETSTLLAGKRTADGSEFEKRTADGSEFESPKKKAKVE

SEQ ID NO: 2289 - protein, 2096 aa, synthetic construct
MPAAKRVKLDGGDKKYSIGLDIGTNSVGWAVITDEYKVPSKKFKVLGNTDRHSIKKNLIGALLFDSGETAEATRLKRTARRRYTRRKNRICYLQEIFSNEMAKVDDSFFHRLEESFLVEEDKKHERHPIFGNIVDEVAYHEKYPTIYHLRKKLVDSTDKADLRLIYLALAHMIKFRGHFLIEGDLNPDNSDVDKLFIQLVQTYNQLFEENPINASGVDAKAILSARLSKSRRLENLIAQLPGEKKNGLFGNLIALSLGLTPNFKSNFDLAEDAKLQLSKDTYDDDLDNLLAQIGDQYADLFLAAKNLSDAILLSDILRVNTEITKAPLSASMIKRYDEHHQDLTLLKALVRQQLPEKYKEIFFDQSKNGYAGYIDGGASQEEFYKFIKPILEKMDGTEELLVKLNREDLLRKQRTFDNGSIPHQIHLGELHAILRRQEDFYPFLKDNREKIEKILTFRIPYYVGPLARGNSRFAWMTRKSEETITPWNFEEVVDKGASAQSFIERMTNFDKNLPNEKVLPKHSLLYEYFTVYNELTKVKYVTEGMRKPAFLSGEQKKAIVDLLFKTNRKVTVKQLKEDYFKKIECFDSVEISGVEDRFNASLGTYHDLLKIIKDKDFLDNEENEDILEDIVLTLTLFEDREMIEERLKTYAHLFDDKVMKQLKRRRYTGWGRLSRKLINGIRDKQSGKTILDFLKSDGFANRNFMQLIHDDSLTFKEDIQKAQVSGQGDSLHEHIANLAGSPAIKKGILQTVKVVDELVKVMGRHKPENIVIEMARENQTTQKGQKNSRERMKRIEEGIKELGSQILKEHPVENTQLQNEKLYLYYLQNGRDMYVDQELDINRLSDYDVDHIVPQSFLKDDSIDNKVLTRSDKARGKSDNVPSEEVVKKMKNYWRQLLNAKLITQRKFDNLTKAERGGLSELDKAGFIKRQLVETRQITKHVAQILDSRMNTKYDENDKLIREVKVITLKSKLVSDFRKDFQFYKVREINNYHHAHDAYLNAVVGTALIKKYPKLESEFVYGDYKVYDVRKMIAKSEQEIGKATAKYFFYSNIMNFFKTEITLANGEIRKRPLIETNGETGEIVWDKGRDFATVRKVLSMPQVNIVKKTEVQTGGFSKESILPKRNSDKLIARKKDWDPKKYGGFDSPTVAYSVLVVAKVEKGKSKKLKSVKELLGITIMERSSFEKNPIDFLEAKGYKEVKKDLIIKLPKYSLFELENGRKRMLASAGELQKGNELALPSKYVNFLYLASHYEKLKGSPEDNEQKQLFVEQHKHYLDEIIEQISEFSKRVILADANLDKVLSAYNKHRDKPIREQAENIIHLFTLTNLGAPAAFKYFDTTIDRKRYTSTKEVLDATLIHQSITGLYETRIDLSQLGGDGGGSSEAAAKGGGGGTLNIEDEYRLHETSKEPDVSLGSTWLSDFPQAWAETGGMGLAVRQAPLIIPLKATSTPVSIKQYPMSQEARLGIKPHIQRLLDQGILVPCQSPWNTPLLPVKKPGTNDYRPVQDLREVNKRVEDIHPTVPNPYNLLSGLPPSHQWYTVLDLKDAFFCLRLHPTSQPLFAFEWRDPEMGISGQLTWTRLPQGFKNSPTLFNEALHRDLAGFRIQHPDLILLQYVDDLLLAATSELDCQQGTRALLQTLGDLGYRASAKKAQICQKQVKYLGYLLKEGQRWLTEARKETVMGQPIPKTPRQLREFLGTAGFCRLWIPGFAEMAAPLYPLTKPGTLFNWGPDQQKAFQEIKQALLTAPALGLPDLTKPFELFVDEKQGYAKGVLTQKLGPWRRPVAYLSKKLDPVAAGWPPCLRMVAAIAVLTKDAGKLTMGQPLVILAPHAVEALVKQPPDRWLSNARMTHYQALLLDTDRVQFGPVVALNPATLLPLPEEGLQHDCLDILAEAHGTRSDLMDQPLPDADHTWYTDGSSFLQEGQRKAGAAVTTETEVIWARALPAGTSAQRAELIALTQALKMAEGKKLNVYTDSRYAFATAHIHGEIYRRRGWLTSEGKEIKNKDEILALLKALFLPKRLSIIHCPGHQKGNSAEARGNRMADQAAREVATRETPETSTLLAGKRTADGSEFEKRTADGSEFESPKKKAKVE

SEQ ID NO: 2290 - protein, 2094 aa, synthetic construct
MPAAKRVKLDGGDKKYSIGLDIGTNSVGWAVITDEYKVPSKKFKVLGNTDRHSIKKNLIGALLFDSGETAEATRLKRTARRRYTRRKNRICYLQEIFSNEMAKVDDSFFHRLEESFLVEEDKKHERHPIFGNIVDEVAYHEKYPTIYHLRKKLVDSTDKADLRLIYLALAHMIKFRGHFLIEGDLNPDNSDVDKLFIQLVQTYNQLFEENPINASGVDAKAILSARLSKSRRLENLIAQLPGEKKNGLFGNLIALSLGLTPNFKSNFDLAEDAKLQLSKDTYDDDLDNLLAQIGDQYADLFLAAKNLSDAILLSDILRVNTEITKAPLSASMIKRYDEHHQDLTLLKALVRQQLPEKYKEIFFDQSKNGYAGYIDGGASQEEFYKFIKPILEKMDGTEELLVKLNREDLLRKQRTFDNGSIPHQIHLGELHAILRRQEDFYPFLKDNREKIEKILTFRIPYYVGPLARGNSRFAWMTRKSEETITPWNFEEVVDKGASAQSFIERMTNFDKNLPNEKVLPKHSLLYEYFTVYNELTKVKYVTEGMRKPAFLSGEQKKAIVDLLFKTNRKVTVKQLKEDYFKKIECFDSVEISGVEDRFNASLGTYHDLLKIIKDKDFLDNEENEDILEDIVLTLTLFEDREMIEERLKTYAHLFDDKVMKQLKRRRYTGWGRLSRKLINGIRDKQSGKTILDFLKSDGFANRNFMQLIHDDSLTFKEDIQKAQVSGQGDSLHEHIANLAGSPAIKKGILQTVKVVDELVKVMGRHKPENIVIEMARENQTTQKGQKNSRERMKRIEEGIKELGSQILKEHPVENTQLQNEKLYLYYLQNGRDMYVDQELDINRLSDYDVDHIVPQSFLKDDSIDNKVLTRSDKARGKSDNVPSEEVVKKMKNYWRQLLNAKLITQRKFDNLTKAERGGLSELDKAGFIKRQLVETRQITKHVAQILDSRMNTKYDENDKLIREVKVITLKSKLVSDFRKDFQFYKVREINNYHHAHDAYLNAVVGTALIKKYPKLESEFVYGDYKVYDVRKMIAKSEQEIGKATAKYFFYSNIMNFFKTEITLANGEIRKRPLIETNGETGEIVWDKGRDFATVRKVLSMPQVNIVKKTEVQTGGFSKESILPKRNSDKLIARKKDWDPKKYGGFDSPTVAYSVLVVAKVEKGKSKKLKSVKELLGITIMERSSFEKNPIDFLEAKGYKEVKKDLIIKLPKYSLFELENGRKRMLASAGELQKGNELALPSKYVNFLYLASHYEKLKGSPEDNEQKQLFVEQHKHYLDEIIEQISEFSKRVILADANLDKVLSAYNKHRDKPIREQAENIIHLFTLTNLGAPAAFKYFDTTIDRKRYTSTKEVLDATLIHQSITGLYETRIDLSQLGGDGGGGGPAPGGSGGTLNIEDEYRLHETSKEPDVSLGSTWLSDFPQAWAETGGMGLAVRQAPLIIPLKATSTPVSIKQYPMSQEARLGIKPHIQRLLDQGILVPCQSPWNTPLLPVKKPGTNDYRPVQDLREVNKRVEDIHPTVPNPYNLLSGLPPSHQWYTVLDLKDAFFCLRLHPTSQPLFAFEWRDPEMGISGQLTWTRLPQGFKNSPTLFNEALHRDLAGFRIQHPDLILLQYVDDLLLAATSELDCQQGTRALLQTLGDLGYRASAKKAQICQKQVKYLGYLLKEGQRWLTEARKETVMGQPIPKTPRQLREFLGTAGFCRLWIPGFAEMAAPLYPLTKPGTLFNWGPDQQKAFQEIKQALLTAPALGLPDLTKPFELFVDEKQGYAKGVLTQKLGPWRRPVAYLSKKLDPVAAGWPPCLRMVAAIAVLTKDAGKLTMGQPLVILAPHAVEALVKQPPDRWLSNARMTHYQALLLDTDRVQFGPVVALNPATLLPLPEEGLQHDCLDILAEAHGTRSDLMDQPLPDADHTWYTDGSSFLQEGQRKAGAAVTTETEVIWARALPAGTSAQRAELIALTQALKMAEGKKLNVYTDSRYAFATAHIHGEIYRRRGWLTSEGKEIKNKDEILALLKALFLPKRLSIIHCPGHQKGNSAEARGNRMADQAAREVATRETPETSTLLAGKRTADGSEFEKRTADGSEFESPKKKAKVE

SEQ ID NO: 2291 - protein, 2097 aa, synthetic construct
MPAAKRVKLDGGDKKYSIGLDIGTNSVGWAVITDEYKVPSKKFKVLGNTDRHSIKKNLIGALLFDSGETAEATRLKRTARRRYTRRKNRICYLQEIFSNEMAKVDDSFFHRLEESFLVEEDKKHERHPIFGNIVDEVAYHEKYPTIYHLRKKLVDSTDKADLRLIYLALAHMIKFRGHFLIEGDLNPDNSDVDKLFIQLVQTYNQLFEENPINASGVDAKAILSARLSKSRRLENLIAQLPGEKKNGLFGNLIALSLGLTPNFKSNFDLAEDAKLQLSKDTYDDDLDNLLAQIGDQYADLFLAAKNLSDAILLSDILRVNTEITKAPLSASMIKRYDEHHQDLTLLKALVRQQLPEKYKEIFFDQSKNGYAGYIDGGASQEEFYKFIKPILEKMDGTEELLVKLNREDLLRKQRTFDNGSIPHQIHLGELHAILRRQEDFYPFLKDNREKIEKILTFRIPYYVGPLARGNSRFAWMTRKSEETITPWNFEEVVDKGASAQSFIERMTNFDKNLPNEKVLPKHSLLYEYFTVYNELTKVKYVTEGMRKPAFLSGEQKKAIVDLLFKTNRKVTVKQLKEDYFKKIECFDSVEISGVEDRFNASLGTYHDLLKIIKDKDFLDNEENEDILEDIVLTLTLFEDREMIEERLKTYAHLFDDKVMKQLKRRRYTGWGRLSRKLINGIRDKQSGKTILDFLKSDGFANRNFMQLIHDDSLTFKEDIQKAQVSGQGDSLHEHIANLAGSPAIKKGILQTVKVVDELVKVMGRHKPENIVIEMARENQTTQKGQKNSRERMKRIEEGIKELGSQILKEHPVENTQLQNEKLYLYYLQNGRDMYVDQELDINRLSDYDVDHIVPQSFLKDDSIDNKVLTRSDKARGKSDNVPSEEVVKKMKNYWRQLLNAKLITQRKFDNLTKAERGGLSELDKAGFIKRQLVETRQITKHVAQILDSRMNTKYDENDKLIREVKVITLKSKLVSDFRKDFQFYKVREINNYHHAHDAYLNAVVGTALIKKYPKLESEFVYGDYKVYDVRKMIAKSEQEIGKATAKYFFYSNIMNFFKTEITLANGEIRKRPLIETNGETGEIVWDKGRDFATVRKVLSMPQVNIVKKTEVQTGGFSKESILPKRNSDKLIARKKDWDPKKYGGFDSPTVAYSVLVVAKVEKGKSKKLKSVKELLGITIMERSSFEKNPIDFLEAKGYKEVKKDLIIKLPKYSLFELENGRKRMLASAGELQKGNELALPSKYVNFLYLASHYEKLKGSPEDNEQKQLFVEQHKHYLDEIIEQISEFSKRVILADANLDKVLSAYNKHRDKPIREQAENIIHLFTLTNLGAPAAFKYFDTTIDRKRYTSTKEVLDATLIHQSITGLYETRIDLSQLGGDGGGSSGSSGSSGSSGGTLNIEDEYRLHETSKEPDVSLGSTWLSDFPQAWAETGGMGLAVRQAPLIIPLKATSTPVSIKQYPMSQEARLGIKPHIQRLLDQGILVPCQSPWNTPLLPVKKPGTNDYRPVQDLREVNKRVEDIHPTVPNPYNLLSGLPPSHQWYTVLDLKDAFFCLRLHPTSQPLFAFEWRDPEMGISGQLTWTRLPQGFKNSPTLFNEALHRDLAGFRIQHPDLILLQYVDDLLLAATSELDCQQGTRALLQTLGDLGYRASAKKAQICQKQVKYLGYLLKEGQRWLTEARKETVMGQPIPKTPRQLREFLGTAGFCRLWIPGFAEMAAPLYPLTKPGTLFNWGPDQQKAFQEIKQALLTAPALGLPDLTKPFELFVDEKQGYAKGVLTQKLGPWRRPVAYLSKKLDPVAAGWPPCLRMVAAIAVLTKDAGKLTMGQPLVILAPHAVEALVKQPPDRWLSNARMTHYQALLLDTDRVQFGPVVALNPATLLPLPEEGLQHDCLDILAEAHGTRSDLMDQPLPDADHTWYTDGSSFLQEGQRKAGAAVTTETEVIWARALPAGTSAQRAELIALTQALKMAEGKKLNVYTDSRYAFATAHIHGEIYRRRGWLTSEGKEIKNKDEILALLKALFLPKRLSIIHCPGHQKGNSAEARGNRMADQAAREVATRETPETSTLLAGKRTADGSEFEKRTADGSEFESPKKKAKVE

SEQ ID NO: 2292 - protein, 2096 aa, synthetic construct
MPAAKRVKLDGGDKKYSIGLDIGTNSVGWAVITDEYKVPSKKFKVLGNTDRHSIKKNLIGALLFDSGETAEATRLKRTARRRYTRRKNRICYLQEIFSNEMAKVDDSFFHRLEESFLVEEDKKHERHPIFGNIVDEVAYHEKYPTIYHLRKKLVDSTDKADLRLIYLALAHMIKFRGHFLIEGDLNPDNSDVDKLFIQLVQTYNQLFEENPINASGVDAKAILSARLSKSRRLENLIAQLPGEKKNGLFGNLIALSLGLTPNFKSNFDLAEDAKLQLSKDTYDDDLDNLLAQIGDQYADLFLAAKNLSDAILLSDILRVNTEITKAPLSASMIKRYDEHHQDLTLLKALVRQQLPEKYKEIFFDQSKNGYAGYIDGGASQEEFYKFIKPILEKMDGTEELLVKLNREDLLRKQRTFDNGSIPHQIHLGELHAILRRQEDFYPFLKDNREKIEKILTFRIPYYVGPLARGNSRFAWMTRKSEETITPWNFEEVVDKGASAQSFIERMTNFDKNLPNEKVLPKHSLLYEYFTVYNELTKVKYVTEGMRKPAFLSGEQKKAIVDLLFKTNRKVTVKQLKEDYFKKIECFDSVEISGVEDRFNASLGTYHDLLKIIKDKDFLDNEENEDILEDIVLTLTLFEDREMIEERLKTYAHLFDDKVMKQLKRRRYTGWGRLSRKLINGIRDKQSGKTILDFLKSDGFANRNFMQLIHDDSLTFKEDIQKAQVSGQGDSLHEHIANLAGSPAIKKGILQTVKVVDELVKVMGRHKPENIVIEMARENQTTQKGQKNSRERMKRIEEGIKELGSQILKEHPVENTQLQNEKLYLYYLQNGRDMYVDQELDINRLSDYDVDHIVPQSFLKDDSIDNKVLTRSDKARGKSDNVPSEEVVKKMKNYWRQLLNAKLITQRKFDNLTKAERGGLSELDKAGFIKRQLVETRQITKHVAQILDSRMNTKYDENDKLIREVKVITLKSKLVSDFRKDFQFYKVREINNYHHAHDAYLNAVVGTALIKKYPKLESEFVYGDYKVYDVRKMIAKSEQEIGKATAKYFFYSNIMNFFKTEITLANGEIRKRPLIETNGETGEIVWDKGRDFATVRKVLSMPQVNIVKKTEVQTGGFSKESILPKRNSDKLIARKKDWDPKKYGGFDSPTVAYSVLVVAKVEKGKSKKLKSVKELLGITIMERSSFEKNPIDFLEAKGYKEVKKDLIIKLPKYSLFELENGRKRMLASAGELQKGNELALPSKYVNFLYLASHYEKLKGSPEDNEQKQLFVEQHKHYLDEIIEQISEFSKRVILADANLDKVLSAYNKHRDKPIREQAENIIHLFTLTNLGAPAAFKYFDTTIDRKRYTSTKEVLDATLIHQSITGLYETRIDLSQLGGDGGGSSGGGEAAAKGGTLNIEDEYRLHETSKEPDVSLGSTWLSDFPQAWAETGGMGLAVRQAPLIIPLKATSTPVSIKQYPMSQEARLGIKPHIQRLLDQGILVPCQSPWNTPLLPVKKPGTNDYRPVQDLREVNKRVEDIHPTVPNPYNLLSGLPPSHQWYTVLDLKDAFFCLRLHPTSQPLFAFEWRDPEMGISGQLTWTRLPQGFKNSPTLFNEALHRDLAGFRIQHPDLILLQYVDDLLLAATSELDCQQGTRALLQTLGDLGYRASAKKAQICQKQVKYLGYLLKEGQRWLTEARKETVMGQPIPKTPRQLREFLGTAGFCRLWIPGFAEMAAPLYPLTKPGTLFNWGPDQQKAFQEIKQALLTAPALGLPDLTKPFELFVDEKQGYAKGVLTQKLGPWRRPVAYLSKKLDPVAAGWPPCLRMVAAIAVLTKDAGKLTMGQPLVILAPHAVEALVKQPPDRWLSNARMTHYQALLLDTDRVQFGPVVALNPATLLPLPEEGLQHDCLDILAEAHGTRSDLMDQPLPDADHTWYTDGSSFLQEGQRKAGAAVTTETEVIWARALPAGTSAQRAELIALTQALKMAEGKKLNVYTDSRYAFATAHIHGEIYRRRGWLTSEGKEIKNKDEILALLKALFLPKRLSIIHCPGHQKGNSAEARGNRMADQAAREVATRETPETSTLLAGKRTADGSEFEKRTADGSEFESPKKKAKVE

SEQ ID NO: 2293 - protein, 2094 aa, synthetic construct
MPAAKRVKLDGGDKKYSIGLDIGTNSVGWAVITDEYKVPSKKFKVLGNTDRHSIKKNLIGALLFDSGETAEATRLKRTARRRYTRRKNRICYLQEIFSNEMAKVDDSFFHRLEESFLVEEDKKHERHPIFGNIVDEVAYHEKYPTIYHLRKKLVDSTDKADLRLIYLALAHMIKFRGHFLIEGDLNPDNSDVDKLFIQLVQTYNQLFEENPINASGVDAKAILSARLSKSRRLENLIAQLPGEKKNGLFGNLIALSLGLTPNFKSNFDLAEDAKLQLSKDTYDDDLDNLLAQIGDQYADLFLAAKNLSDAILLSDILRVNTEITKAPLSASMIKRYDEHHQDLTLLKALVRQQLPEKYKEIFFDQSKNGYAGYIDGGASQEEFYKFIKPILEKMDGTEELLVKLNREDLLRKQRTFDNGSIPHQIHLGELHAILRRQEDFYPFLKDNREKIEKILTFRIPYYVGPLARGNSRFAWMTRKSEETITPWNFEEVVDKGASAQSFIERMTNFDKNLPNEKVLPKHSLLYEYFTVYNELTKVKYVTEGMRKPAFLSGEQKKAIVDLLFKTNRKVTVKQLKEDYFKKIECFDSVEISGVEDRFNASLGTYHDLLKIIKDKDFLDNEENEDILEDIVLTLTLFEDREMIEERLKTYAHLFDDKVMKQLKRRRYTGWGRLSRKLINGIRDKQSGKTILDFLKSDGFANRNFMQLIHDDSLTFKEDIQKAQVSGQGDSLHEHIANLAGSPAIKKGILQTVKVVDELVKVMGRHKPENIVIEMARENQTTQKGQKNSRERMKRIEEGIKELGSQILKEHPVENTQLQNEKLYLYYLQNGRDMYVDQELDINRLSDYDVDHIVPQSFLKDDSIDNKVLTRSDKARGKSDNVPSEEVVKKMKNYWRQLLNAKLITQRKFDNLTKAERGGLSELDKAGFIKRQLVETRQITKHVAQILDSRMNTKYDENDKLIREVKVITLKSKLVSDFRKDFQFYKVREINNYHHAHDAYLNAVVGTALIKKYPKLESEFVYGDYKVYDVRKMIAKSEQEIGKATAKYFFYSNIMNFFKTEITLANGEIRKRPLIETNGETGEIVWDKGRDFATVRKVLSMPQVNIVKKTEVQTGGFSKESILPKRNSDKLIARKKDWDPKKYGGFDSPTVAYSVLVVAKVEKGKSKKLKSVKELLGITIMERSSFEKNPIDFLEAKGYKEVKKDLIIKLPKYSLFELENGRKRMLASAGELQKGNELALPSKYVNFLYLASHYEKLKGSPEDNEQKQLFVEQHKHYLDEIIEQISEFSKRVILADANLDKVLSAYNKHRDKPIREQAENIIHLFTLTNLGAPAAFKYFDTTIDRKRYTSTKEVLDATLIHQSITGLYETRIDLSQLGGDGGGGSGSSGGGGGTLNIEDEYRLHETSKEPDVSLGSTWLSDFPQAWAETGGMGLAVRQAPLIIPLKATSTPVSIKQYPMSQEARLGIKPHIQRLLDQGILVPCQSPWNTPLLPVKKPGTNDYRPVQDLREVNKRVEDIHPTVPNPYNLLSGLPPSHQWYTVLDLKDAFFCLRLHPTSQPLFAFEWRDPEMGISGQLTWTRLPQGFKNSPTLFNEALHRDLAGFRIQHPDLILLQYVDDLLLAATSELDCQQGTRALLQTLGDLGYRASAKKAQICQKQVKYLGYLLKEGQRWLTEARKETVMGQPIPKTPRQLREFLGTAGFCRLWIPGFAEMAAPLYPLTKPGTLFNWGPDQQKAFQEIKQALLTAPALGLPDLTKPFELFVDEKQGYAKGVLTQKLGPWRRPVAYLSKKLDPVAAGWPPCLRMVAAIAVLTKDAGKLTMGQPLVILAPHAVEALVKQPPDRWLSNARMTHYQALLLDTDRVQFGPVVALNPATLLPLPEEGLQHDCLDILAEAHGTRSDLMDQPLPDADHTWYTDGSSFLQEGQRKAGAAVTTETEVIWARALPAGTSAQRAELIALTQALKMAEGKKLNVYTDSRYAFATAHIHGEIYRRRGWLTSEGKEIKNKDEILALLKALFLPKRLSIIHCPGHQKGNSAEARGNRMADQAAREVATRETPETSTLLAGKRTADGSEFEKRTADGSEFESPKKKAKVE

SEQ ID NO: 2294 - protein, 2092 aa, synthetic construct
MPAAKRVKLDGGDKKYSIGLDIGTNSVGWAVITDEYKVPSKKFKVLGNTDRHSIKKNLIGALLFDSGETAEATRLKRTARRRYTRRKNRICYLQEIFSNEMAKVDDSFFHRLEESFLVEEDKKHERHPIFGNIVDEVAYHEKYPTIYHLRKKLVDSTDKADLRLIYLALAHMIKFRGHFLIEGDLNPDNSDVDKLFIQLVQTYNQLFEENPINASGVDAKAILSARLSKSRRLENLIAQLPGEKKNGLFGNLIALSLGLTPNFKSNFDLAEDAKLQLSKDTYDDDLDNLLAQIGDQYADLFLAAKNLSDAILLSDILRVNTEITKAPLSASMIKRYDEHHQDLTLLKALVRQQLPEKYKEIFFDQSKNGYAGYIDGGASQEEFYKFIKPILEKMDGTEELLVKLNREDLLRKQRTFDNGSIPHQIHLGELHAILRRQEDFYPFLKDNREKIEKILTFRIPYYVGPLARGNSRFAWMTRKSEETITPWNFEEVVDKGASAQSFIERMTNFDKNLPNEKVLPKHSLLYEYFTVYNELTKVKYVTEGMRKPAFLSGEQKKAIVDLLFKTNRKVTVKQLKEDYFKKIECFDSVEISGVEDRFNASLGTYHDLLKIIKDKDFLDNEENEDILEDIVLTLTLFEDREMIEERLKTYAHLFDDKVMKQLKRRRYTGWGRLSRKLINGIRDKQSGKTILDFLKSDGFANRNFMQLIHDDSLTFKEDIQKAQVSGQGDSLHEHIANLAGSPAIKKGILQTVKVVDELVKVMGRHKPENIVIEMARENQTTQKGQKNSRERMKRIEEGIKELGSQILKEHPVENTQLQNEKLYLYYLQNGRDMYVDQELDINRLSDYDVDHIVPQSFLKDDSIDNKVLTRSDKARGKSDNVPSEEVVKKMKNYWRQLLNAKLITQRKFDNLTKAERGGLSELDKAGFIKRQLVETRQITKHVAQILDSRMNTKYDENDKLIREVKVITLKSKLVSDFRKDFQFYKVREINNYHHAHDAYLNAVVGTALIKKYPKLESEFVYGDYKVYDVRKMIAKSEQEIGKATAKYFFYSNIMNFFKTEITLANGEIRKRPLIETNGETGEIVWDKGRDFATVRKVLSMPQVNIVKKTEVQTGGFSKESILPKRNSDKLIARKKDWDPKKYGGFDSPTVAYSVLVVAKVEKGKSKKLKSVKELLGITIMERSSFEKNPIDFLEAKGYKEVKKDLIIKLPKYSLFELENGRKRMLASAGELQKGNELALPSKYVNFLYLASHYEKLKGSPEDNEQKQLFVEQHKHYLDEIIEQISEFSKRVILADANLDKVLSAYNKHRDKPIREQAENIIHLFTLTNLGAPAAFKYFDTTIDRKRYTSTKEVLDATLIHQSITGLYETRIDLSQLGGDGGPAPAPAPGGTLNIEDEYRLHETSKEPDVSLGSTWLSDFPQAWAETGGMGLAVRQAPLIIPLKATSTPVSIKQYPMSQEARLGIKPHIQRLLDQGILVPCQSPWNTPLLPVKKPGTNDYRPVQDLREVNKRVEDIHPTVPNPYNLLSGLPPSHQWYTVLDLKDAFFCLRLHPTSQPLFAFEWRDPEMGISGQLTWTRLPQGFKNSPTLFNEALHRDLAGFRIQHPDLILLQYVDDLLLAATSELDCQQGTRALLQTLGDLGYRASAKKAQICQKQVKYLGYLLKEGQRWLTEARKETVMGQPIPKTPRQLREFLGTAGFCRLWIPGFAEMAAPLYPLTKPGTLFNWGPDQQKAFQEIKQALLTAPALGLPDLTKPFELFVDEKQGYAKGVLTQKLGPWRRPVAYLSKKLDPVAAGWPPCLRMVAAIAVLTKDAGKLTMGQPLVILAPHAVEALVKQPPDRWLSNARMTHYQALLLDTDRVQFGPVVALNPATLLPLPEEGLQHDCLDILAEAHGTRSDLMDQPLPDADHTWYTDGSSFLQEGQRKAGAAVTTETEVIWARALPAGTSAQRAELIALTQALKMAEGKKLNVYTDSRYAFATAHIHGEIYRRRGWLTSEGKEIKNKDEILALLKALFLPKRLSIIHCPGHQKGNSAEARGNRMADQAAREVATRETPETSTLLAGKRTADGSEFEKRTADGSEFESPKKKAKVE

SEQ ID NO: 2295 - protein, 2094 aa, synthetic construct
MPAAKRVKLDGGDKKYSIGLDIGTNSVGWAVITDEYKVPSKKFKVLGNTDRHSIKKNLIGALLFDSGETAEATRLKRTARRRYTRRKNRICYLQEIFSNEMAKVDDSFFHRLEESFLVEEDKKHERHPIFGNIVDEVAYHEKYPTIYHLRKKLVDSTDKADLRLIYLALAHMIKFRGHFLIEGDLNPDNSDVDKLFIQLVQTYNQLFEENPINASGVDAKAILSARLSKSRRLENLIAQLPGEKKNGLFGNLIALSLGLTPNFKSNFDLAEDAKLQLSKDTYDDDLDNLLAQIGDQYADLFLAAKNLSDAILLSDILRVNTEITKAPLSASMIKRYDEHHQDLTLLKALVRQQLPEKYKEIFFDQSKNGYAGYIDGGASQEEFYKFIKPILEKMDGTEELLVKLNREDLLRKQRTFDNGSIPHQIHLGELHAILRRQEDFYPFLKDNREKIEKILTFRIPYYVGPLARGNSRFAWMTRKSEETITPWNFEEVVDKGASAQSFIERMTNFDKNLPNEKVLPKHSLLYEYFTVYNELTKVKYVTEGMRKPAFLSGEQKKAIVDLLFKTNRKVTVKQLKEDYFKKIECFDSVEISGVEDRFNASLGTYHDLLKIIKDKDFLDNEENEDILEDIVLTLTLFEDREMIEERLKTYAHLFDDKVMKQLKRRRYTGWGRLSRKLINGIRDKQSGKTILDFLKSDGFANRNFMQLIHDDSLTFKEDIQKAQVSGQGDSLHEHIANLAGSPAIKKGILQTVKVVDELVKVMGRHKPENIVIEMARENQTTQKGQKNSRERMKRIEEGIKELGSQILKEHPVENTQLQNEKLYLYYLQNGRDMYVDQELDINRLSDYDVDHIVPQSFLKDDSIDNKVLTRSDKARGKSDNVPSEEVVKKMKNYWRQLLNAKLITQRKFDNLTKAERGGLSELDKAGFIKRQLVETRQITKHVAQILDSRMNTKYDENDKLIREVKVITLKSKLVSDFRKDFQFYKVREINNYHHAHDAYLNAVVGTALIKKYPKLESEFVYGDYKVYDVRKMIAKSEQEIGKATAKYFFYSNIMNFFKTEITLANGEIRKRPLIETNGETGEIVWDKGRDFATVRKVLSMPQVNIVKKTEVQTGGFSKESILPKRNSDKLIARKKDWDPKKYGGFDSPTVAYSVLVVAKVEKGKSKKLKSVKELLGITIMERSSFEKNPIDFLEAKGYKEVKKDLIIKLPKYSLFELENGRKRMLASAGELQKGNELALPSKYVNFLYLASHYEKLKGSPEDNEQKQLFVEQHKHYLDEIIEQISEFSKRVILADANLDKVLSAYNKHRDKPIREQAENIIHLFTLTNLGAPAAFKYFDTTIDRKRYTSTKEVLDATLIHQSITGLYETRIDLSQLGGDGGPAPAPAPAPGGTLNIEDEYRLHETSKEPDVSLGSTWLSDFPQAWAETGGMGLAVRQAPLIIPLKATSTPVSIKQYPMSQEARLGIKPHIQRLLDQGILVPCQSPWNTPLLPVKKPGTNDYRPVQDLREVNKRVEDIHPTVPNPYNLLSGLPPSHQWYTVLDLKDAFFCLRLHPTSQPLFAFEWRDPEMGISGQLTWTRLPQGFKNSPTLFNEALHRDLAGFRIQHPDLILLQYVDDLLLAATSELDCQQGTRALLQTLGDLGYRASAKKAQICQKQVKYLGYLLKEGQRWLTEARKETVMGQPIPKTPRQLREFLGTAGFCRLWIPGFAEMAAPLYPLTKPGTLFNWGPDQQKAFQEIKQALLTAPALGLPDLTKPFELFVDEKQGYAKGVLTQKLGPWRRPVAYLSKKLDPVAAGWPPCLRMVAAIAVLTKDAGKLTMGQPLVILAPHAVEALVKQPPDRWLSNARMTHYQALLLDTDRVQFGPVVALNPATLLPLPEEGLQHDCLDILAEAHGTRSDLMDQPLPDADHTWYTDGSSFLQEGQRKAGAAVTTETEVIWARALPAGTSAQRAELIALTQALKMAEGKKLNVYTDSRYAFATAHIHGEIYRRRGWLTSEGKEIKNKDEILALLKALFLPKRLSIIHCPGHQKGNSAEARGNRMADQAAREVATRETPETSTLLAGKRTADGSEFEKRTADGSEFESPKKKAKVE

SEQ ID NO: 2296 - protein, 2096 aa, synthetic construct
MPAAKRVKLDGGDKKYSIGLDIGTNSVGWAVITDEYKVPSKKFKVLGNTDRHSIKKNLIGALLFDSGETAEATRLKRTARRRYTRRKNRICYLQEIFSNEMAKVDDSFFHRLEESFLVEEDKKHERHPIFGNIVDEVAYHEKYPTIYHLRKKLVDSTDKADLRLIYLALAHMIKFRGHFLIEGDLNPDNSDVDKLFIQLVQTYNQLFEENPINASGVDAKAILSARLSKSRRLENLIAQLPGEKKNGLFGNLIALSLGLTPNFKSNFDLAEDAKLQLSKDTYDDDLDNLLAQIGDQYADLFLAAKNLSDAILLSDILRVNTEITKAPLSASMIKRYDEHHQDLTLLKALVRQQLPEKYKEIFFDQSKNGYAGYIDGGASQEEFYKFIKPILEKMDGTEELLVKLNREDLLRKQRTFDNGSIPHQIHLGELHAILRRQEDFYPFLKDNREKIEKILTFRIPYYVGPLARGNSRFAWMTRKSEETITPWNFEEVVDKGASAQSFIERMTNFDKNLPNEKVLPKHSLLYEYFTVYNELTKVKYVTEGMRKPAFLSGEQKKAIVDLLFKTNRKVTVKQLKEDYFKKIECFDSVEISGVEDRFNASLGTYHDLLKIIKDKDFLDNEENEDILEDIVLTLTLFEDREMIEERLKTYAHLFDDKVMKQLKRRRYTGWGRLSRKLINGIRDKQSGKTILDFLKSDGFANRNFMQLIHDDSLTFKEDIQKAQVSGQGDSLHEHIANLAGSPAIKKGILQTVKVVDELVKVMGRHKPENIVIEMARENQTTQKGQKNSRERMKRIEEGIKELGSQILKEHPVENTQLQNEKLYLYYLQNGRDMYVDQELDINRLSDYDVDHIVPQSFLKDDSIDNKVLTRSDKARGKSDNVPSEEVVKKMKNYWRQLLNAKLITQRKFDNLTKAERGGLSELDKAGFIKRQLVETRQITKHVAQILDSRMNTKYDENDKLIREVKVITLKSKLVSDFRKDFQFYKVREINNYHHAHDAYLNAVVGTALIKKYPKLESEFVYGDYKVYDVRKMIAKSEQEIGKATAKYFFYSNIMNFFKTEITLANGEIRKRPLIETNGETGEIVWDKGRDFATVRKVLSMPQVNIVKKTEVQTGGFSKESILPKRNSDKLIARKKDWDPKKYGGFDSPTVAYSVLVVAKVEKGKSKKLKSVKELLGITIMERSSFEKNPIDFLEAKGYKEVKKDLIIKLPKYSLFELENGRKRMLASAGELQKGNELALPSKYVNFLYLASHYEKLKGSPEDNEQKQLFVEQHKHYLDEIIEQISEFSKRVILADANLDKVLSAYNKHRDKPIREQAENIIHLFTLTNLGAPAAFKYFDTTIDRKRYTSTKEVLDATLIHQSITGLYETRIDLSQLGGDGGGGSEAAAKGSSGGTLNIEDEYRLHETSKEPDVSLGSTWLSDFPQAWAETGGMGLAVRQAPLIIPLKATSTPVSIKQYPMSQEARLGIKPHIQRLLDQGILVPCQSPWNTPLLPVKKPGTNDYRPVQDLREVNKRVEDIHPTVPNPYNLLSGLPPSHQWYTVLDLKDAFFCLRLHPTSQPLFAFEWRDPEMGISGQLTWTRLPQGFKNSPTLFNEALHRDLAGFRIQHPDLILLQYVDDLLLAATSELDCQQGTRALLQTLGDLGYRASAKKAQICQKQVKYLGYLLKEGQRWLTEARKETVMGQPIPKTPRQLREFLGTAGFCRLWIPGFAEMAAPLYPLTKPGTLFNWGPDQQKAFQEIKQALLTAPALGLPDLTKPFELFVDEKQGYAKGVLTQKLGPWRRPVAYLSKKLDPVAAGWPPCLRMVAAIAVLTKDAGKLTMGQPLVILAPHAVEALVKQPPDRWLSNARMTHYQALLLDTDRVQFGPVVALNPATLLPLPEEGLQHDCLDILAEAHGTRSDLMDQPLPDADHTWYTDGSSFLQEGQRKAGAAVTTETEVIWARALPAGTSAQRAELIALTQALKMAEGKKLNVYTDSRYAFATAHIHGEIYRRRGWLTSEGKEIKNKDEILALLKALFLPKRLSIIHCPGHQKGNSAEARGNRMADQAAREVATRETPETSTLLAGKRTADGSEFEKRTADGSEFESPKKKAKVE

SEQ ID NO: 2297 - protein, 2093 aa, synthetic construct
MPAAKRVKLDGGDKKYSIGLDIGTNSVGWAVITDEYKVPSKKFKVLGNTDRHSIKKNLIGALLFDSGETAEATRLKRTARRRYTRRKNRICYLQEIFSNEMAKVDDSFFHRLEESFLVEEDKKHERHPIFGNIVDEVAYHEKYPTIYHLRKKLVDSTDKADLRLIYLALAHMIKFRGHFLIEGDLNPDNSDVDKLFIQLVQTYNQLFEENPINASGVDAKAILSARLSKSRRLENLIAQLPGEKKNGLFGNLIALSLGLTPNFKSNFDLAEDAKLQLSKDTYDDDLDNLLAQIGDQYADLFLAAKNLSDAILLSDILRVNTEITKAPLSASMIKRYDEHHQDLTLLKALVRQQLPEKYKEIFFDQSKNGYAGYIDGGASQEEFYKFIKPILEKMDGTEELLVKLNREDLLRKQRTFDNGSIPHQIHLGELHAILRRQEDFYPFLKDNREKIEKILTFRIPYYVGPLARGNSRFAWMTRKSEETITPWNFEEVVDKGASAQSFIERMTNFDKNLPNEKVLPKHSLLYEYFTVYNELTKVKYVTEGMRKPAFLSGEQKKAIVDLLFKTNRKVTVKQLKEDYFKKIECFDSVEISGVEDRFNASLGTYHDLLKIIKDKDFLDNEENEDILEDIVLTLTLFEDREMIEERLKTYAHLFDDKVMKQLKRRRYTGWGRLSRKLINGIRDKQSGKTILDFLKSDGFANRNFMQLIHDDSLTFKEDIQKAQVSGQGDSLHEHIANLAGSPAIKKGILQTVKVVDELVKVMGRHKPENIVIEMARENQTTQKGQKNSRERMKRIEEGIKELGSQILKEHPVENTQLQNEKLYLYYLQNGRDMYVDQELDINRLSDYDVDHIVPQSFLKDDSIDNKVLTRSDKARGKSDNVPSEEVVKKMKNYWRQLLNAKLITQRKFDNLTKAERGGLSELDKAGFIKRQLVETRQITKHVAQILDSRMNTKYDENDKLIREVKVITLKSKLVSDFRKDFQFYKVREINNYHHAHDAYLNAVVGTALIKKYPKLESEFVYGDYKVYDVRKMIAKSEQEIGKATAKYFFYSNIMNFFKTEITLANGEIRKRPLIETNGETGEIVWDKGRDFATVRKVLSMPQVNIVKKTEVQTGGFSKESILPKRNSDKLIARKKDWDPKKYGGFDSPTVAYSVLVVAKVEKGKSKKLKSVKELLGITIMERSSFEKNPIDFLEAKGYKEVKKDLIIKLPKYSLFELENGRKRMLASAGELQKGNELALPSKYVNFLYLASHYEKLKGSPEDNEQKQLFVEQHKHYLDEIIEQISEFSKRVILADANLDKVLSAYNKHRDKPIREQAENIIHLFTLTNLGAPAAFKYFDTTIDRKRYTSTKEVLDATLIHQSITGLYETRIDLSQLGGDGGEAAAKGSSGGTLNIEDEYRLHETSKEPDVSLGSTWLSDFPQAWAETGGMGLAVRQAPLIIPLKATSTPVSIKQYPMSQEARLGIKPHIQRLLDQGILVPCQSPWNTPLLPVKKPGTNDYRPVQDLREVNKRVEDIHPTVPNPYNLLSGLPPSHQWYTVLDLKDAFFCLRLHPTSQPLFAFEWRDPEMGISGQLTWTRLPQGFKNSPTLFNEALHRDLAGFRIQHPDLILLQYVDDLLLAATSELDCQQGTRALLQTLGDLGYRASAKKAQICQKQVKYLGYLLKEGQRWLTEARKETVMGQPIPKTPRQLREFLGTAGFCRLWIPGFAEMAAPLYPLTKPGTLFNWGPDQQKAFQEIKQALLTAPALGLPDLTKPFELFVDEKQGYAKGVLTQKLGPWRRPVAYLSKKLDPVAAGWPPCLRMVAAIAVLTKDAGKLTMGQPLVILAPHAVEALVKQPPDRWLSNARMTHYQALLLDTDRVQFGPVVALNPATLLPLPEEGLQHDCLDILAEAHGTRSDLMDQPLPDADHTWYTDGSSFLQEGQRKAGAAVTTETEVIWARALPAGTSAQRAELIALTQALKMAEGKKLNVYTDSRYAFATAHIHGEIYRRRGWLTSEGKEIKNKDEILALLKALFLPKRLSIIHCPGHQKGNSAEARGNRMADQAAREVATRETPETSTLLAGKRTADGSEFEKRTADGSEFESPKKKAKVE

SEQ ID NO: 2298 - protein, 2091 aa, synthetic construct
MPAAKRVKLDGGDKKYSIGLDIGTNSVGWAVITDEYKVPSKKFKVLGNTDRHSIKKNLIGALLFDSGETAEATRLKRTARRRYTRRKNRICYLQEIFSNEMAKVDDSFFHRLEESFLVEEDKKHERHPIFGNIVDEVAYHEKYPTIYHLRKKLVDSTDKADLRLIYLALAHMIKFRGHFLIEGDLNPDNSDVDKLFIQLVQTYNQLFEENPINASGVDAKAILSARLSKSRRLENLIAQLPGEKKNGLFGNLIALSLGLTPNFKSNFDLAEDAKLQLSKDTYDDDLDNLLAQIGDQYADLFLAAKNLSDAILLSDILRVNTEITKAPLSASMIKRYDEHHQDLTLLKALVRQQLPEKYKEIFFDQSKNGYAGYIDGGASQEEFYKFIKPILEKMDGTEELLVKLNREDLLRKQRTFDNGSIPHQIHLGELHAILRRQEDFYPFLKDNREKIEKILTFRIPYYVGPLARGNSRFAWMTRKSEETITPWNFEEVVDKGASAQSFIERMTNFDKNLPNEKVLPKHSLLYEYFTVYNELTKVKYVTEGMRKPAFLSGEQKKAIVDLLFKTNRKVTVKQLKEDYFKKIECFDSVEISGVEDRFNASLGTYHDLLKIIKDKDFLDNEENEDILEDIVLTLTLFEDREMIEERLKTYAHLFDDKVMKQLKRRRYTGWGRLSRKLINGIRDKQSGKTILDFLKSDGFANRNFMQLIHDDSLTFKEDIQKAQVSGQGDSLHEHIANLAGSPAIKKGILQTVKVVDELVKVMGRHKPENIVIEMARENQTTQKGQKNSRERMKRIEEGIKELGSQILKEHPVENTQLQNEKLYLYYLQNGRDMYVDQELDINRLSDYDVDHIVPQSFLKDDSIDNKVLTRSDKARGKSDNVPSEEVVKKMKNYWRQLLNAKLITQRKFDNLTKAERGGLSELDKAGFIKRQLVETRQITKHVAQILDSRMNTKYDENDKLIREVKVITLKSKLVSDFRKDFQFYKVREINNYHHAHDAYLNAVVGTALIKKYPKLESEFVYGDYKVYDVRKMIAKSEQEIGKATAKYFFYSNIMNFFKTEITLANGEIRKRPLIETNGETGEIVWDKGRDFATVRKVLSMPQVNIVKKTEVQTGGFSKESILPKRNSDKLIARKKDWDPKKYGGFDSPTVAYSVLVVAKVEKGKSKKLKSVKELLGITIMERSSFEKNPIDFLEAKGYKEVKKDLIIKLPKYSLFELENGRKRMLASAGELQKGNELALPSKYVNFLYLASHYEKLKGSPEDNEQKQLFVEQHKHYLDEIIEQISEFSKRVILADANLDKVLSAYNKHRDKPIREQAENIIHLFTLTNLGAPAAFKYFDTTIDRKRYTSTKEVLDATLIHQSITGLYETRIDLSQLGGDGGPAPGGGGGTLNIEDEYRLHETSKEPDVSLGSTWLSDFPQAWAETGGMGLAVRQAPLIIPLKATSTPVSIKQYPMSQEARLGIKPHIQRLLDQGILVPCQSPWNTPLLPVKKPGTNDYRPVQDLREVNKRVEDIHPTVPNPYNLLSGLPPSHQWYTVLDLKDAFFCLRLHPTSQPLFAFEWRDPEMGISGQLTWTRLPQGFKNSPTLFNEALHRDLAGFRIQHPDLILLQYVDDLLLAATSELDCQQGTRALLQTLGDLGYRASAKKAQICQKQVKYLGYLLKEGQRWLTEARKETVMGQPIPKTPRQLREFLGTAGFCRLWIPGFAEMAAPLYPLTKPGTLFNWGPDQQKAFQEIKQALLTAPALGLPDLTKPFELFVDEKQGYAKGVLTQKLGPWRRPVAYLSKKLDPVAAGWPPCLRMVAAIAVLTKDAGKLTMGQPLVILAPHAVEALVKQPPDRWLSNARMTHYQALLLDTDRVQFGPVVALNPATLLPLPEEGLQHDCLDILAEAHGTRSDLMDQPLPDADHTWYTDGSSFLQEGQRKAGAAVTTETEVIWARALPAGTSAQRAELIALTQALKMAEGKKLNVYTDSRYAFATAHIHGEIYRRRGWLTSEGKEIKNKDEILALLKALFLPKRLSIIHCPGHQKGNSAEARGNRMADQAAREVATRETPETSTLLAGKRTADGSEFEKRTADGSEFESPKKKAKVE

SEQ ID NO: 2299 - protein, 2088 aa, synthetic construct
MPAAKRVKLDGGDKKYSIGLDIGTNSVGWAVITDEYKVPSKKFKVLGNTDRHSIKKNLIGALLFDSGETAEATRLKRTARRRYTRRKNRICYLQEIFSNEMAKVDDSFFHRLEESFLVEEDKKHERHPIFGNIVDEVAYHEKYPTIYHLRKKLVDSTDKADLRLIYLALAHMIKFRGHFLIEGDLNPDNSDVDKLFIQLVQTYNQLFEENPINASGVDAKAILSARLSKSRRLENLIAQLPGEKKNGLFGNLIALSLGLTPNFKSNFDLAEDAKLQLSKDTYDDDLDNLLAQIGDQYADLFLAAKNLSDAILLSDILRVNTEITKAPLSASMIKRYDEHHQDLTLLKALVRQQLPEKYKEIFFDQSKNGYAGYIDGGASQEEFYKFIKPILEKMDGTEELLVKLNREDLLRKQRTFDNGSIPHQIHLGELHAILRRQEDFYPFLKDNREKIEKILTFRIPYYVGPLARGNSRFAWMTRKSEETITPWNFEEVVDKGASAQSFIERMTNFDKNLPNEKVLPKHSLLYEYFTVYNELTKVKYVTEGMRKPAFLSGEQKKAIVDLLFKTNRKVTVKQLKEDYFKKIECFDSVEISGVEDRFNASLGTYHDLLKIIKDKDFLDNEENEDILEDIVLTLTLFEDREMIEERLKTYAHLFDDKVMKQLKRRRYTGWGRLSRKLINGIRDKQSGKTILDFLKSDGFANRNFMQLIHDDSLTFKEDIQKAQVSGQGDSLHEHIANLAGSPAIKKGILQTVKVVDELVKVMGRHKPENIVIEMARENQTTQKGQKNSRERMKRIEEGIKELGSQILKEHPVENTQLQNEKLYLYYLQNGRDMYVDQELDINRLSDYDVDHIVPQSFLKDDSIDNKVLTRSDKARGKSDNVPSEEVVKKMKNYWRQLLNAKLITQRKFDNLTKAERGGLSELDKAGFIKRQLVETRQITKHVAQILDSRMNTKYDENDKLIREVKVITLKSKLVSDFRKDFQFYKVREINNYHHAHDAYLNAVVGTALIKKYPKLESEFVYGDYKVYDVRKMIAKSEQEIGKATAKYFFYSNIMNFFKTEITLANGEIRKRPLIETNGETGEIVWDKGRDFATVRKVLSMPQVNIVKKTEVQTGGFSKESILPKRNSDKLIARKKDWDPKKYGGFDSPTVAYSVLVVAKVEKGKSKKLKSVKELLGITIMERSSFEKNPIDFLEAKGYKEVKKDLIIKLPKYSLFELENGRKRMLASAGELQKGNELALPSKYVNFLYLASHYEKLKGSPEDNEQKQLFVEQHKHYLDEIIEQISEFSKRVILADANLDKVLSAYNKHRDKPIREQAENIIHLFTLTNLGAPAAFKYFDTTIDRKRYTSTKEVLDATLIHQSITGLYETRIDLSQLGGDGGPAPGGTLNIEDEYRLHETSKEPDVSLGSTWLSDFPQAWAETGGMGLAVRQAPLIIPLKATSTPVSIKQYPMSQEARLGIKPHIQRLLDQGILVPCQSPWNTPLLPVKKPGTNDYRPVQDLREVNKRVEDIHPTVPNPYNLLSGLPPSHQWYTVLDLKDAFFCLRLHPTSQPLFAFEWRDPEMGISGQLTWTRLPQGFKNSPTLFNEALHRDLAGFRIQHPDLILLQYVDDLLLAATSELDCQQGTRALLQTLGDLGYRASAKKAQICQKQVKYLGYLLKEGQRWLTEARKETVMGQPIPKTPRQLREFLGKAGFCRLFIPGFAEMAAPLYPLTKPGTLFNWGPDQQKAFQEIKQALLTAPALGLPDLTKPFELFVDEKQGYAKGVLTQKLGPWRRPVAYLSKKLDPVAAGWPPCLRMVAAIAVLTKDAGKLTMGQPLVILAPHAVEALVKQPPDRWLSNARMTHYQALLLDTDRVQFGPVVALNPATLLPLPEEGLQHDCLDILAEAHGTRSDLMDQPLPDADHTWYTDGSSFLQEGQRKAGAAVTTETEVIWARALPAGTSAQRAELIALTQALKMAEGKKLNVYTDSRYAFATAHIHGEIYRRRGWLTSEGKEIKNKDEILALLKALFLPKRLSIIHCPGHQKGNSAEARGNRMADQAAREVATRETPETSTLLAGKRTADGSEFEKRTADGSEFESPKKKAKVE

SEQ ID NO: 2300 - protein, 2103 aa, synthetic construct
MPAAKRVKLDGGDKKYSIGLDIGTNSVGWAVITDEYKVPSKKFKVLGNTDRHSIKKNLIGALLFDSGETAEATRLKRTARRRYTRRKNRICYLQEIFSNEMAKVDDSFFHRLEESFLVEEDKKHERHPIFGNIVDEVAYHEKYPTIYHLRKKLVDSTDKADLRLIYLALAHMIKFRGHFLIEGDLNPDNSDVDKLFIQLVQTYNQLFEENPINASGVDAKAILSARLSKSRRLENLIAQLPGEKKNGLFGNLIALSLGLTPNFKSNFDLAEDAKLQLSKDTYDDDLDNLLAQIGDQYADLFLAAKNLSDAILLSDILRVNTEITKAPLSASMIKRYDEHHQDLTLLKALVRQQLPEKYKEIFFDQSKNGYAGYIDGGASQEEFYKFIKPILEKMDGTEELLVKLNREDLLRKQRTFDNGSIPHQIHLGELHAILRRQEDFYPFLKDNREKIEKILTFRIPYYVGPLARGNSRFAWMTRKSEETITPWNFEEVVDKGASAQSFIERMTNFDKNLPNEKVLPKHSLLYEYFTVYNELTKVKYVTEGMRKPAFLSGEQKKAIVDLLFKTNRKVTVKQLKEDYFKKIECFDSVEISGVEDRFNASLGTYHDLLKIIKDKDFLDNEENEDILEDIVLTLTLFEDREMIEERLKTYAHLFDDKVMKQLKRRRYTGWGRLSRKLINGIRDKQSGKTILDFLKSDGFANRNFMQLIHDDSLTFKEDIQKAQVSGQGDSLHEHIANLAGSPAIKKGILQTVKVVDELVKVMGRHKPENIVIEMARENQTTQKGQKNSRERMKRIEEGIKELGSQILKEHPVENTQLQNEKLYLYYLQNGRDMYVDQELDINRLSDYDVDHIVPQSFLKDDSIDNKVLTRSDKARGKSDNVPSEEVVKKMKNYWRQLLNAKLITQRKFDNLTKAERGGLSELDKAGFIKRQLVETRQITKHVAQILDSRMNTKYDENDKLIREVKVITLKSKLVSDFRKDFQFYKVREINNYHHAHDAYLNAVVGTALIKKYPKLESEFVYGDYKVYDVRKMIAKSEQEIGKATAKYFFYSNIMNFFKTEITLANGEIRKRPLIETNGETGEIVWDKGRDFATVRKVLSMPQVNIVKKTEVQTGGFSKESILPKRNSDKLIARKKDWDPKKYGGFDSPTVAYSVLVVAKVEKGKSKKLKSVKELLGITIMERSSFEKNPIDFLEAKGYKEVKKDLIIKLPKYSLFELENGRKRMLASAGELQKGNELALPSKYVNFLYLASHYEKLKGSPEDNEQKQLFVEQHKHYLDEIIEQISEFSKRVILADANLDKVLSAYNKHRDKPIREQAENIIHLFTLTNLGAPAAFKYFDTTIDRKRYTSTKEVLDATLIHQSITGLYETRIDLSQLGGDGGGGSGGSGGSGGSGGSGGSGGTLNIEDEYRLHETSKEPDVSLGSTWLSDFPQAWAETGGMGLAVRQAPLIIPLKATSTPVSIKQYPMSQEARLGIKPHIQRLLDQGILVPCQSPWNTPLLPVKKPGTNDYRPVQDLREVNKRVEDIHPTVPNPYNLLSGLPPSHQWYTVLDLKDAFFCLRLHPTSQPLFAFEWRDPEMGISGQLTWTRLPQGFKNSPTLFNEALHRDLAGFRIQHPDLILLQYVDDLLLAATSELDCQQGTRALLQTLGDLGYRASAKKAQICQKQVKYLGYLLKEGQRWLTEARKETVMGQPIPKTPRQLREFLGKAGFCRLFIPGFAEMAAPLYPLTKPGTLFNWGPDQQKAFQEIKQALLTAPALGLPDLTKPFELFVDEKQGYAKGVLTQKLGPWRRPVAYLSKKLDPVAAGWPPCLRMVAAIAVLTKDAGKLTMGQPLVILAPHAVEALVKQPPDRWLSNARMTHYQALLLDTDRVQFGPVVALNPATLLPLPEEGLQHDCLDILAEAHGTRSDLMDQPLPDADHTWYTDGSSFLQEGQRKAGAAVTTETEVIWARALPAGTSAQRAELIALTQALKMAEGKKLNVYTDSRYAFATAHIHGEIYRRRGWLTSEGKEIKNKDEILALLKALFLPKRLSIIHCPGHQKGNSAEARGNRMADQAAREVATRETPETSTLLAGKRTADGSEFEKRTADGSEFESPKKKAKVE

SEQ ID NO: 2301 - protein, 2096 aa, synthetic construct
MPAAKRVKLDGGDKKYSIGLDIGTNSVGWAVITDEYKVPSKKFKVLGNTDRHSIKKNLIGALLFDSGETAEATRLKRTARRRYTRRKNRICYLQEIFSNEMAKVDDSFFHRLEESFLVEEDKKHERHPIFGNIVDEVAYHEKYPTIYHLRKKLVDSTDKADLRLIYLALAHMIKFRGHFLIEGDLNPDNSDVDKLFIQLVQTYNQLFEENPINASGVDAKAILSARLSKSRRLENLIAQLPGEKKNGLFGNLIALSLGLTPNFKSNFDLAEDAKLQLSKDTYDDDLDNLLAQIGDQYADLFLAAKNLSDAILLSDILRVNTEITKAPLSASMIKRYDEHHQDLTLLKALVRQQLPEKYKEIFFDQSKNGYAGYIDGGASQEEFYKFIKPILEKMDGTEELLVKLNREDLLRKQRTFDNGSIPHQIHLGELHAILRRQEDFYPFLKDNREKIEKILTFRIPYYVGPLARGNSRFAWMTRKSEETITPWNFEEVVDKGASAQSFIERMTNFDKNLPNEKVLPKHSLLYEYFTVYNELTKVKYVTEGMRKPAFLSGEQKKAIVDLLFKTNRKVTVKQLKEDYFKKIECFDSVEISGVEDRFNASLGTYHDLLKIIKDKDFLDNEENEDILEDIVLTLTLFEDREMIEERLKTYAHLFDDKVMKQLKRRRYTGWGRLSRKLINGIRDKQSGKTILDFLKSDGFANRNFMQLIHDDSLTFKEDIQKAQVSGQGDSLHEHIANLAGSPAIKKGILQTVKVVDELVKVMGRHKPENIVIEMARENQTTQKGQKNSRERMKRIEEGIKELGSQILKEHPVENTQLQNEKLYLYYLQNGRDMYVDQELDINRLSDYDVDHIVPQSFLKDDSIDNKVLTRSDKARGKSDNVPSEEVVKKMKNYWRQLLNAKLITQRKFDNLTKAERGGLSELDKAGFIKRQLVETRQITKHVAQILDSRMNTKYDENDKLIREVKVITLKSKLVSDFRKDFQFYKVREINNYHHAHDAYLNAVVGTALIKKYPKLESEFVYGDYKVYDVRKMIAKSEQEIGKATAKYFFYSNIMNFFKTEITLANGEIRKRPLIETNGETGEIVWDKGRDFATVRKVLSMPQVNIVKKTEVQTGGFSKESILPKRNSDKLIARKKDWDPKKYGGFDSPTVAYSVLVVAKVEKGKSKKLKSVKELLGITIMERSSFEKNPIDFLEAKGYKEVKKDLIIKLPKYSLFELENGRKRMLASAGELQKGNELALPSKYVNFLYLASHYEKLKGSPEDNEQKQLFVEQHKHYLDEIIEQISEFSKRVILADANLDKVLSAYNKHRDKPIREQAENIIHLFTLTNLGAPAAFKYFDTTIDRKRYTSTKEVLDATLIHQSITGLYETRIDLSQLGGDGGPAPAPAPAPAPGGTLNIEDEYRLHETSKEPDVSLGSTWLSDFPQAWAETGGMGLAVRQAPLIIPLKATSTPVSIKQYPMSQEARLGIKPHIQRLLDQGILVPCQSPWNTPLLPVKKPGTNDYRPVQDLREVNKRVEDIHPTVPNPYNLLSGLPPSHQWYTVLDLKDAFFCLRLHPTSQPLFAFEWRDPEMGISGQLTWTRLPQGFKNSPTLFNEALHRDLAGFRIQHPDLILLQYVDDLLLAATSELDCQQGTRALLQTLGDLGYRASAKKAQICQKQVKYLGYLLKEGQRWLTEARKETVMGQPIPKTPRQLREFLGKAGFCRLFIPGFAEMAAPLYPLTKPGTLFNWGPDQQKAFQEIKQALLTAPALGLPDLTKPFELFVDEKQGYAKGVLTQKLGPWRRPVAYLSKKLDPVAAGWPPCLRMVAAIAVLTKDAGKLTMGQPLVILAPHAVEALVKQPPDRWLSNARMTHYQALLLDTDRVQFGPVVALNPATLLPLPEEGLQHDCLDILAEAHGTRSDLMDQPLPDADHTWYTDGSSFLQEGQRKAGAAVTTETEVIWARALPAGTSAQRAELIALTQALKMAEGKKLNVYTDSRYAFATAHIHGEIYRRRGWLTSEGKEIKNKDEILALLKALFLPKRLSIIHCPGHQKGNSAEARGNRMADQAAREVATRETPETSTLLAGKRTADGSEFEKRTADGSEFESPKKKAKVE

SEQ ID NO: 2302 - protein, 2091 aa, synthetic construct
MPAAKRVKLDGGDKKYSIGLDIGTNSVGWAVITDEYKVPSKKFKVLGNTDRHSIKKNLIGALLFDSGETAEATRLKRTARRRYTRRKNRICYLQEIFSNEMAKVDDSFFHRLEESFLVEEDKKHERHPIFGNIVDEVAYHEKYPTIYHLRKKLVDSTDKADLRLIYLALAHMIKFRGHFLIEGDLNPDNSDVDKLFIQLVQTYNQLFEENPINASGVDAKAILSARLSKSRRLENLIAQLPGEKKNGLFGNLIALSLGLTPNFKSNFDLAEDAKLQLSKDTYDDDLDNLLAQIGDQYADLFLAAKNLSDAILLSDILRVNTEITKAPLSASMIKRYDEHHQDLTLLKALVRQQLPEKYKEIFFDQSKNGYAGYIDGGASQEEFYKFIKPILEKMDGTEELLVKLNREDLLRKQRTFDNGSIPHQIHLGELHAILRRQEDFYPFLKDNREKIEKILTFRIPYYVGPLARGNSRFAWMTRKSEETITPWNFEEVVDKGASAQSFIERMTNFDKNLPNEKVLPKHSLLYEYFTVYNELTKVKYVTEGMRKPAFLSGEQKKAIVDLLFKTNRKVTVKQLKEDYFKKIECFDSVEISGVEDRFNASLGTYHDLLKIIKDKDFLDNEENEDILEDIVLTLTLFEDREMIEERLKTYAHLFDDKVMKQLKRRRYTGWGRLSRKLINGIRDKQSGKTILDFLKSDGFANRNFMQLIHDDSLTFKEDIQKAQVSGQGDSLHEHIANLAGSPAIKKGILQTVKVVDELVKVMGRHKPENIVIEMARENQTTQKGQKNSRERMKRIEEGIKELGSQILKEHPVENTQLQNEKLYLYYLQNGRDMYVDQELDINRLSDYDVDHIVPQSFLKDDSIDNKVLTRSDKARGKSDNVPSEEVVKKMKNYWRQLLNAKLITQRKFDNLTKAERGGLSELDKAGFIKRQLVETRQITKHVAQILDSRMNTKYDENDKLIREVKVITLKSKLVSDFRKDFQFYKVREINNYHHAHDAYLNAVVGTALIKKYPKLESEFVYGDYKVYDVRKMIAKSEQEIGKATAKYFFYSNIMNFFKTEITLANGEIRKRPLIETNGETGEIVWDKGRDFATVRKVLSMPQVNIVKKTEVQTGGFSKESILPKRNSDKLIARKKDWDPKKYGGFDSPTVAYSVLVVAKVEKGKSKKLKSVKELLGITIMERSSFEKNPIDFLEAKGYKEVKKDLIIKLPKYSLFELENGRKRMLASAGELQKGNELALPSKYVNFLYLASHYEKLKGSPEDNEQKQLFVEQHKHYLDEIIEQISEFSKRVILADANLDKVLSAYNKHRDKPIREQAENIIHLFTLTNLGAPAAFKYFDTTIDRKRYTSTKEVLDATLIHQSITGLYETRIDLSQLGGDGGGGGPAPGGTLNIEDEYRLHETSKEPDVSLGSTWLSDFPQAWAETGGMGLAVRQAPLIIPLKATSTPVSIKQYPMSQEARLGIKPHIQRLLDQGILVPCQSPWNTPLLPVKKPGTNDYRPVQDLREVNKRVEDIHPTVPNPYNLLSGLPPSHQWYTVLDLKDAFFCLRLHPTSQPLFAFEWRDPEMGISGQLTWTRLPQGFKNSPTLFNEALHRDLAGFRIQHPDLILLQYVDDLLLAATSELDCQQGTRALLQTLGDLGYRASAKKAQICQKQVKYLGYLLKEGQRWLTEARKETVMGQPIPKTPRQLREFLGKAGFCRLFIPGFAEMAAPLYPLTKPGTLFNWGPDQQKAFQEIKQALLTAPALGLPDLTKPFELFVDEKQGYAKGVLTQKLGPWRRPVAYLSKKLDPVAAGWPPCLRMVAAIAVLTKDAGKLTMGQPLVILAPHAVEALVKQPPDRWLSNARMTHYQALLLDTDRVQFGPVVALNPATLLPLPEEGLQHDCLDILAEAHGTRSDLMDQPLPDADHTWYTDGSSFLQEGQRKAGAAVTTETEVIWARALPAGTSAQRAELIALTQALKMAEGKKLNVYTDSRYAFATAHIHGEIYRRRGWLTSEGKEIKNKDEILALLKALFLPKRLSIIHCPGHQKGNSAEARGNRMADQAAREVATRETPETSTLLAGKRTADGSEFEKRTADGSEFESPKKKAKVE

SEQ ID NO: 2303 - protein, 2115 aa, synthetic construct
MPAAKRVKLDGGDKKYSIGLDIGTNSVGWAVITDEYKVPSKKFKVLGNTDRHSIKKNLIGALLFDSGETAEATRLKRTARRRYTRRKNRICYLQEIFSNEMAKVDDSFFHRLEESFLVEEDKKHERHPIFGNIVDEVAYHEKYPTIYHLRKKLVDSTDKADLRLIYLALAHMIKFRGHFLIEGDLNPDNSDVDKLFIQLVQTYNQLFEENPINASGVDAKAILSARLSKSRRLENLIAQLPGEKKNGLFGNLIALSLGLTPNFKSNFDLAEDAKLQLSKDTYDDDLDNLLAQIGDQYADLFLAAKNLSDAILLSDILRVNTEITKAPLSASMIKRYDEHHQDLTLLKALVRQQLPEKYKEIFFDQSKNGYAGYIDGGASQEEFYKFIKPILEKMDGTEELLVKLNREDLLRKQRTFDNGSIPHQIHLGELHAILRRQEDFYPFLKDNREKIEKILTFRIPYYVGPLARGNSRFAWMTRKSEETITPWNFEEVVDKGASAQSFIERMTNFDKNLPNEKVLPKHSLLYEYFTVYNELTKVKYVTEGMRKPAFLSGEQKKAIVDLLFKTNRKVTVKQLKEDYFKKIECFDSVEISGVEDRFNASLGTYHDLLKIIKDKDFLDNEENEDILEDIVLTLTLFEDREMIEERLKTYAHLFDDKVMKQLKRRRYTGWGRLSRKLINGIRDKQSGKTILDFLKSDGFANRNFMQLIHDDSLTFKEDIQKAQVSGQGDSLHEHIANLAGSPAIKKGILQTVKVVDELVKVMGRHKPENIVIEMARENQTTQKGQKNSRERMKRIEEGIKELGSQILKEHPVENTQLQNEKLYLYYLQNGRDMYVDQELDINRLSDYDVDHIVPQSFLKDDSIDNKVLTRSDKARGKSDNVPSEEVVKKMKNYWRQLLNAKLITQRKFDNLTKAERGGLSELDKAGFIKRQLVETRQITKHVAQILDSRMNTKYDENDKLIREVKVITLKSKLVSDFRKDFQFYKVREINNYHHAHDAYLNAVVGTALIKKYPKLESEFVYGDYKVYDVRKMIAKSEQEIGKATAKYFFYSNIMNFFKTEITLANGEIRKRPLIETNGETGEIVWDKGRDFATVRKVLSMPQVNIVKKTEVQTGGFSKESILPKRNSDKLIARKKDWDPKKYGGFDSPTVAYSVLVVAKVEKGKSKKLKSVKELLGITIMERSSFEKNPIDFLEAKGYKEVKKDLIIKLPKYSLFELENGRKRMLASAGELQKGNELALPSKYVNFLYLASHYEKLKGSPEDNEQKQLFVEQHKHYLDEIIEQISEFSKRVILADANLDKVLSAYNKHRDKPIREQAENIIHLFTLTNLGAPAAFKYFDTTIDRKRYTSTKEVLDATLIHQSITGLYETRIDLSQLGGDGGGGGGSGGGGSGGGGSGGGGSGGGGSGGGGSGGTLNIEDEYRLHETSKEPDVSLGSTWLSDFPQAWAETGGMGLAVRQAPLIIPLKATSTPVSIKQYPMSQEARLGIKPHIQRLLDQGILVPCQSPWNTPLLPVKKPGTNDYRPVQDLREVNKRVEDIHPTVPNPYNLLSGLPPSHQWYTVLDLKDAFFCLRLHPTSQPLFAFEWRDPEMGISGQLTWTRLPQGFKNSPTLFNEALHRDLAGFRIQHPDLILLQYVDDLLLAATSELDCQQGTRALLQTLGDLGYRASAKKAQICQKQVKYLGYLLKEGQRWLTEARKETVMGQPIPKTPRQLREFLGKAGFCRLFIPGFAEMAAPLYPLTKPGTLFNWGPDQQKAFQEIKQALLTAPALGLPDLTKPFELFVDEKQGYAKGVLTQKLGPWRRPVAYLSKKLDPVAAGWPPCLRMVAAIAVLTKDAGKLTMGQPLVILAPHAVEALVKQPPDRWLSNARMTHYQALLLDTDRVQFGPVVALNPATLLPLPEEGLQHDCLDILAEAHGTRSDLMDQPLPDADHTWYTDGSSFLQEGQRKAGAAVTTETEVIWARALPAGTSAQRAELIALTQALKMAEGKKLNVYTDSRYAFATAHIHGEIYRRRGWLTSEGKEIKNKDEILALLKALFLPKRLSIIHCPGHQKGNSAEARGNRMADQAAREVATRETPETSTLLAGKRTADGSEFEKRTADGSEFESPKKKAKVE

SEQ ID NO: 2304 - protein, 2103 aa, synthetic construct
MPAAKRVKLDGGDKKYSIGLDIGTNSVGWAVITDEYKVPSKKFKVLGNTDRHSIKKNLIGALLFDSGETAEATRLKRTARRRYTRRKNRICYLQEIFSNEMAKVDDSFFHRLEESFLVEEDKKHERHPIFGNIVDEVAYHEKYPTIYHLRKKLVDSTDKADLRLIYLALAHMIKFRGHFLIEGDLNPDNSDVDKLFIQLVQTYNQLFEENPINASGVDAKAILSARLSKSRRLENLIAQLPGEKKNGLFGNLIALSLGLTPNFKSNFDLAEDAKLQLSKDTYDDDLDNLLAQIGDQYADLFLAAKNLSDAILLSDILRVNTEITKAPLSASMIKRYDEHHQDLTLLKALVRQQLPEKYKEIFFDQSKNGYAGYIDGGASQEEFYKFIKPILEKMDGTEELLVKLNREDLLRKQRTFDNGSIPHQIHLGELHAILRRQEDFYPFLKDNREKIEKILTFRIPYYVGPLARGNSRFAWMTRKSEETITPWNFEEVVDKGASAQSFIERMTNFDKNLPNEKVLPKHSLLYEYFTVYNELTKVKYVTEGMRKPAFLSGEQKKAIVDLLFKTNRKVTVKQLKEDYFKKIECFDSVEISGVEDRFNASLGTYHDLLKIIKDKDFLDNEENEDILEDIVLTLTLFEDREMIEERLKTYAHLFDDKVMKQLKRRRYTGWGRLSRKLINGIRDKQSGKTILDFLKSDGFANRNFMQLIHDDSLTFKEDIQKAQVSGQGDSLHEHIANLAGSPAIKKGILQTVKVVDELVKVMGRHKPENIVIEMARENQTTQKGQKNSRERMKRIEEGIKELGSQILKEHPVENTQLQNEKLYLYYLQNGRDMYVDQELDINRLSDYDVDHIVPQSFLKDDSIDNKVLTRSDKARGKSDNVPSEEVVKKMKNYWRQLLNAKLITQRKFDNLTKAERGGLSELDKAGFIKRQLVETRQITKHVAQILDSRMNTKYDENDKLIREVKVITLKSKLVSDFRKDFQFYKVREINNYHHAHDAYLNAVVGTALIKKYPKLESEFVYGDYKVYDVRKMIAKSEQEIGKATAKYFFYSNIMNFFKTEITLANGEIRKRPLIETNGETGEIVWDKGRDFATVRKVLSMPQVNIVKKTEVQTGGFSKESILPKRNSDKLIARKKDWDPKKYGGFDSPTVAYSVLVVAKVEKGKSKKLKSVKELLGITIMERSSFEKNPIDFLEAKGYKEVKKDLIIKLPKYSLFELENGRKRMLASAGELQKGNELALPSKYVNFLYLASHYEKLKGSPEDNEQKQLFVEQHKHYLDEIIEQISEFSKRVILADANLDKVLSAYNKHRDKPIREQAENIIHLFTLTNLGAPAAFKYFDTTIDRKRYTSTKEVLDATLIHQSITGLYETRIDLSQLGGDGGGSSGSSGSSGSSGSSGSSGGTLNIEDEYRLHETSKEPDVSLGSTWLSDFPQAWAETGGMGLAVRQAPLIIPLKATSTPVSIKQYPMSQEARLGIKPHIQRLLDQGILVPCQSPWNTPLLPVKKPGTNDYRPVQDLREVNKRVEDIHPTVPNPYNLLSGLPPSHQWYTVLDLKDAFFCLRLHPTSQPLFAFEWRDPEMGISGQLTWTRLPQGFKNSPTLFNEALHRDLAGFRIQHPDLILLQYVDDLLLAATSELDCQQGTRALLQTLGDLGYRASAKKAQICQKQVKYLGYLLKEGQRWLTEARKETVMGQPIPKTPRQLREFLGKAGFCRLFIPGFAEMAAPLYPLTKPGTLFNWGPDQQKAFQEIKQALLTAPALGLPDLTKPFELFVDEKQGYAKGVLTQKLGPWRRPVAYLSKKLDPVAAGWPPCLRMVAAIAVLTKDAGKLTMGQPLVILAPHAVEALVKQPPDRWLSNARMTHYQALLLDTDRVQFGPVVALNPATLLPLPEEGLQHDCLDILAEAHGTRSDLMDQPLPDADHTWYTDGSSFLQEGQRKAGAAVTTETEVIWARALPAGTSAQRAELIALTQALKMAEGKKLNVYTDSRYAFATAHIHGEIYRRRGWLTSEGKEIKNKDEILALLKALFLPKRLSIIHCPGHQKGNSAEARGNRMADQAAREVATRETPETSTLLAGKRTADGSEFEKRTADGSEFESPKKKAKVE

SEQ ID NO: 2305 - protein, 2100 aa, synthetic construct
MPAAKRVKLDGGDKKYSIGLDIGTNSVGWAVITDEYKVPSKKFKVLGNTDRHSIKKNLIGALLFDSGETAEATRLKRTARRRYTRRKNRICYLQEIFSNEMAKVDDSFFHRLEESFLVEEDKKHERHPIFGNIVDEVAYHEKYPTIYHLRKKLVDSTDKADLRLIYLALAHMIKFRGHFLIEGDLNPDNSDVDKLFIQLVQTYNQLFEENPINASGVDAKAILSARLSKSRRLENLIAQLPGEKKNGLFGNLIALSLGLTPNFKSNFDLAEDAKLQLSKDTYDDDLDNLLAQIGDQYADLFLAAKNLSDAILLSDILRVNTEITKAPLSASMIKRYDEHHQDLTLLKALVRQQLPEKYKEIFFDQSKNGYAGYIDGGASQEEFYKFIKPILEKMDGTEELLVKLNREDLLRKQRTFDNGSIPHQIHLGELHAILRRQEDFYPFLKDNREKIEKILTFRIPYYVGPLARGNSRFAWMTRKSEETITPWNFEEVVDKGASAQSFIERMTNFDKNLPNEKVLPKHSLLYEYFTVYNELTKVKYVTEGMRKPAFLSGEQKKAIVDLLFKTNRKVTVKQLKEDYFKKIECFDSVEISGVEDRFNASLGTYHDLLKIIKDKDFLDNEENEDILEDIVLTLTLFEDREMIEERLKTYAHLFDDKVMKQLKRRRYTGWGRLSRKLINGIRDKQSGKTILDFLKSDGFANRNFMQLIHDDSLTFKEDIQKAQVSGQGDSLHEHIANLAGSPAIKKGILQTVKVVDELVKVMGRHKPENIVIEMARENQTTQKGQKNSRERMKRIEEGIKELGSQILKEHPVENTQLQNEKLYLYYLQNGRDMYVDQELDINRLSDYDVDHIVPQSFLKDDSIDNKVLTRSDKARGKSDNVPSEEVVKKMKNYWRQLLNAKLITQRKFDNLTKAERGGLSELDKAGFIKRQLVETRQITKHVAQILDSRMNTKYDENDKLIREVKVITLKSKLVSDFRKDFQFYKVREINNYHHAHDAYLNAVVGTALIKKYPKLESEFVYGDYKVYDVRKMIAKSEQEIGKATAKYFFYSNIMNFFKTEITLANGEIRKRPLIETNGETGEIVWDKGRDFATVRKVLSMPQVNIVKKTEVQTGGFSKESILPKRNSDKLIARKKDWDPKKYGGFDSPTVAYSVLVVAKVEKGKSKKLKSVKELLGITIMERSSFEKNPIDFLEAKGYKEVKKDLIIKLPKYSLFELENGRKRMLASAGELQKGNELALPSKYVNFLYLASHYEKLKGSPEDNEQKQLFVEQHKHYLDEIIEQISEFSKRVILADANLDKVLSAYNKHRDKPIREQAENIIHLFTLTNLGAPAAFKYFDTTIDRKRYTSTKEVLDATLIHQSITGLYETRIDLSQLGGDGGEAAAKGGGGSEAAAKGGTLNIEDEYRLHETSKEPDVSLGSTWLSDFPQAWAETGGMGLAVRQAPLIIPLKATSTPVSIKQYPMSQEARLGIKPHIQRLLDQGILVPCQSPWNTPLLPVKKPGTNDYRPVQDLREVNKRVEDIHPTVPNPYNLLSGLPPSHQWYTVLDLKDAFFCLRLHPTSQPLFAFEWRDPEMGISGQLTWTRLPQGFKNSPTLFNEALHRDLAGFRIQHPDLILLQYVDDLLLAATSELDCQQGTRALLQTLGDLGYRASAKKAQICQKQVKYLGYLLKEGQRWLTEARKETVMGQPIPKTPRQLREFLGKAGFCRLFIPGFAEMAAPLYPLTKPGTLFNWGPDQQKAFQEIKQALLTAPALGLPDLTKPFELFVDEKQGYAKGVLTQKLGPWRRPVAYLSKKLDPVAAGWPPCLRMVAAIAVLTKDAGKLTMGQPLVILAPHAVEALVKQPPDRWLSNARMTHYQALLLDTDRVQFGPVVALNPATLLPLPEEGLQHDCLDILAEAHGTRSDLMDQPLPDADHTWYTDGSSFLQEGQRKAGAAVTTETEVIWARALPAGTSAQRAELIALTQALKMAEGKKLNVYTDSRYAFATAHIHGEIYRRRGWLTSEGKEIKNKDEILALLKALFLPKRLSIIHCPGHQKGNSAEARGNRMADQAAREVATRETPETSTLLAGKRTADGSEFEKRTADGSEFESPKKKAKVE

SEQ ID NO: 2306 - protein, 2096 aa, synthetic construct
MPAAKRVKLDGGDKKYSIGLDIGTNSVGWAVITDEYKVPSKKFKVLGNTDRHSIKKNLIGALLFDSGETAEATRLKRTARRRYTRRKNRICYLQEIFSNEMAKVDDSFFHRLEESFLVEEDKKHERHPIFGNIVDEVAYHEKYPTIYHLRKKLVDSTDKADLRLIYLALAHMIKFRGHFLIEGDLNPDNSDVDKLFIQLVQTYNQLFEENPINASGVDAKAILSARLSKSRRLENLIAQLPGEKKNGLFGNLIALSLGLTPNFKSNFDLAEDAKLQLSKDTYDDDLDNLLAQIGDQYADLFLAAKNLSDAILLSDILRVNTEITKAPLSASMIKRYDEHHQDLTLLKALVRQQLPEKYKEIFFDQSKNGYAGYIDGGASQEEFYKFIKPILEKMDGTEELLVKLNREDLLRKQRTFDNGSIPHQIHLGELHAILRRQEDFYPFLKDNREKIEKILTFRIPYYVGPLARGNSRFAWMTRKSEETITPWNFEEVVDKGASAQSFIERMTNFDKNLPNEKVLPKHSLLYEYFTVYNELTKVKYVTEGMRKPAFLSGEQKKAIVDLLFKTNRKVTVKQLKEDYFKKIECFDSVEISGVEDRFNASLGTYHDLLKIIKDKDFLDNEENEDILEDIVLTLTLFEDREMIEERLKTYAHLFDDKVMKQLKRRRYTGWGRLSRKLINGIRDKQSGKTILDFLKSDGFANRNFMQLIHDDSLTFKEDIQKAQVSGQGDSLHEHIANLAGSPAIKKGILQTVKVVDELVKVMGRHKPENIVIEMARENQTTQKGQKNSRERMKRIEEGIKELGSQILKEHPVENTQLQNEKLYLYYLQNGRDMYVDQELDINRLSDYDVDHIVPQSFLKDDSIDNKVLTRSDKARGKSDNVPSEEVVKKMKNYWRQLLNAKLITQRKFDNLTKAERGGLSELDKAGFIKRQLVETRQITKHVAQILDSRMNTKYDENDKLIREVKVITLKSKLVSDFRKDFQFYKVREINNYHHAHDAYLNAVVGTALIKKYPKLESEFVYGDYKVYDVRKMIAKSEQEIGKATAKYFFYSNIMNFFKTEITLANGEIRKRPLIETNGETGEIVWDKGRDFATVRKVLSMPQVNIVKKTEVQTGGFSKESILPKRNSDKLIARKKDWDPKKYGGFDSPTVAYSVLVVAKVEKGKSKKLKSVKELLGITIMERSSFEKNPIDFLEAKGYKEVKKDLIIKLPKYSLFELENGRKRMLASAGELQKGNELALPSKYVNFLYLASHYEKLKGSPEDNEQKQLFVEQHKHYLDEIIEQISEFSKRVILADANLDKVLSAYNKHRDKPIREQAENIIHLFTLTNLGAPAAFKYFDTTIDRKRYTSTKEVLDATLIHQSITGLYETRIDLSQLGGDGGGGGEAAAKGGSGGTLNIEDEYRLHETSKEPDVSLGSTWLSDFPQAWAETGGMGLAVRQAPLIIPLKATSTPVSIKQYPMSQEARLGIKPHIQRLLDQGILVPCQSPWNTPLLPVKKPGTNDYRPVQDLREVNKRVEDIHPTVPNPYNLLSGLPPSHQWYTVLDLKDAFFCLRLHPTSQPLFAFEWRDPEMGISGQLTWTRLPQGFKNSPTLFNEALHRDLAGFRIQHPDLILLQYVDDLLLAATSELDCQQGTRALLQTLGDLGYRASAKKAQICQKQVKYLGYLLKEGQRWLTEARKETVMGQPIPKTPRQLREFLGKAGFCRLFIPGFAEMAAPLYPLTKPGTLFNWGPDQQKAFQEIKQALLTAPALGLPDLTKPFELFVDEKQGYAKGVLTQKLGPWRRPVAYLSKKLDPVAAGWPPCLRMVAAIAVLTKDAGKLTMGQPLVILAPHAVEALVKQPPDRWLSNARMTHYQALLLDTDRVQFGPVVALNPATLLPLPEEGLQHDCLDILAEAHGTRSDLMDQPLPDADHTWYTDGSSFLQEGQRKAGAAVTTETEVIWARALPAGTSAQRAELIALTQALKMAEGKKLNVYTDSRYAFATAHIHGEIYRRRGWLTSEGKEIKNKDEILALLKALFLPKRLSIIHCPGHQKGNSAEARGNRMADQAAREVATRETPETSTLLAGKRTADGSEFEKRTADGSEFESPKKKAKVE

SEQ ID NO: 2307 - protein, 2092 aa, synthetic construct
MPAAKRVKLDGGDKKYSIGLDIGTNSVGWAVITDEYKVPSKKFKVLGNTDRHSIKKNLIGALLFDSGETAEATRLKRTARRRYTRRKNRICYLQEIFSNEMAKVDDSFFHRLEESFLVEEDKKHERHPIFGNIVDEVAYHEKYPTIYHLRKKLVDSTDKADLRLIYLALAHMIKFRGHFLIEGDLNPDNSDVDKLFIQLVQTYNQLFEENPINASGVDAKAILSARLSKSRRLENLIAQLPGEKKNGLFGNLIALSLGLTPNFKSNFDLAEDAKLQLSKDTYDDDLDNLLAQIGDQYADLFLAAKNLSDAILLSDILRVNTEITKAPLSASMIKRYDEHHQDLTLLKALVRQQLPEKYKEIFFDQSKNGYAGYIDGGASQEEFYKFIKPILEKMDGTEELLVKLNREDLLRKQRTFDNGSIPHQIHLGELHAILRRQEDFYPFLKDNREKIEKILTFRIPYYVGPLARGNSRFAWMTRKSEETITPWNFEEVVDKGASAQSFIERMTNFDKNLPNEKVLPKHSLLYEYFTVYNELTKVKYVTEGMRKPAFLSGEQKKAIVDLLFKTNRKVTVKQLKEDYFKKIECFDSVEISGVEDRFNASLGTYHDLLKIIKDKDFLDNEENEDILEDIVLTLTLFEDREMIEERLKTYAHLFDDKVMKQLKRRRYTGWGRLSRKLINGIRDKQSGKTILDFLKSDGFANRNFMQLIHDDSLTFKEDIQKAQVSGQGDSLHEHIANLAGSPAIKKGILQTVKVVDELVKVMGRHKPENIVIEMARENQTTQKGQKNSRERMKRIEEGIKELGSQILKEHPVENTQLQNEKLYLYYLQNGRDMYVDQELDINRLSDYDVDHIVPQSFLKDDSIDNKVLTRSDKARGKSDNVPSEEVVKKMKNYWRQLLNAKLITQRKFDNLTKAERGGLSELDKAGFIKRQLVETRQITKHVAQILDSRMNTKYDENDKLIREVKVITLKSKLVSDFRKDFQFYKVREINNYHHAHDAYLNAVVGTALIKKYPKLESEFVYGDYKVYDVRKMIAKSEQEIGKATAKYFFYSNIMNFFKTEITLANGEIRKRPLIETNGETGEIVWDKGRDFATVRKVLSMPQVNIVKKTEVQTGGFSKESILPKRNSDKLIARKKDWDPKKYGGFDSPTVAYSVLVVAKVEKGKSKKLKSVKELLGITIMERSSFEKNPIDFLEAKGYKEVKKDLIIKLPKYSLFELENGRKRMLASAGELQKGNELALPSKYVNFLYLASHYEKLKGSPEDNEQKQLFVEQHKHYLDEIIEQISEFSKRVILADANLDKVLSAYNKHRDKPIREQAENIIHLFTLTNLGAPAAFKYFDTTIDRKRYTSTKEVLDATLIHQSITGLYETRIDLSQLGGDGGGGGGGGGGGTLNIEDEYRLHETSKEPDVSLGSTWLSDFPQAWAETGGMGLAVRQAPLIIPLKATSTPVSIKQYPMSQEARLGIKPHIQRLLDQGILVPCQSPWNTPLLPVKKPGTNDYRPVQDLREVNKRVEDIHPTVPNPYNLLSGLPPSHQWYTVLDLKDAFFCLRLHPTSQPLFAFEWRDPEMGISGQLTWTRLPQGFKNSPTLFNEALHRDLAGFRIQHPDLILLQYVDDLLLAATSELDCQQGTRALLQTLGDLGYRASAKKAQICQKQVKYLGYLLKEGQRWLTEARKETVMGQPIPKTPRQLREFLGKAGFCRLFIPGFAEMAAPLYPLTKPGTLFNWGPDQQKAFQEIKQALLTAPALGLPDLTKPFELFVDEKQGYAKGVLTQKLGPWRRPVAYLSKKLDPVAAGWPPCLRMVAAIAVLTKDAGKLTMGQPLVILAPHAVEALVKQPPDRWLSNARMTHYQALLLDTDRVQFGPVVALNPATLLPLPEEGLQHDCLDILAEAHGTRSDLMDQPLPDADHTWYTDGSSFLQEGQRKAGAAVTTETEVIWARALPAGTSAQRAELIALTQALKMAEGKKLNVYTDSRYAFATAHIHGEIYRRRGWLTSEGKEIKNKDEILALLKALFLPKRLSIIHCPGHQKGNSAEARGNRMADQAAREVATRETPETSTLLAGKRTADGSEFEKRTADGSEFESPKKKAKVE

SEQ ID NO: 2308 - protein, 2094 aa, synthetic construct
MPAAKRVKLDGGDKKYSIGLDIGTNSVGWAVITDEYKVPSKKFKVLGNTDRHSIKKNLIGALLFDSGETAEATRLKRTARRRYTRRKNRICYLQEIFSNEMAKVDDSFFHRLEESFLVEEDKKHERHPIFGNIVDEVAYHEKYPTIYHLRKKLVDSTDKADLRLIYLALAHMIKFRGHFLIEGDLNPDNSDVDKLFIQLVQTYNQLFEENPINASGVDAKAILSARLSKSRRLENLIAQLPGEKKNGLFGNLIALSLGLTPNFKSNFDLAEDAKLQLSKDTYDDDLDNLLAQIGDQYADLFLAAKNLSDAILLSDILRVNTEITKAPLSASMIKRYDEHHQDLTLLKALVRQQLPEKYKEIFFDQSKNGYAGYIDGGASQEEFYKFIKPILEKMDGTEELLVKLNREDLLRKQRTFDNGSIPHQIHLGELHAILRRQEDFYPFLKDNREKIEKILTFRIPYYVGPLARGNSRFAWMTRKSEETITPWNFEEVVDKGASAQSFIERMTNFDKNLPNEKVLPKHSLLYEYFTVYNELTKVKYVTEGMRKPAFLSGEQKKAIVDLLFKTNRKVTVKQLKEDYFKKIECFDSVEISGVEDRFNASLGTYHDLLKIIKDKDFLDNEENEDILEDIVLTLTLFEDREMIEERLKTYAHLFDDKVMKQLKRRRYTGWGRLSRKLINGIRDKQSGKTILDFLKSDGFANRNFMQLIHDDSLTFKEDIQKAQVSGQGDSLHEHIANLAGSPAIKKGILQTVKVVDELVKVMGRHKPENIVIEMARENQTTQKGQKNSRERMKRIEEGIKELGSQILKEHPVENTQLQNEKLYLYYLQNGRDMYVDQELDINRLSDYDVDHIVPQSFLKDDSIDNKVLTRSDKARGKSDNVPSEEVVKKMKNYWRQLLNAKLITQRKFDNLTKAERGGLSELDKAGFIKRQLVETRQITKHVAQILDSRMNTKYDENDKLIREVKVITLKSKLVSDFRKDFQFYKVREINNYHHAHDAYLNAVVGTALIKKYPKLESEFVYGDYKVYDVRKMIAKSEQEIGKATAKYFFYSNIMNFFKTEITLANGEIRKRPLIETNGETGEIVWDKGRDFATVRKVLSMPQVNIVKKTEVQTGGFSKESILPKRNSDKLIARKKDWDPKKYGGFDSPTVAYSVLVVAKVEKGKSKKLKSVKELLGITIMERSSFEKNPIDFLEAKGYKEVKKDLIIKLPKYSLFELENGRKRMLASAGELQKGNELALPSKYVNFLYLASHYEKLKGSPEDNEQKQLFVEQHKHYLDEIIEQISEFSKRVILADANLDKVLSAYNKHRDKPIREQAENIIHLFTLTNLGAPAAFKYFDTTIDRKRYTSTKEVLDATLIHQSITGLYETRIDLSQLGGDGGPAPGGGGSSGGTLNIEDEYRLHETSKEPDVSLGSTWLSDFPQAWAETGGMGLAVRQAPLIIPLKATSTPVSIKQYPMSQEARLGIKPHIQRLLDQGILVPCQSPWNTPLLPVKKPGTNDYRPVQDLREVNKRVEDIHPTVPNPYNLLSGLPPSHQWYTVLDLKDAFFCLRLHPTSQPLFAFEWRDPEMGISGQLTWTRLPQGFKNSPTLFNEALHRDLAGFRIQHPDLILLQYVDDLLLAATSELDCQQGTRALLQTLGDLGYRASAKKAQICQKQVKYLGYLLKEGQRWLTEARKETVMGQPIPKTPRQLREFLGKAGFCRLFIPGFAEMAAPLYPLTKPGTLFNWGPDQQKAFQEIKQALLTAPALGLPDLTKPFELFVDEKQGYAKGVLTQKLGPWRRPVAYLSKKLDPVAAGWPPCLRMVAAIAVLTKDAGKLTMGQPLVILAPHAVEALVKQPPDRWLSNARMTHYQALLLDTDRVQFGPVVALNPATLLPLPEEGLQHDCLDILAEAHGTRSDLMDQPLPDADHTWYTDGSSFLQEGQRKAGAAVTTETEVIWARALPAGTSAQRAELIALTQALKMAEGKKLNVYTDSRYAFATAHIHGEIYRRRGWLTSEGKEIKNKDEILALLKALFLPKRLSIIHCPGHQKGNSAEARGNRMADQAAREVATRETPETSTLLAGKRTADGSEFEKRTADGSEFESPKKKAKVE

SEQ ID NO: 2309 - protein, 2098 aa, synthetic construct
MPAAKRVKLDGGDKKYSIGLDIGTNSVGWAVITDEYKVPSKKFKVLGNTDRHSIKKNLIGALLFDSGETAEATRLKRTARRRYTRRKNRICYLQEIFSNEMAKVDDSFFHRLEESFLVEEDKKHERHPIFGNIVDEVAYHEKYPTIYHLRKKLVDSTDKADLRLIYLALAHMIKFRGHFLIEGDLNPDNSDVDKLFIQLVQTYNQLFEENPINASGVDAKAILSARLSKSRRLENLIAQLPGEKKNGLFGNLIALSLGLTPNFKSNFDLAEDAKLQLSKDTYDDDLDNLLAQIGDQYADLFLAAKNLSDAILLSDILRVNTEITKAPLSASMIKRYDEHHQDLTLLKALVRQQLPEKYKEIFFDQSKNGYAGYIDGGASQEEFYKFIKPILEKMDGTEELLVKLNREDLLRKQRTFDNGSIPHQIHLGELHAILRRQEDFYPFLKDNREKIEKILTFRIPYYVGPLARGNSRFAWMTRKSEETITPWNFEEVVDKGASAQSFIERMTNFDKNLPNEKVLPKHSLLYEYFTVYNELTKVKYVTEGMRKPAFLSGEQKKAIVDLLFKTNRKVTVKQLKEDYFKKIECFDSVEISGVEDRFNASLGTYHDLLKIIKDKDFLDNEENEDILEDIVLTLTLFEDREMIEERLKTYAHLFDDKVMKQLKRRRYTGWGRLSRKLINGIRDKQSGKTILDFLKSDGFANRNFMQLIHDDSLTFKEDIQKAQVSGQGDSLHEHIANLAGSPAIKKGILQTVKVVDELVKVMGRHKPENIVIEMARENQTTQKGQKNSRERMKRIEEGIKELGSQILKEHPVENTQLQNEKLYLYYLQNGRDMYVDQELDINRLSDYDVDHIVPQSFLKDDSIDNKVLTRSDKARGKSDNVPSEEVVKKMKNYWRQLLNAKLITQRKFDNLTKAERGGLSELDKAGFIKRQLVETRQITKHVAQILDSRMNTKYDENDKLIREVKVITLKSKLVSDFRKDFQFYKVREINNYHHAHDAYLNAVVGTALIKKYPKLESEFVYGDYKVYDVRKMIAKSEQEIGKATAKYFFYSNIMNFFKTEITLANGEIRKRPLIETNGETGEIVWDKGRDFATVRKVLSMPQVNIVKKTEVQTGGFSKESILPKRNSDKLIARKKDWDPKKYGGFDSPTVAYSVLVVAKVEKGKSKKLKSVKELLGITIMERSSFEKNPIDFLEAKGYKEVKKDLIIKLPKYSLFELENGRKRMLASAGELQKGNELALPSKYVNFLYLASHYEKLKGSPEDNEQKQLFVEQHKHYLDEIIEQISEFSKRVILADANLDKVLSAYNKHRDKPIREQAENIIHLFTLTNLGAPAAFKYFDTTIDRKRYTSTKEVLDATLIHQSITGLYETRIDLSQLGGDGGPAPAPAPAPAPAPGGTLNIEDEYRLHETSKEPDVSLGSTWLSDFPQAWAETGGMGLAVRQAPLIIPLKATSTPVSIKQYPMSQEARLGIKPHIQRLLDQGILVPCQSPWNTPLLPVKKPGTNDYRPVQDLREVNKRVEDIHPTVPNPYNLLSGLPPSHQWYTVLDLKDAFFCLRLHPTSQPLFAFEWRDPEMGISGQLTWTRLPQGFKNSPTLFNEALHRDLAGFRIQHPDLILLQYVDDLLLAATSELDCQQGTRALLQTLGDLGYRASAKKAQICQKQVKYLGYLLKEGQRWLTEARKETVMGQPIPKTPRQLREFLGKAGFCRLFIPGFAEMAAPLYPLTKPGTLFNWGPDQQKAFQEIKQALLTAPALGLPDLTKPFELFVDEKQGYAKGVLTQKLGPWRRPVAYLSKKLDPVAAGWPPCLRMVAAIAVLTKDAGKLTMGQPLVILAPHAVEALVKQPPDRWLSNARMTHYQALLLDTDRVQFGPVVALNPATLLPLPEEGLQHDCLDILAEAHGTRSDLMDQPLPDADHTWYTDGSSFLQEGQRKAGAAVTTETEVIWARALPAGTSAQRAELIALTQALKMAEGKKLNVYTDSRYAFATAHIHGEIYRRRGWLTSEGKEIKNKDEILALLKALFLPKRLSIIHCPGHQKGNSAEARGNRMADQAAREVATRETPETSTLLAGKRTADGSEFEKRTADGSEFESPKKKAKVE

SEQ ID NO: 2310 - protein, 2100 aa, synthetic construct
MPAAKRVKLDGGDKKYSIGLDIGTNSVGWAVITDEYKVPSKKFKVLGNTDRHSIKKNLIGALLFDSGETAEATRLKRTARRRYTRRKNRICYLQEIFSNEMAKVDDSFFHRLEESFLVEEDKKHERHPIFGNIVDEVAYHEKYPTIYHLRKKLVDSTDKADLRLIYLALAHMIKFRGHFLIEGDLNPDNSDVDKLFIQLVQTYNQLFEENPINASGVDAKAILSARLSKSRRLENLIAQLPGEKKNGLFGNLIALSLGLTPNFKSNFDLAEDAKLQLSKDTYDDDLDNLLAQIGDQYADLFLAAKNLSDAILLSDILRVNTEITKAPLSASMIKRYDEHHQDLTLLKALVRQQLPEKYKEIFFDQSKNGYAGYIDGGASQEEFYKFIKPILEKMDGTEELLVKLNREDLLRKQRTFDNGSIPHQIHLGELHAILRRQEDFYPFLKDNREKIEKILTFRIPYYVGPLARGNSRFAWMTRKSEETITPWNFEEVVDKGASAQSFIERMTNFDKNLPNEKVLPKHSLLYEYFTVYNELTKVKYVTEGMRKPAFLSGEQKKAIVDLLFKTNRKVTVKQLKEDYFKKIECFDSVEISGVEDRFNASLGTYHDLLKIIKDKDFLDNEENEDILEDIVLTLTLFEDREMIEERLKTYAHLFDDKVMKQLKRRRYTGWGRLSRKLINGIRDKQSGKTILDFLKSDGFANRNFMQLIHDDSLTFKEDIQKAQVSGQGDSLHEHIANLAGSPAIKKGILQTVKVVDELVKVMGRHKPENIVIEMARENQTTQKGQKNSRERMKRIEEGIKELGSQILKEHPVENTQLQNEKLYLYYLQNGRDMYVDQELDINRLSDYDVDHIVPQSFLKDDSIDNKVLTRSDKARGKSDNVPSEEVVKKMKNYWRQLLNAKLITQRKFDNLTKAERGGLSELDKAGFIKRQLVETRQITKHVAQILDSRMNTKYDENDKLIREVKVITLKSKLVSDFRKDFQFYKVREINNYHHAHDAYLNAVVGTALIKKYPKLESEFVYGDYKVYDVRKMIAKSEQEIGKATAKYFFYSNIMNFFKTEITLANGEIRKRPLIETNGETGEIVWDKGRDFATVRKVLSMPQVNIVKKTEVQTGGFSKESILPKRNSDKLIARKKDWDPKKYGGFDSPTVAYSVLVVAKVEKGKSKKLKSVKELLGITIMERSSFEKNPIDFLEAKGYKEVKKDLIIKLPKYSLFELENGRKRMLASAGELQKGNELALPSKYVNFLYLASHYEKLKGSPEDNEQKQLFVEQHKHYLDEIIEQISEFSKRVILADANLDKVLSAYNKHRDKPIREQAENIIHLFTLTNLGAPAAFKYFDTTIDRKRYTSTKEVLDATLIHQSITGLYETRIDLSQLGGDGGGGSGGSGGSGGSGGSGGTLNIEDEYRLHETSKEPDVSLGSTWLSDFPQAWAETGGMGLAVRQAPLIIPLKATSTPVSIKQYPMSQEARLGIKPHIQRLLDQGILVPCQSPWNTPLLPVKKPGTNDYRPVQDLREVNKRVEDIHPTVPNPYNLLSGLPPSHQWYTVLDLKDAFFCLRLHPTSQPLFAFEWRDPEMGISGQLTWTRLPQGFKNSPTLFNEALHRDLAGFRIQHPDLILLQYVDDLLLAATSELDCQQGTRALLQTLGDLGYRASAKKAQICQKQVKYLGYLLKEGQRWLTEARKETVMGQPIPKTPRQLREFLGKAGFCRLFIPGFAEMAAPLYPLTKPGTLFNWGPDQQKAFQEIKQALLTAPALGLPDLTKPFELFVDEKQGYAKGVLTQKLGPWRRPVAYLSKKLDPVAAGWPPCLRMVAAIAVLTKDAGKLTMGQPLVILAPHAVEALVKQPPDRWLSNARMTHYQALLLDTDRVQFGPVVALNPATLLPLPEEGLQHDCLDILAEAHGTRSDLMDQPLPDADHTWYTDGSSFLQEGQRKAGAAVTTETEVIWARALPAGTSAQRAELIALTQALKMAEGKKLNVYTDSRYAFATAHIHGEIYRRRGWLTSEGKEIKNKDEILALLKALFLPKRLSIIHCPGHQKGNSAEARGNRMADQAAREVATRETPETSTLLAGKRTADGSEFEKRTADGSEFESPKKKAKVE

SEQ ID NO: 2311 - protein, 2105 aa, synthetic construct
MPAAKRVKLDGGDKKYSIGLDIGTNSVGWAVITDEYKVPSKKFKVLGNTDRHSIKKNLIGALLFDSGETAEATRLKRTARRRYTRRKNRICYLQEIFSNEMAKVDDSFFHRLEESFLVEEDKKHERHPIFGNIVDEVAYHEKYPTIYHLRKKLVDSTDKADLRLIYLALAHMIKFRGHFLIEGDLNPDNSDVDKLFIQLVQTYNQLFEENPINASGVDAKAILSARLSKSRRLENLIAQLPGEKKNGLFGNLIALSLGLTPNFKSNFDLAEDAKLQLSKDTYDDDLDNLLAQIGDQYADLFLAAKNLSDAILLSDILRVNTEITKAPLSASMIKRYDEHHQDLTLLKALVRQQLPEKYKEIFFDQSKNGYAGYIDGGASQEEFYKFIKPILEKMDGTEELLVKLNREDLLRKQRTFDNGSIPHQIHLGELHAILRRQEDFYPFLKDNREKIEKILTFRIPYYVGPLARGNSRFAWMTRKSEETITPWNFEEVVDKGASAQSFIERMTNFDKNLPNEKVLPKHSLLYEYFTVYNELTKVKYVTEGMRKPAFLSGEQKKAIVDLLFKTNRKVTVKQLKEDYFKKIECFDSVEISGVEDRFNASLGTYHDLLKIIKDKDFLDNEENEDILEDIVLTLTLFEDREMIEERLKTYAHLFDDKVMKQLKRRRYTGWGRLSRKLINGIRDKQSGKTILDFLKSDGFANRNFMQLIHDDSLTFKEDIQKAQVSGQGDSLHEHIANLAGSPAIKKGILQTVKVVDELVKVMGRHKPENIVIEMARENQTTQKGQKNSRERMKRIEEGIKELGSQILKEHPVENTQLQNEKLYLYYLQNGRDMYVDQELDINRLSDYDVDHIVPQSFLKDDSIDNKVLTRSDKARGKSDNVPSEEVVKKMKNYWRQLLNAKLITQRKFDNLTKAERGGLSELDKAGFIKRQLVETRQITKHVAQILDSRMNTKYDENDKLIREVKVITLKSKLVSDFRKDFQFYKVREINNYHHAHDAYLNAVVGTALIKKYPKLESEFVYGDYKVYDVRKMIAKSEQEIGKATAKYFFYSNIMNFFKTEITLANGEIRKRPLIETNGETGEIVWDKGRDFATVRKVLSMPQVNIVKKTEVQTGGFSKESILPKRNSDKLIARKKDWDPKKYGGFDSPTVAYSVLVVAKVEKGKSKKLKSVKELLGITIMERSSFEKNPIDFLEAKGYKEVKKDLIIKLPKYSLFELENGRKRMLASAGELQKGNELALPSKYVNFLYLASHYEKLKGSPEDNEQKQLFVEQHKHYLDEIIEQISEFSKRVILADANLDKVLSAYNKHRDKPIREQAENIIHLFTLTNLGAPAAFKYFDTTIDRKRYTSTKEVLDATLIHQSITGLYETRIDLSQLGGDGGGGGGSGGGGSGGGGSGGGGSGGTLNIEDEYRLHETSKEPDVSLGSTWLSDFPQAWAETGGMGLAVRQAPLIIPLKATSTPVSIKQYPMSQEARLGIKPHIQRLLDQGILVPCQSPWNTPLLPVKKPGTNDYRPVQDLREVNKRVEDIHPTVPNPYNLLSGLPPSHQWYTVLDLKDAFFCLRLHPTSQPLFAFEWRDPEMGISGQLTWTRLPQGFKNSPTLFNEALHRDLAGFRIQHPDLILLQYVDDLLLAATSELDCQQGTRALLQTLGDLGYRASAKKAQICQKQVKYLGYLLKEGQRWLTEARKETVMGQPIPKTPRQLREFLGKAGFCRLFIPGFAEMAAPLYPLTKPGTLFNWGPDQQKAFQEIKQALLTAPALGLPDLTKPFELFVDEKQGYAKGVLTQKLGPWRRPVAYLSKKLDPVAAGWPPCLRMVAAIAVLTKDAGKLTMGQPLVILAPHAVEALVKQPPDRWLSNARMTHYQALLLDTDRVQFGPVVALNPATLLPLPEEGLQHDCLDILAEAHGTRSDLMDQPLPDADHTWYTDGSSFLQEGQRKAGAAVTTETEVIWARALPAGTSAQRAELIALTQALKMAEGKKLNVYTDSRYAFATAHIHGEIYRRRGWLTSEGKEIKNKDEILALLKALFLPKRLSIIHCPGHQKGNSAEARGNRMADQAAREVATRETPETSTLLAGKRTADGSEFEKRTADGSEFESPKKKAKVE

SEQ ID NO: 2312 - protein, 2094 aa, synthetic construct
MPAAKRVKLDGGDKKYSIGLDIGTNSVGWAVITDEYKVPSKKFKVLGNTDRHSIKKNLIGALLFDSGETAEATRLKRTARRRYTRRKNRICYLQEIFSNEMAKVDDSFFHRLEESFLVEEDKKHERHPIFGNIVDEVAYHEKYPTIYHLRKKLVDSTDKADLRLIYLALAHMIKFRGHFLIEGDLNPDNSDVDKLFIQLVQTYNQLFEENPINASGVDAKAILSARLSKSRRLENLIAQLPGEKKNGLFGNLIALSLGLTPNFKSNFDLAEDAKLQLSKDTYDDDLDNLLAQIGDQYADLFLAAKNLSDAILLSDILRVNTEITKAPLSASMIKRYDEHHQDLTLLKALVRQQLPEKYKEIFFDQSKNGYAGYIDGGASQEEFYKFIKPILEKMDGTEELLVKLNREDLLRKQRTFDNGSIPHQIHLGELHAILRRQEDFYPFLKDNREKIEKILTFRIPYYVGPLARGNSRFAWMTRKSEETITPWNFEEVVDKGASAQSFIERMTNFDKNLPNEKVLPKHSLLYEYFTVYNELTKVKYVTEGMRKPAFLSGEQKKAIVDLLFKTNRKVTVKQLKEDYFKKIECFDSVEISGVEDRFNASLGTYHDLLKIIKDKDFLDNEENEDILEDIVLTLTLFEDREMIEERLKTYAHLFDDKVMKQLKRRRYTGWGRLSRKLINGIRDKQSGKTILDFLKSDGFANRNFMQLIHDDSLTFKEDIQKAQVSGQGDSLHEHIANLAGSPAIKKGILQTVKVVDELVKVMGRHKPENIVIEMARENQTTQKGQKNSRERMKRIEEGIKELGSQILKEHPVENTQLQNEKLYLYYLQNGRDMYVDQELDINRLSDYDVDHIVPQSFLKDDSIDNKVLTRSDKARGKSDNVPSEEVVKKMKNYWRQLLNAKLITQRKFDNLTKAERGGLSELDKAGFIKRQLVETRQITKHVAQILDSRMNTKYDENDKLIREVKVITLKSKLVSDFRKDFQFYKVREINNYHHAHDAYLNAVVGTALIKKYPKLESEFVYGDYKVYDVRKMIAKSEQEIGKATAKYFFYSNIMNFFKTEITLANGEIRKRPLIETNGETGEIVWDKGRDFATVRKVLSMPQVNIVKKTEVQTGGFSKESILPKRNSDKLIARKKDWDPKKYGGFDSPTVAYSVLVVAKVEKGKSKKLKSVKELLGITIMERSSFEKNPIDFLEAKGYKEVKKDLIIKLPKYSLFELENGRKRMLASAGELQKGNELALPSKYVNFLYLASHYEKLKGSPEDNEQKQLFVEQHKHYLDEIIEQISEFSKRVILADANLDKVLSAYNKHRDKPIREQAENIIHLFTLTNLGAPAAFKYFDTTIDRKRYTSTKEVLDATLIHQSITGLYETRIDLSQLGGDGGGGGGGSGSSGGTLNIEDEYRLHETSKEPDVSLGSTWLSDFPQAWAETGGMGLAVRQAPLIIPLKATSTPVSIKQYPMSQEARLGIKPHIQRLLDQGILVPCQSPWNTPLLPVKKPGTNDYRPVQDLREVNKRVEDIHPTVPNPYNLLSGLPPSHQWYTVLDLKDAFFCLRLHPTSQPLFAFEWRDPEMGISGQLTWTRLPQGFKNSPTLFNEALHRDLAGFRIQHPDLILLQYVDDLLLAATSELDCQQGTRALLQTLGDLGYRASAKKAQICQKQVKYLGYLLKEGQRWLTEARKETVMGQPIPKTPRQLREFLGKAGFCRLFIPGFAEMAAPLYPLTKPGTLFNWGPDQQKAFQEIKQALLTAPALGLPDLTKPFELFVDEKQGYAKGVLTQKLGPWRRPVAYLSKKLDPVAAGWPPCLRMVAAIAVLTKDAGKLTMGQPLVILAPHAVEALVKQPPDRWLSNARMTHYQALLLDTDRVQFGPVVALNPATLLPLPEEGLQHDCLDILAEAHGTRSDLMDQPLPDADHTWYTDGSSFLQEGQRKAGAAVTTETEVIWARALPAGTSAQRAELIALTQALKMAEGKKLNVYTDSRYAFATAHIHGEIYRRRGWLTSEGKEIKNKDEILALLKALFLPKRLSIIHCPGHQKGNSAEARGNRMADQAAREVATRETPETSTLLAGKRTADGSEFEKRTADGSEFESPKKKAKVE

SEQ ID NO: 2313 - protein, 2097 aa, synthetic construct
MPAAKRVKLDGGDKKYSIGLDIGTNSVGWAVITDEYKVPSKKFKVLGNTDRHSIKKNLIGALLFDSGETAEATRLKRTARRRYTRRKNRICYLQEIFSNEMAKVDDSFFHRLEESFLVEEDKKHERHPIFGNIVDEVAYHEKYPTIYHLRKKLVDSTDKADLRLIYLALAHMIKFRGHFLIEGDLNPDNSDVDKLFIQLVQTYNQLFEENPINASGVDAKAILSARLSKSRRLENLIAQLPGEKKNGLFGNLIALSLGLTPNFKSNFDLAEDAKLQLSKDTYDDDLDNLLAQIGDQYADLFLAAKNLSDAILLSDILRVNTEITKAPLSASMIKRYDEHHQDLTLLKALVRQQLPEKYKEIFFDQSKNGYAGYIDGGASQEEFYKFIKPILEKMDGTEELLVKLNREDLLRKQRTFDNGSIPHQIHLGELHAILRRQEDFYPFLKDNREKIEKILTFRIPYYVGPLARGNSRFAWMTRKSEETITPWNFEEVVDKGASAQSFIERMTNFDKNLPNEKVLPKHSLLYEYFTVYNELTKVKYVTEGMRKPAFLSGEQKKAIVDLLFKTNRKVTVKQLKEDYFKKIECFDSVEISGVEDRFNASLGTYHDLLKIIKDKDFLDNEENEDILEDIVLTLTLFEDREMIEERLKTYAHLFDDKVMKQLKRRRYTGWGRLSRKLINGIRDKQSGKTILDFLKSDGFANRNFMQLIHDDSLTFKEDIQKAQVSGQGDSLHEHIANLAGSPAIKKGILQTVKVVDELVKVMGRHKPENIVIEMARENQTTQKGQKNSRERMKRIEEGIKELGSQILKEHPVENTQLQNEKLYLYYLQNGRDMYVDQELDINRLSDYDVDHIVPQSFLKDDSIDNKVLTRSDKARGKSDNVPSEEVVKKMKNYWRQLLNAKLITQRKFDNLTKAERGGLSELDKAGFIKRQLVETRQITKHVAQILDSRMNTKYDENDKLIREVKVITLKSKLVSDFRKDFQFYKVREINNYHHAHDAYLNAVVGTALIKKYPKLESEFVYGDYKVYDVRKMIAKSEQEIGKATAKYFFYSNIMNFFKTEITLANGEIRKRPLIETNGETGEIVWDKGRDFATVRKVLSMPQVNIVKKTEVQTGGFSKESILPKRNSDKLIARKKDWDPKKYGGFDSPTVAYSVLVVAKVEKGKSKKLKSVKELLGITIMERSSFEKNPIDFLEAKGYKEVKKDLIIKLPKYSLFELENGRKRMLASAGELQKGNELALPSKYVNFLYLASHYEKLKGSPEDNEQKQLFVEQHKHYLDEIIEQISEFSKRVILADANLDKVLSAYNKHRDKPIREQAENIIHLFTLTNLGAPAAFKYFDTTIDRKRYTSTKEVLDATLIHQSITGLYETRIDLSQLGGDGGGSAGSAAGSGEFGGTLNIEDEYRLHETSKEPDVSLGSTWLSDFPQAWAETGGMGLAVRQAPLIIPLKATSTPVSIKQYPMSQEARLGIKPHIQRLLDQGILVPCQSPWNTPLLPVKKPGTNDYRPVQDLREVNKRVEDIHPTVPNPYNLLSGLPPSHQWYTVLDLKDAFFCLRLHPTSQPLFAFEWRDPEMGISGQLTWTRLPQGFKNSPTLFNEALHRDLAGFRIQHPDLILLQYVDDLLLAATSELDCQQGTRALLQTLGDLGYRASAKKAQICQKQVKYLGYLLKEGQRWLTEARKETVMGQPIPKTPRQLREFLGKAGFCRLFIPGFAEMAAPLYPLTKPGTLFNWGPDQQKAFQEIKQALLTAPALGLPDLTKPFELFVDEKQGYAKGVLTQKLGPWRRPVAYLSKKLDPVAAGWPPCLRMVAAIAVLTKDAGKLTMGQPLVILAPHAVEALVKQPPDRWLSNARMTHYQALLLDTDRVQFGPVVALNPATLLPLPEEGLQHDCLDILAEAHGTRSDLMDQPLPDADHTWYTDGSSFLQEGQRKAGAAVTTETEVIWARALPAGTSAQRAELIALTQALKMAEGKKLNVYTDSRYAFATAHIHGEIYRRRGWLTSEGKEIKNKDEILALLKALFLPKRLSIIHCPGHQKGNSAEARGNRMADQAAREVATRETPETSTLLAGKRTADGSEFEKRTADGSEFESPKKKAKVE

SEQ ID NO: 2314 - protein, 2096 aa, synthetic construct
MPAAKRVKLDGGDKKYSIGLDIGTNSVGWAVITDEYKVPSKKFKVLGNTDRHSIKKNLIGALLFDSGETAEATRLKRTARRRYTRRKNRICYLQEIFSNEMAKVDDSFFHRLEESFLVEEDKKHERHPIFGNIVDEVAYHEKYPTIYHLRKKLVDSTDKADLRLIYLALAHMIKFRGHFLIEGDLNPDNSDVDKLFIQLVQTYNQLFEENPINASGVDAKAILSARLSKSRRLENLIAQLPGEKKNGLFGNLIALSLGLTPNFKSNFDLAEDAKLQLSKDTYDDDLDNLLAQIGDQYADLFLAAKNLSDAILLSDILRVNTEITKAPLSASMIKRYDEHHQDLTLLKALVRQQLPEKYKEIFFDQSKNGYAGYIDGGASQEEFYKFIKPILEKMDGTEELLVKLNREDLLRKQRTFDNGSIPHQIHLGELHAILRRQEDFYPFLKDNREKIEKILTFRIPYYVGPLARGNSRFAWMTRKSEETITPWNFEEVVDKGASAQSFIERMTNFDKNLPNEKVLPKHSLLYEYFTVYNELTKVKYVTEGMRKPAFLSGEQKKAIVDLLFKTNRKVTVKQLKEDYFKKIECFDSVEISGVEDRFNASLGTYHDLLKIIKDKDFLDNEENEDILEDIVLTLTLFEDREMIEERLKTYAHLFDDKVMKQLKRRRYTGWGRLSRKLINGIRDKQSGKTILDFLKSDGFANRNFMQLIHDDSLTFKEDIQKAQVSGQGDSLHEHIANLAGSPAIKKGILQTVKVVDELVKVMGRHKPENIVIEMARENQTTQKGQKNSRERMKRIEEGIKELGSQILKEHPVENTQLQNEKLYLYYLQNGRDMYVDQELDINRLSDYDVDHIVPQSFLKDDSIDNKVLTRSDKARGKSDNVPSEEVVKKMKNYWRQLLNAKLITQRKFDNLTKAERGGLSELDKAGFIKRQLVETRQITKHVAQILDSRMNTKYDENDKLIREVKVITLKSKLVSDFRKDFQFYKVREINNYHHAHDAYLNAVVGTALIKKYPKLESEFVYGDYKVYDVRKMIAKSEQEIGKATAKYFFYSNIMNFFKTEITLANGEIRKRPLIETNGETGEIVWDKGRDFATVRKVLSMPQVNIVKKTEVQTGGFSKESILPKRNSDKLIARKKDWDPKKYGGFDSPTVAYSVLVVAKVEKGKSKKLKSVKELLGITIMERSSFEKNPIDFLEAKGYKEVKKDLIIKLPKYSLFELENGRKRMLASAGELQKGNELALPSKYVNFLYLASHYEKLKGSPEDNEQKQLFVEQHKHYLDEIIEQISEFSKRVILADANLDKVLSAYNKHRDKPIREQAENIIHLFTLTNLGAPAAFKYFDTTIDRKRYTSTKEVLDATLIHQSITGLYETRIDLSQLGGDGGPAPEAAAKGGSGGTLNIEDEYRLHETSKEPDVSLGSTWLSDFPQAWAETGGMGLAVRQAPLIIPLKATSTPVSIKQYPMSQEARLGIKPHIQRLLDQGILVPCQSPWNTPLLPVKKPGTNDYRPVQDLREVNKRVEDIHPTVPNPYNLLSGLPPSHQWYTVLDLKDAFFCLRLHPTSQPLFAFEWRDPEMGISGQLTWTRLPQGFKNSPTLFNEALHRDLAGFRIQHPDLILLQYVDDLLLAATSELDCQQGTRALLQTLGDLGYRASAKKAQICQKQVKYLGYLLKEGQRWLTEARKETVMGQPIPKTPRQLREFLGKAGFCRLFIPGFAEMAAPLYPLTKPGTLFNWGPDQQKAFQEIKQALLTAPALGLPDLTKPFELFVDEKQGYAKGVLTQKLGPWRRPVAYLSKKLDPVAAGWPPCLRMVAAIAVLTKDAGKLTMGQPLVILAPHAVEALVKQPPDRWLSNARMTHYQALLLDTDRVQFGPVVALNPATLLPLPEEGLQHDCLDILAEAHGTRSDLMDQPLPDADHTWYTDGSSFLQEGQRKAGAAVTTETEVIWARALPAGTSAQRAELIALTQALKMAEGKKLNVYTDSRYAFATAHIHGEIYRRRGWLTSEGKEIKNKDEILALLKALFLPKRLSIIHCPGHQKGNSAEARGNRMADQAAREVATRETPETSTLLAGKRTADGSEFEKRTADGSEFESPKKKAKVE

SEQ ID NO: 2315 - protein, 2096 aa, synthetic construct
MPAAKRVKLDGGDKKYSIGLDIGTNSVGWAVITDEYKVPSKKFKVLGNTDRHSIKKNLIGALLFDSGETAEATRLKRTARRRYTRRKNRICYLQEIFSNEMAKVDDSFFHRLEESFLVEEDKKHERHPIFGNIVDEVAYHEKYPTIYHLRKKLVDSTDKADLRLIYLALAHMIKFRGHFLIEGDLNPDNSDVDKLFIQLVQTYNQLFEENPINASGVDAKAILSARLSKSRRLENLIAQLPGEKKNGLFGNLIALSLGLTPNFKSNFDLAEDAKLQLSKDTYDDDLDNLLAQIGDQYADLFLAAKNLSDAILLSDILRVNTEITKAPLSASMIKRYDEHHQDLTLLKALVRQQLPEKYKEIFFDQSKNGYAGYIDGGASQEEFYKFIKPILEKMDGTEELLVKLNREDLLRKQRTFDNGSIPHQIHLGELHAILRRQEDFYPFLKDNREKIEKILTFRIPYYVGPLARGNSRFAWMTRKSEETITPWNFEEVVDKGASAQSFIERMTNFDKNLPNEKVLPKHSLLYEYFTVYNELTKVKYVTEGMRKPAFLSGEQKKAIVDLLFKTNRKVTVKQLKEDYFKKIECFDSVEISGVEDRFNASLGTYHDLLKIIKDKDFLDNEENEDILEDIVLTLTLFEDREMIEERLKTYAHLFDDKVMKQLKRRRYTGWGRLSRKLINGIRDKQSGKTILDFLKSDGFANRNFMQLIHDDSLTFKEDIQKAQVSGQGDSLHEHIANLAGSPAIKKGILQTVKVVDELVKVMGRHKPENIVIEMARENQTTQKGQKNSRERMKRIEEGIKELGSQILKEHPVENTQLQNEKLYLYYLQNGRDMYVDQELDINRLSDYDVDHIVPQSFLKDDSIDNKVLTRSDKARGKSDNVPSEEVVKKMKNYWRQLLNAKLITQRKFDNLTKAERGGLSELDKAGFIKRQLVETRQITKHVAQILDSRMNTKYDENDKLIREVKVITLKSKLVSDFRKDFQFYKVREINNYHHAHDAYLNAVVGTALIKKYPKLESEFVYGDYKVYDVRKMIAKSEQEIGKATAKYFFYSNIMNFFKTEITLANGEIRKRPLIETNGETGEIVWDKGRDFATVRKVLSMPQVNIVKKTEVQTGGFSKESILPKRNSDKLIARKKDWDPKKYGGFDSPTVAYSVLVVAKVEKGKSKKLKSVKELLGITIMERSSFEKNPIDFLEAKGYKEVKKDLIIKLPKYSLFELENGRKRMLASAGELQKGNELALPSKYVNFLYLASHYEKLKGSPEDNEQKQLFVEQHKHYLDEIIEQISEFSKRVILADANLDKVLSAYNKHRDKPIREQAENIIHLFTLTNLGAPAAFKYFDTTIDRKRYTSTKEVLDATLIHQSITGLYETRIDLSQLGGDGGEAAAKPAPGGSGGTLNIEDEYRLHETSKEPDVSLGSTWLSDFPQAWAETGGMGLAVRQAPLIIPLKATSTPVSIKQYPMSQEARLGIKPHIQRLLDQGILVPCQSPWNTPLLPVKKPGTNDYRPVQDLREVNKRVEDIHPTVPNPYNLLSGLPPSHQWYTVLDLKDAFFCLRLHPTSQPLFAFEWRDPEMGISGQLTWTRLPQGFKNSPTLFNEALHRDLAGFRIQHPDLILLQYVDDLLLAATSELDCQQGTRALLQTLGDLGYRASAKKAQICQKQVKYLGYLLKEGQRWLTEARKETVMGQPIPKTPRQLREFLGKAGFCRLFIPGFAEMAAPLYPLTKPGTLFNWGPDQQKAFQEIKQALLTAPALGLPDLTKPFELFVDEKQGYAKGVLTQKLGPWRRPVAYLSKKLDPVAAGWPPCLRMVAAIAVLTKDAGKLTMGQPLVILAPHAVEALVKQPPDRWLSNARMTHYQALLLDTDRVQFGPVVALNPATLLPLPEEGLQHDCLDILAEAHGTRSDLMDQPLPDADHTWYTDGSSFLQEGQRKAGAAVTTETEVIWARALPAGTSAQRAELIALTQALKMAEGKKLNVYTDSRYAFATAHIHGEIYRRRGWLTSEGKEIKNKDEILALLKALFLPKRLSIIHCPGHQKGNSAEARGNRMADQAAREVATRETPETSTLLAGKRTADGSEFEKRTADGSEFESPKKKAKVE

SEQ ID NO: 2316 - protein, 2096 aa, synthetic construct
MPAAKRVKLDGGDKKYSIGLDIGTNSVGWAVITDEYKVPSKKFKVLGNTDRHSIKKNLIGALLFDSGETAEATRLKRTARRRYTRRKNRICYLQEIFSNEMAKVDDSFFHRLEESFLVEEDKKHERHPIFGNIVDEVAYHEKYPTIYHLRKKLVDSTDKADLRLIYLALAHMIKFRGHFLIEGDLNPDNSDVDKLFIQLVQTYNQLFEENPINASGVDAKAILSARLSKSRRLENLIAQLPGEKKNGLFGNLIALSLGLTPNFKSNFDLAEDAKLQLSKDTYDDDLDNLLAQIGDQYADLFLAAKNLSDAILLSDILRVNTEITKAPLSASMIKRYDEHHQDLTLLKALVRQQLPEKYKEIFFDQSKNGYAGYIDGGASQEEFYKFIKPILEKMDGTEELLVKLNREDLLRKQRTFDNGSIPHQIHLGELHAILRRQEDFYPFLKDNREKIEKILTFRIPYYVGPLARGNSRFAWMTRKSEETITPWNFEEVVDKGASAQSFIERMTNFDKNLPNEKVLPKHSLLYEYFTVYNELTKVKYVTEGMRKPAFLSGEQKKAIVDLLFKTNRKVTVKQLKEDYFKKIECFDSVEISGVEDRFNASLGTYHDLLKIIKDKDFLDNEENEDILEDIVLTLTLFEDREMIEERLKTYAHLFDDKVMKQLKRRRYTGWGRLSRKLINGIRDKQSGKTILDFLKSDGFANRNFMQLIHDDSLTFKEDIQKAQVSGQGDSLHEHIANLAGSPAIKKGILQTVKVVDELVKVMGRHKPENIVIEMARENQTTQKGQKNSRERMKRIEEGIKELGSQILKEHPVENTQLQNEKLYLYYLQNGRDMYVDQELDINRLSDYDVDHIVPQSFLKDDSIDNKVLTRSDKARGKSDNVPSEEVVKKMKNYWRQLLNAKLITQRKFDNLTKAERGGLSELDKAGFIKRQLVETRQITKHVAQILDSRMNTKYDENDKLIREVKVITLKSKLVSDFRKDFQFYKVREINNYHHAHDAYLNAVVGTALIKKYPKLESEFVYGDYKVYDVRKMIAKSEQEIGKATAKYFFYSNIMNFFKTEITLANGEIRKRPLIETNGETGEIVWDKGRDFATVRKVLSMPQVNIVKKTEVQTGGFSKESILPKRNSDKLIARKKDWDPKKYGGFDSPTVAYSVLVVAKVEKGKSKKLKSVKELLGITIMERSSFEKNPIDFLEAKGYKEVKKDLIIKLPKYSLFELENGRKRMLASAGELQKGNELALPSKYVNFLYLASHYEKLKGSPEDNEQKQLFVEQHKHYLDEIIEQISEFSKRVILADANLDKVLSAYNKHRDKPIREQAENIIHLFTLTNLGAPAAFKYFDTTIDRKRYTSTKEVLDATLIHQSITGLYETRIDLSQLGGDGGGGGEAAAKGSSGGTLNIEDEYRLHETSKEPDVSLGSTWLSDFPQAWAETGGMGLAVRQAPLIIPLKATSTPVSIKQYPMSQEARLGIKPHIQRLLDQGILVPCQSPWNTPLLPVKKPGTNDYRPVQDLREVNKRVEDIHPTVPNPYNLLSGLPPSHQWYTVLDLKDAFFCLRLHPTSQPLFAFEWRDPEMGISGQLTWTRLPQGFKNSPTLFNEALHRDLAGFRIQHPDLILLQYVDDLLLAATSELDCQQGTRALLQTLGDLGYRASAKKAQICQKQVKYLGYLLKEGQRWLTEARKETVMGQPIPKTPRQLREFLGKAGFCRLFIPGFAEMAAPLYPLTKPGTLFNWGPDQQKAFQEIKQALLTAPALGLPDLTKPFELFVDEKQGYAKGVLTQKLGPWRRPVAYLSKKLDPVAAGWPPCLRMVAAIAVLTKDAGKLTMGQPLVILAPHAVEALVKQPPDRWLSNARMTHYQALLLDTDRVQFGPVVALNPATLLPLPEEGLQHDCLDILAEAHGTRSDLMDQPLPDADHTWYTDGSSFLQEGQRKAGAAVTTETEVIWARALPAGTSAQRAELIALTQALKMAEGKKLNVYTDSRYAFATAHIHGEIYRRRGWLTSEGKEIKNKDEILALLKALFLPKRLSIIHCPGHQKGNSAEARGNRMADQAAREVATRETPETSTLLAGKRTADGSEFEKRTADGSEFESPKKKAKVE

SEQ ID NO: 2317 - protein, 2094 aa, synthetic construct
MPAAKRVKLDGGDKKYSIGLDIGTNSVGWAVITDEYKVPSKKFKVLGNTDRHSIKKNLIGALLFDSGETAEATRLKRTARRRYTRRKNRICYLQEIFSNEMAKVDDSFFHRLEESFLVEEDKKHERHPIFGNIVDEVAYHEKYPTIYHLRKKLVDSTDKADLRLIYLALAHMIKFRGHFLIEGDLNPDNSDVDKLFIQLVQTYNQLFEENPINASGVDAKAILSARLSKSRRLENLIAQLPGEKKNGLFGNLIALSLGLTPNFKSNFDLAEDAKLQLSKDTYDDDLDNLLAQIGDQYADLFLAAKNLSDAILLSDILRVNTEITKAPLSASMIKRYDEHHQDLTLLKALVRQQLPEKYKEIFFDQSKNGYAGYIDGGASQEEFYKFIKPILEKMDGTEELLVKLNREDLLRKQRTFDNGSIPHQIHLGELHAILRRQEDFYPFLKDNREKIEKILTFRIPYYVGPLARGNSRFAWMTRKSEETITPWNFEEVVDKGASAQSFIERMTNFDKNLPNEKVLPKHSLLYEYFTVYNELTKVKYVTEGMRKPAFLSGEQKKAIVDLLFKTNRKVTVKQLKEDYFKKIECFDSVEISGVEDRFNASLGTYHDLLKIIKDKDFLDNEENEDILEDIVLTLTLFEDREMIEERLKTYAHLFDDKVMKQLKRRRYTGWGRLSRKLINGIRDKQSGKTILDFLKSDGFANRNFMQLIHDDSLTFKEDIQKAQVSGQGDSLHEHIANLAGSPAIKKGILQTVKVVDELVKVMGRHKPENIVIEMARENQTTQKGQKNSRERMKRIEEGIKELGSQILKEHPVENTQLQNEKLYLYYLQNGRDMYVDQELDINRLSDYDVDHIVPQSFLKDDSIDNKVLTRSDKARGKSDNVPSEEVVKKMKNYWRQLLNAKLITQRKFDNLTKAERGGLSELDKAGFIKRQLVETRQITKHVAQILDSRMNTKYDENDKLIREVKVITLKSKLVSDFRKDFQFYKVREINNYHHAHDAYLNAVVGTALIKKYPKLESEFVYGDYKVYDVRKMIAKSEQEIGKATAKYFFYSNIMNFFKTEITLANGEIRKRPLIETNGETGEIVWDKGRDFATVRKVLSMPQVNIVKKTEVQTGGFSKESILPKRNSDKLIARKKDWDPKKYGGFDSPTVAYSVLVVAKVEKGKSKKLKSVKELLGITIMERSSFEKNPIDFLEAKGYKEVKKDLIIKLPKYSLFELENGRKRMLASAGELQKGNELALPSKYVNFLYLASHYEKLKGSPEDNEQKQLFVEQHKHYLDEIIEQISEFSKRVILADANLDKVLSAYNKHRDKPIREQAENIIHLFTLTNLGAPAAFKYFDTTIDRKRYTSTKEVLDATLIHQSITGLYETRIDLSQLGGDGGGGSGGGPAPGGTLNIEDEYRLHETSKEPDVSLGSTWLSDFPQAWAETGGMGLAVRQAPLIIPLKATSTPVSIKQYPMSQEARLGIKPHIQRLLDQGILVPCQSPWNTPLLPVKKPGTNDYRPVQDLREVNKRVEDIHPTVPNPYNLLSGLPPSHQWYTVLDLKDAFFCLRLHPTSQPLFAFEWRDPEMGISGQLTWTRLPQGFKNSPTLFNEALHRDLAGFRIQHPDLILLQYVDDLLLAATSELDCQQGTRALLQTLGDLGYRASAKKAQICQKQVKYLGYLLKEGQRWLTEARKETVMGQPIPKTPRQLREFLGKAGFCRLFIPGFAEMAAPLYPLTKPGTLFNWGPDQQKAFQEIKQALLTAPALGLPDLTKPFELFVDEKQGYAKGVLTQKLGPWRRPVAYLSKKLDPVAAGWPPCLRMVAAIAVLTKDAGKLTMGQPLVILAPHAVEALVKQPPDRWLSNARMTHYQALLLDTDRVQFGPVVALNPATLLPLPEEGLQHDCLDILAEAHGTRSDLMDQPLPDADHTWYTDGSSFLQEGQRKAGAAVTTETEVIWARALPAGTSAQRAELIALTQALKMAEGKKLNVYTDSRYAFATAHIHGEIYRRRGWLTSEGKEIKNKDEILALLKALFLPKRLSIIHCPGHQKGNSAEARGNRMADQAAREVATRETPETSTLLAGKRTADGSEFEKRTADGSEFESPKKKAKVE

SEQ ID NO: 2318 - protein, 2094 aa, synthetic construct
MPAAKRVKLDGGDKKYSIGLDIGTNSVGWAVITDEYKVPSKKFKVLGNTDRHSIKKNLIGALLFDSGETAEATRLKRTARRRYTRRKNRICYLQEIFSNEMAKVDDSFFHRLEESFLVEEDKKHERHPIFGNIVDEVAYHEKYPTIYHLRKKLVDSTDKADLRLIYLALAHMIKFRGHFLIEGDLNPDNSDVDKLFIQLVQTYNQLFEENPINASGVDAKAILSARLSKSRRLENLIAQLPGEKKNGLFGNLIALSLGLTPNFKSNFDLAEDAKLQLSKDTYDDDLDNLLAQIGDQYADLFLAAKNLSDAILLSDILRVNTEITKAPLSASMIKRYDEHHQDLTLLKALVRQQLPEKYKEIFFDQSKNGYAGYIDGGASQEEFYKFIKPILEKMDGTEELLVKLNREDLLRKQRTFDNGSIPHQIHLGELHAILRRQEDFYPFLKDNREKIEKILTFRIPYYVGPLARGNSRFAWMTRKSEETITPWNFEEVVDKGASAQSFIERMTNFDKNLPNEKVLPKHSLLYEYFTVYNELTKVKYVTEGMRKPAFLSGEQKKAIVDLLFKTNRKVTVKQLKEDYFKKIECFDSVEISGVEDRFNASLGTYHDLLKIIKDKDFLDNEENEDILEDIVLTLTLFEDREMIEERLKTYAHLFDDKVMKQLKRRRYTGWGRLSRKLINGIRDKQSGKTILDFLKSDGFANRNFMQLIHDDSLTFKEDIQKAQVSGQGDSLHEHIANLAGSPAIKKGILQTVKVVDELVKVMGRHKPENIVIEMARENQTTQKGQKNSRERMKRIEEGIKELGSQILKEHPVENTQLQNEKLYLYYLQNGRDMYVDQELDINRLSDYDVDHIVPQSFLKDDSIDNKVLTRSDKARGKSDNVPSEEVVKKMKNYWRQLLNAKLITQRKFDNLTKAERGGLSELDKAGFIKRQLVETRQITKHVAQILDSRMNTKYDENDKLIREVKVITLKSKLVSDFRKDFQFYKVREINNYHHAHDAYLNAVVGTALIKKYPKLESEFVYGDYKVYDVRKMIAKSEQEIGKATAKYFFYSNIMNFFKTEITLANGEIRKRPLIETNGETGEIVWDKGRDFATVRKVLSMPQVNIVKKTEVQTGGFSKESILPKRNSDKLIARKKDWDPKKYGGFDSPTVAYSVLVVAKVEKGKSKKLKSVKELLGITIMERSSFEKNPIDFLEAKGYKEVKKDLIIKLPKYSLFELENGRKRMLASAGELQKGNELALPSKYVNFLYLASHYEKLKGSPEDNEQKQLFVEQHKHYLDEIIEQISEFSKRVILADANLDKVLSAYNKHRDKPIREQAENIIHLFTLTNLGAPAAFKYFDTTIDRKRYTSTKEVLDATLIHQSITGLYETRIDLSQLGGDGGPAPAPAPAPGGTLNIEDEYRLHETSKEPDVSLGSTWLSDFPQAWAETGGMGLAVRQAPLIIPLKATSTPVSIKQYPMSQEARLGIKPHIQRLLDQGILVPCQSPWNTPLLPVKKPGTNDYRPVQDLREVNKRVEDIHPTVPNPYNLLSGLPPSHQWYTVLDLKDAFFCLRLHPTSQPLFAFEWRDPEMGISGQLTWTRLPQGFKNSPTLFNEALHRDLAGFRIQHPDLILLQYVDDLLLAATSELDCQQGTRALLQTLGDLGYRASAKKAQICQKQVKYLGYLLKEGQRWLTEARKETVMGQPIPKTPRQLREFLGKAGFCRLFIPGFAEMAAPLYPLTKPGTLFNWGPDQQKAFQEIKQALLTAPALGLPDLTKPFELFVDEKQGYAKGVLTQKLGPWRRPVAYLSKKLDPVAAGWPPCLRMVAAIAVLTKDAGKLTMGQPLVILAPHAVEALVKQPPDRWLSNARMTHYQALLLDTDRVQFGPVVALNPATLLPLPEEGLQHDCLDILAEAHGTRSDLMDQPLPDADHTWYTDGSSFLQEGQRKAGAAVTTETEVIWARALPAGTSAQRAELIALTQALKMAEGKKLNVYTDSRYAFATAHIHGEIYRRRGWLTSEGKEIKNKDEILALLKALFLPKRLSIIHCPGHQKGNSAEARGNRMADQAAREVATRETPETSTLLAGKRTADGSEFEKRTADGSEFESPKKKAKVE

SEQ ID NO: 2319 - protein, 2097 aa, synthetic construct
MPAAKRVKLDGGDKKYSIGLDIGTNSVGWAVITDEYKVPSKKFKVLGNTDRHSIKKNLIGALLFDSGETAEATRLKRTARRRYTRRKNRICYLQEIFSNEMAKVDDSFFHRLEESFLVEEDKKHERHPIFGNIVDEVAYHEKYPTIYHLRKKLVDSTDKADLRLIYLALAHMIKFRGHFLIEGDLNPDNSDVDKLFIQLVQTYNQLFEENPINASGVDAKAILSARLSKSRRLENLIAQLPGEKKNGLFGNLIALSLGLTPNFKSNFDLAEDAKLQLSKDTYDDDLDNLLAQIGDQYADLFLAAKNLSDAILLSDILRVNTEITKAPLSASMIKRYDEHHQDLTLLKALVRQQLPEKYKEIFFDQSKNGYAGYIDGGASQEEFYKFIKPILEKMDGTEELLVKLNREDLLRKQRTFDNGSIPHQIHLGELHAILRRQEDFYPFLKDNREKIEKILTFRIPYYVGPLARGNSRFAWMTRKSEETITPWNFEEVVDKGASAQSFIERMTNFDKNLPNEKVLPKHSLLYEYFTVYNELTKVKYVTEGMRKPAFLSGEQKKAIVDLLFKTNRKVTVKQLKEDYFKKIECFDSVEISGVEDRFNASLGTYHDLLKIIKDKDFLDNEENEDILEDIVLTLTLFEDREMIEERLKTYAHLFDDKVMKQLKRRRYTGWGRLSRKLINGIRDKQSGKTILDFLKSDGFANRNFMQLIHDDSLTFKEDIQKAQVSGQGDSLHEHIANLAGSPAIKKGILQTVKVVDELVKVMGRHKPENIVIEMARENQTTQKGQKNSRERMKRIEEGIKELGSQILKEHPVENTQLQNEKLYLYYLQNGRDMYVDQELDINRLSDYDVDHIVPQSFLKDDSIDNKVLTRSDKARGKSDNVPSEEVVKKMKNYWRQLLNAKLITQRKFDNLTKAERGGLSELDKAGFIKRQLVETRQITKHVAQILDSRMNTKYDENDKLIREVKVITLKSKLVSDFRKDFQFYKVREINNYHHAHDAYLNAVVGTALIKKYPKLESEFVYGDYKVYDVRKMIAKSEQEIGKATAKYFFYSNIMNFFKTEITLANGEIRKRPLIETNGETGEIVWDKGRDFATVRKVLSMPQVNIVKKTEVQTGGFSKESILPKRNSDKLIARKKDWDPKKYGGFDSPTVAYSVLVVAKVEKGKSKKLKSVKELLGITIMERSSFEKNPIDFLEAKGYKEVKKDLIIKLPKYSLFELENGRKRMLASAGELQKGNELALPSKYVNFLYLASHYEKLKGSPEDNEQKQLFVEQHKHYLDEIIEQISEFSKRVILADANLDKVLSAYNKHRDKPIREQAENIIHLFTLTNLGAPAAFKYFDTTIDRKRYTSTKEVLDATLIHQSITGLYETRIDLSQLGGDGGGGSGGSGGSGGSGGTLNIEDEYRLHETSKEPDVSLGSTWLSDFPQAWAETGGMGLAVRQAPLIIPLKATSTPVSIKQYPMSQEARLGIKPHIQRLLDQGILVPCQSPWNTPLLPVKKPGTNDYRPVQDLREVNKRVEDIHPTVPNPYNLLSGLPPSHQWYTVLDLKDAFFCLRLHPTSQPLFAFEWRDPEMGISGQLTWTRLPQGFKNSPTLFNEALHRDLAGFRIQHPDLILLQYVDDLLLAATSELDCQQGTRALLQTLGDLGYRASAKKAQICQKQVKYLGYLLKEGQRWLTEARKETVMGQPIPKTPRQLREFLGKAGFCRLFIPGFAEMAAPLYPLTKPGTLFNWGPDQQKAFQEIKQALLTAPALGLPDLTKPFELFVDEKQGYAKGVLTQKLGPWRRPVAYLSKKLDPVAAGWPPCLRMVAAIAVLTKDAGKLTMGQPLVILAPHAVEALVKQPPDRWLSNARMTHYQALLLDTDRVQFGPVVALNPATLLPLPEEGLQHDCLDILAEAHGTRSDLMDQPLPDADHTWYTDGSSFLQEGQRKAGAAVTTETEVIWARALPAGTSAQRAELIALTQALKMAEGKKLNVYTDSRYAFATAHIHGEIYRRRGWLTSEGKEIKNKDEILALLKALFLPKRLSIIHCPGHQKGNSAEARGNRMADQAAREVATRETPETSTLLAGKRTADGSEFEKRTADGSEFESPKKKAKVE

SEQ ID NO: 2320 - protein, 2094 aa, synthetic construct
MPAAKRVKLDGGDKKYSIGLDIGTNSVGWAVITDEYKVPSKKFKVLGNTDRHSIKKNLIGALLFDSGETAEATRLKRTARRRYTRRKNRICYLQEIFSNEMAKVDDSFFHRLEESFLVEEDKKHERHPIFGNIVDEVAYHEKYPTIYHLRKKLVDSTDKADLRLIYLALAHMIKFRGHFLIEGDLNPDNSDVDKLFIQLVQTYNQLFEENPINASGVDAKAILSARLSKSRRLENLIAQLPGEKKNGLFGNLIALSLGLTPNFKSNFDLAEDAKLQLSKDTYDDDLDNLLAQIGDQYADLFLAAKNLSDAILLSDILRVNTEITKAPLSASMIKRYDEHHQDLTLLKALVRQQLPEKYKEIFFDQSKNGYAGYIDGGASQEEFYKFIKPILEKMDGTEELLVKLNREDLLRKQRTFDNGSIPHQIHLGELHAILRRQEDFYPFLKDNREKIEKILTFRIPYYVGPLARGNSRFAWMTRKSEETITPWNFEEVVDKGASAQSFIERMTNFDKNLPNEKVLPKHSLLYEYFTVYNELTKVKYVTEGMRKPAFLSGEQKKAIVDLLFKTNRKVTVKQLKEDYFKKIECFDSVEISGVEDRFNASLGTYHDLLKIIKDKDFLDNEENEDILEDIVLTLTLFEDREMIEERLKTYAHLFDDKVMKQLKRRRYTGWGRLSRKLINGIRDKQSGKTILDFLKSDGFANRNFMQLIHDDSLTFKEDIQKAQVSGQGDSLHEHIANLAGSPAIKKGILQTVKVVDELVKVMGRHKPENIVIEMARENQTTQKGQKNSRERMKRIEEGIKELGSQILKEHPVENTQLQNEKLYLYYLQNGRDMYVDQELDINRLSDYDVDHIVPQSFLKDDSIDNKVLTRSDKARGKSDNVPSEEVVKKMKNYWRQLLNAKLITQRKFDNLTKAERGGLSELDKAGFIKRQLVETRQITKHVAQILDSRMNTKYDENDKLIREVKVITLKSKLVSDFRKDFQFYKVREINNYHHAHDAYLNAVVGTALIKKYPKLESEFVYGDYKVYDVRKMIAKSEQEIGKATAKYFFYSNIMNFFKTEITLANGEIRKRPLIETNGETGEIVWDKGRDFATVRKVLSMPQVNIVKKTEVQTGGFSKESILPKRNSDKLIARKKDWDPKKYGGFDSPTVAYSVLVVAKVEKGKSKKLKSVKELLGITIMERSSFEKNPIDFLEAKGYKEVKKDLIIKLPKYSLFELENGRKRMLASAGELQKGNELALPSKYVNFLYLASHYEKLKGSPEDNEQKQLFVEQHKHYLDEIIEQISEFSKRVILADANLDKVLSAYNKHRDKPIREQAENIIHLFTLTNLGAPAAFKYFDTTIDRKRYTSTKEVLDATLIHQSITGLYETRIDLSQLGGDGGGGGPAPGGSGGTLNIEDEYRLHETSKEPDVSLGSTWLSDFPQAWAETGGMGLAVRQAPLIIPLKATSTPVSIKQYPMSQEARLGIKPHIQRLLDQGILVPCQSPWNTPLLPVKKPGTNDYRPVQDLREVNKRVEDIHPTVPNPYNLLSGLPPSHQWYTVLDLKDAFFCLRLHPTSQPLFAFEWRDPEMGISGQLTWTRLPQGFKNSPTLFNEALHRDLAGFRIQHPDLILLQYVDDLLLAATSELDCQQGTRALLQTLGDLGYRASAKKAQICQKQVKYLGYLLKEGQRWLTEARKETVMGQPIPKTPRQLREFLGKAGFCRLFIPGFAEMAAPLYPLTKPGTLFNWGPDQQKAFQEIKQALLTAPALGLPDLTKPFELFVDEKQGYAKGVLTQKLGPWRRPVAYLSKKLDPVAAGWPPCLRMVAAIAVLTKDAGKLTMGQPLVILAPHAVEALVKQPPDRWLSNARMTHYQALLLDTDRVQFGPVVALNPATLLPLPEEGLQHDCLDILAEAHGTRSDLMDQPLPDADHTWYTDGSSFLQEGQRKAGAAVTTETEVIWARALPAGTSAQRAELIALTQALKMAEGKKLNVYTDSRYAFATAHIHGEIYRRRGWLTSEGKEIKNKDEILALLKALFLPKRLSIIHCPGHQKGNSAEARGNRMADQAAREVATRETPETSTLLAGKRTADGSEFEKRTADGSEFESPKKKAKVE

SEQ ID NO: 2321 - protein, 2094 aa, synthetic construct
MPAAKRVKLDGGDKKYSIGLDIGTNSVGWAVITDEYKVPSKKFKVLGNTDRHSIKKNLIGALLFDSGETAEATRLKRTARRRYTRRKNRICYLQEIFSNEMAKVDDSFFHRLEESFLVEEDKKHERHPIFGNIVDEVAYHEKYPTIYHLRKKLVDSTDKADLRLIYLALAHMIKFRGHFLIEGDLNPDNSDVDKLFIQLVQTYNQLFEENPINASGVDAKAILSARLSKSRRLENLIAQLPGEKKNGLFGNLIALSLGLTPNFKSNFDLAEDAKLQLSKDTYDDDLDNLLAQIGDQYADLFLAAKNLSDAILLSDILRVNTEITKAPLSASMIKRYDEHHQDLTLLKALVRQQLPEKYKEIFFDQSKNGYAGYIDGGASQEEFYKFIKPILEKMDGTEELLVKLNREDLLRKQRTFDNGSIPHQIHLGELHAILRRQEDFYPFLKDNREKIEKILTFRIPYYVGPLARGNSRFAWMTRKSEETITPWNFEEVVDKGASAQSFIERMTNFDKNLPNEKVLPKHSLLYEYFTVYNELTKVKYVTEGMRKPAFLSGEQKKAIVDLLFKTNRKVTVKQLKEDYFKKIECFDSVEISGVEDRFNASLGTYHDLLKIIKDKDFLDNEENEDILEDIVLTLTLFEDREMIEERLKTYAHLFDDKVMKQLKRRRYTGWGRLSRKLINGIRDKQSGKTILDFLKSDGFANRNFMQLIHDDSLTFKEDIQKAQVSGQGDSLHEHIANLAGSPAIKKGILQTVKVVDELVKVMGRHKPENIVIEMARENQTTQKGQKNSRERMKRIEEGIKELGSQILKEHPVENTQLQNEKLYLYYLQNGRDMYVDQELDINRLSDYDVDHIVPQSFLKDDSIDNKVLTRSDKARGKSDNVPSEEVVKKMKNYWRQLLNAKLITQRKFDNLTKAERGGLSELDKAGFIKRQLVETRQITKHVAQILDSRMNTKYDENDKLIREVKVITLKSKLVSDFRKDFQFYKVREINNYHHAHDAYLNAVVGTALIKKYPKLESEFVYGDYKVYDVRKMIAKSEQEIGKATAKYFFYSNIMNFFKTEITLANGEIRKRPLIETNGETGEIVWDKGRDFATVRKVLSMPQVNIVKKTEVQTGGFSKESILPKRNSDKLIARKKDWDPKKYGGFDSPTVAYSVLVVAKVEKGKSKKLKSVKELLGITIMERSSFEKNPIDFLEAKGYKEVKKDLIIKLPKYSLFELENGRKRMLASAGELQKGNELALPSKYVNFLYLASHYEKLKGSPEDNEQKQLFVEQHKHYLDEIIEQISEFSKRVILADANLDKVLSAYNKHRDKPIREQAENIIHLFTLTNLGAPAAFKYFDTTIDRKRYTSTKEVLDATLIHQSITGLYETRIDLSQLGGDGGPAPGGSGSSGGTLNIEDEYRLHETSKEPDVSLGSTWLSDFPQAWAETGGMGLAVRQAPLIIPLKATSTPVSIKQYPMSQEARLGIKPHIQRLLDQGILVPCQSPWNTPLLPVKKPGTNDYRPVQDLREVNKRVEDIHPTVPNPYNLLSGLPPSHQWYTVLDLKDAFFCLRLHPTSQPLFAFEWRDPEMGISGQLTWTRLPQGFKNSPTLFNEALHRDLAGFRIQHPDLILLQYVDDLLLAATSELDCQQGTRALLQTLGDLGYRASAKKAQICQKQVKYLGYLLKEGQRWLTEARKETVMGQPIPKTPRQLREFLGKAGFCRLFIPGFAEMAAPLYPLTKPGTLFNWGPDQQKAFQEIKQALLTAPALGLPDLTKPFELFVDEKQGYAKGVLTQKLGPWRRPVAYLSKKLDPVAAGWPPCLRMVAAIAVLTKDAGKLTMGQPLVILAPHAVEALVKQPPDRWLSNARMTHYQALLLDTDRVQFGPVVALNPATLLPLPEEGLQHDCLDILAEAHGTRSDLMDQPLPDADHTWYTDGSSFLQEGQRKAGAAVTTETEVIWARALPAGTSAQRAELIALTQALKMAEGKKLNVYTDSRYAFATAHIHGEIYRRRGWLTSEGKEIKNKDEILALLKALFLPKRLSIIHCPGHQKGNSAEARGNRMADQAAREVATRETPETSTLLAGKRTADGSEFEKRTADGSEFESPKKKAKVE

SEQ ID NO: 2322 - protein, 2115 aa, synthetic construct
MPAAKRVKLDGGDKKYSIGLDIGTNSVGWAVITDEYKVPSKKFKVLGNTDRHSIKKNLIGALLFDSGETAEATRLKRTARRRYTRRKNRICYLQEIFSNEMAKVDDSFFHRLEESFLVEEDKKHERHPIFGNIVDEVAYHEKYPTIYHLRKKLVDSTDKADLRLIYLALAHMIKFRGHFLIEGDLNPDNSDVDKLFIQLVQTYNQLFEENPINASGVDAKAILSARLSKSRRLENLIAQLPGEKKNGLFGNLIALSLGLTPNFKSNFDLAEDAKLQLSKDTYDDDLDNLLAQIGDQYADLFLAAKNLSDAILLSDILRVNTEITKAPLSASMIKRYDEHHQDLTLLKALVRQQLPEKYKEIFFDQSKNGYAGYIDGGASQEEFYKFIKPILEKMDGTEELLVKLNREDLLRKQRTFDNGSIPHQIHLGELHAILRRQEDFYPFLKDNREKIEKILTFRIPYYVGPLARGNSRFAWMTRKSEETITPWNFEEVVDKGASAQSFIERMTNFDKNLPNEKVLPKHSLLYEYFTVYNELTKVKYVTEGMRKPAFLSGEQKKAIVDLLFKTNRKVTVKQLKEDYFKKIECFDSVEISGVEDRFNASLGTYHDLLKIIKDKDFLDNEENEDILEDIVLTLTLFEDREMIEERLKTYAHLFDDKVMKQLKRRRYTGWGRLSRKLINGIRDKQSGKTILDFLKSDGFANRNFMQLIHDDSLTFKEDIQKAQVSGQGDSLHEHIANLAGSPAIKKGILQTVKVVDELVKVMGRHKPENIVIEMARENQTTQKGQKNSRERMKRIEEGIKELGSQILKEHPVENTQLQNEKLYLYYLQNGRDMYVDQELDINRLSDYDVDHIVPQSFLKDDSIDNKVLTRSDKARGKSDNVPSEEVVKKMKNYWRQLLNAKLITQRKFDNLTKAERGGLSELDKAGFIKRQLVETRQITKHVAQILDSRMNTKYDENDKLIREVKVITLKSKLVSDFRKDFQFYKVREINNYHHAHDAYLNAVVGTALIKKYPKLESEFVYGDYKVYDVRKMIAKSEQEIGKATAKYFFYSNIMNFFKTEITLANGEIRKRPLIETNGETGEIVWDKGRDFATVRKVLSMPQVNIVKKTEVQTGGFSKESILPKRNSDKLIARKKDWDPKKYGGFDSPTVAYSVLVVAKVEKGKSKKLKSVKELLGITIMERSSFEKNPIDFLEAKGYKEVKKDLIIKLPKYSLFELENGRKRMLASAGELQKGNELALPSKYVNFLYLASHYEKLKGSPEDNEQKQLFVEQHKHYLDEIIEQISEFSKRVILADANLDKVLSAYNKHRDKPIREQAENIIHLFTLTNLGAPAAFKYFDTTIDRKRYTSTKEVLDATLIHQSITGLYETRIDLSQLGGDGGEAAAKEAAAKEAAAKEAAAKEAAAKEAAAKGGTLNIEDEYRLHETSKEPDVSLGSTWLSDFPQAWAETGGMGLAVRQAPLIIPLKATSTPVSIKQYPMSQEARLGIKPHIQRLLDQGILVPCQSPWNTPLLPVKKPGTNDYRPVQDLREVNKRVEDIHPTVPNPYNLLSGLPPSHQWYTVLDLKDAFFCLRLHPTSQPLFAFEWRDPEMGISGQLTWTRLPQGFKNSPTLFNEALHRDLAGFRIQHPDLILLQYVDDLLLAATSELDCQQGTRALLQTLGDLGYRASAKKAQICQKQVKYLGYLLKEGQRWLTEARKETVMGQPIPKTPRQLREFLGKAGFCRLFIPGFAEMAAPLYPLTKPGTLFNWGPDQQKAFQEIKQALLTAPALGLPDLTKPFELFVDEKQGYAKGVLTQKLGPWRRPVAYLSKKLDPVAAGWPPCLRMVAAIAVLTKDAGKLTMGQPLVILAPHAVEALVKQPPDRWLSNARMTHYQALLLDTDRVQFGPVVALNPATLLPLPEEGLQHDCLDILAEAHGTRSDLMDQPLPDADHTWYTDGSSFLQEGQRKAGAAVTTETEVIWARALPAGTSAQRAELIALTQALKMAEGKKLNVYTDSRYAFATAHIHGEIYRRRGWLTSEGKEIKNKDEILALLKALFLPKRLSIIHCPGHQKGNSAEARGNRMADQAAREVATRETPETSTLLAGKRTADGSEFEKRTADGSEFESPKKKAKVE

SEQ ID NO: 2323 - protein, 2088 aa, synthetic construct
MPAAKRVKLDGGDKKYSIGLDIGTNSVGWAVITDEYKVPSKKFKVLGNTDRHSIKKNLIGALLFDSGETAEATRLKRTARRRYTRRKNRICYLQEIFSNEMAKVDDSFFHRLEESFLVEEDKKHERHPIFGNIVDEVAYHEKYPTIYHLRKKLVDSTDKADLRLIYLALAHMIKFRGHFLIEGDLNPDNSDVDKLFIQLVQTYNQLFEENPINASGVDAKAILSARLSKSRRLENLIAQLPGEKKNGLFGNLIALSLGLTPNFKSNFDLAEDAKLQLSKDTYDDDLDNLLAQIGDQYADLFLAAKNLSDAILLSDILRVNTEITKAPLSASMIKRYDEHHQDLTLLKALVRQQLPEKYKEIFFDQSKNGYAGYIDGGASQEEFYKFIKPILEKMDGTEELLVKLNREDLLRKQRTFDNGSIPHQIHLGELHAILRRQEDFYPFLKDNREKIEKILTFRIPYYVGPLARGNSRFAWMTRKSEETITPWNFEEVVDKGASAQSFIERMTNFDKNLPNEKVLPKHSLLYEYFTVYNELTKVKYVTEGMRKPAFLSGEQKKAIVDLLFKTNRKVTVKQLKEDYFKKIECFDSVEISGVEDRFNASLGTYHDLLKIIKDKDFLDNEENEDILEDIVLTLTLFEDREMIEERLKTYAHLFDDKVMKQLKRRRYTGWGRLSRKLINGIRDKQSGKTILDFLKSDGFANRNFMQLIHDDSLTFKEDIQKAQVSGQGDSLHEHIANLAGSPAIKKGILQTVKVVDELVKVMGRHKPENIVIEMARENQTTQKGQKNSRERMKRIEEGIKELGSQILKEHPVENTQLQNEKLYLYYLQNGRDMYVDQELDINRLSDYDVDHIVPQSFLKDDSIDNKVLTRSDKARGKSDNVPSEEVVKKMKNYWRQLLNAKLITQRKFDNLTKAERGGLSELDKAGFIKRQLVETRQITKHVAQILDSRMNTKYDENDKLIREVKVITLKSKLVSDFRKDFQFYKVREINNYHHAHDAYLNAVVGTALIKKYPKLESEFVYGDYKVYDVRKMIAKSEQEIGKATAKYFFYSNIMNFFKTEITLANGEIRKRPLIETNGETGEIVWDKGRDFATVRKVLSMPQVNIVKKTEVQTGGFSKESILPKRNSDKLIARKKDWDPKKYGGFDSPTVAYSVLVVAKVEKGKSKKLKSVKELLGITIMERSSFEKNPIDFLEAKGYKEVKKDLIIKLPKYSLFELENGRKRMLASAGELQKGNELALPSKYVNFLYLASHYEKLKGSPEDNEQKQLFVEQHKHYLDEIIEQISEFSKRVILADANLDKVLSAYNKHRDKPIREQAENIIHLFTLTNLGAPAAFKYFDTTIDRKRYTSTKEVLDATLIHQSITGLYETRIDLSQLGGDGGGGSGGTLNIEDEYRLHETSKEPDVSLGSTWLSDFPQAWAETGGMGLAVRQAPLIIPLKATSTPVSIKQYPMSQEARLGIKPHIQRLLDQGILVPCQSPWNTPLLPVKKPGTNDYRPVQDLREVNKRVEDIHPTVPNPYNLLSGLPPSHQWYTVLDLKDAFFCLRLHPTSQPLFAFEWRDPEMGISGQLTWTRLPQGFKNSPTLFNEALHRDLAGFRIQHPDLILLQYVDDLLLAATSELDCQQGTRALLQTLGDLGYRASAKKAQICQKQVKYLGYLLKEGQRWLTEARKETVMGQPIPKTPRQLREFLGKAGFCRLFIPGFAEMAAPLYPLTKPGTLFNWGPDQQKAFQEIKQALLTAPALGLPDLTKPFELFVDEKQGYAKGVLTQKLGPWRRPVAYLSKKLDPVAAGWPPCLRMVAAIAVLTKDAGKLTMGQPLVILAPHAVEALVKQPPDRWLSNARMTHYQALLLDTDRVQFGPVVALNPATLLPLPEEGLQHDCLDILAEAHGTRSDLMDQPLPDADHTWYTDGSSFLQEGQRKAGAAVTTETEVIWARALPAGTSAQRAELIALTQALKMAEGKKLNVYTDSRYAFATAHIHGEIYRRRGWLTSEGKEIKNKDEILALLKALFLPKRLSIIHCPGHQKGNSAEARGNRMADQAAREVATRETPETSTLLAGKRTADGSEFEKRTADGSEFESPKKKAKVE

SEQ ID NO: 2324 - protein, 2110 aa, synthetic construct
MPAAKRVKLDGGDKKYSIGLDIGTNSVGWAVITDEYKVPSKKFKVLGNTDRHSIKKNLIGALLFDSGETAEATRLKRTARRRYTRRKNRICYLQEIFSNEMAKVDDSFFHRLEESFLVEEDKKHERHPIFGNIVDEVAYHEKYPTIYHLRKKLVDSTDKADLRLIYLALAHMIKFRGHFLIEGDLNPDNSDVDKLFIQLVQTYNQLFEENPINASGVDAKAILSARLSKSRRLENLIAQLPGEKKNGLFGNLIALSLGLTPNFKSNFDLAEDAKLQLSKDTYDDDLDNLLAQIGDQYADLFLAAKNLSDAILLSDILRVNTEITKAPLSASMIKRYDEHHQDLTLLKALVRQQLPEKYKEIFFDQSKNGYAGYIDGGASQEEFYKFIKPILEKMDGTEELLVKLNREDLLRKQRTFDNGSIPHQIHLGELHAILRRQEDFYPFLKDNREKIEKILTFRIPYYVGPLARGNSRFAWMTRKSEETITPWNFEEVVDKGASAQSFIERMTNFDKNLPNEKVLPKHSLLYEYFTVYNELTKVKYVTEGMRKPAFLSGEQKKAIVDLLFKTNRKVTVKQLKEDYFKKIECFDSVEISGVEDRFNASLGTYHDLLKIIKDKDFLDNEENEDILEDIVLTLTLFEDREMIEERLKTYAHLFDDKVMKQLKRRRYTGWGRLSRKLINGIRDKQSGKTILDFLKSDGFANRNFMQLIHDDSLTFKEDIQKAQVSGQGDSLHEHIANLAGSPAIKKGILQTVKVVDELVKVMGRHKPENIVIEMARENQTTQKGQKNSRERMKRIEEGIKELGSQILKEHPVENTQLQNEKLYLYYLQNGRDMYVDQELDINRLSDYDVDHIVPQSFLKDDSIDNKVLTRSDKARGKSDNVPSEEVVKKMKNYWRQLLNAKLITQRKFDNLTKAERGGLSELDKAGFIKRQLVETRQITKHVAQILDSRMNTKYDENDKLIREVKVITLKSKLVSDFRKDFQFYKVREINNYHHAHDAYLNAVVGTALIKKYPKLESEFVYGDYKVYDVRKMIAKSEQEIGKATAKYFFYSNIMNFFKTEITLANGEIRKRPLIETNGETGEIVWDKGRDFATVRKVLSMPQVNIVKKTEVQTGGFSKESILPKRNSDKLIARKKDWDPKKYGGFDSPTVAYSVLVVAKVEKGKSKKLKSVKELLGITIMERSSFEKNPIDFLEAKGYKEVKKDLIIKLPKYSLFELENGRKRMLASAGELQKGNELALPSKYVNFLYLASHYEKLKGSPEDNEQKQLFVEQHKHYLDEIIEQISEFSKRVILADANLDKVLSAYNKHRDKPIREQAENIIHLFTLTNLGAPAAFKYFDTTIDRKRYTSTKEVLDATLIHQSITGLYETRIDLSQLGGDGGEAAAKEAAAKEAAAKEAAAKEAAAKGGTLNIEDEYRLHETSKEPDVSLGSTWLSDFPQAWAETGGMGLAVRQAPLIIPLKATSTPVSIKQYPMSQEARLGIKPHIQRLLDQGILVPCQSPWNTPLLPVKKPGTNDYRPVQDLREVNKRVEDIHPTVPNPYNLLSGLPPSHQWYTVLDLKDAFFCLRLHPTSQPLFAFEWRDPEMGISGQLTWTRLPQGFKNSPTLFNEALHRDLAGFRIQHPDLILLQYVDDLLLAATSELDCQQGTRALLQTLGDLGYRASAKKAQICQKQVKYLGYLLKEGQRWLTEARKETVMGQPIPKTPRQLREFLGKAGFCRLFIPGFAEMAAPLYPLTKPGTLFNWGPDQQKAFQEIKQALLTAPALGLPDLTKPFELFVDEKQGYAKGVLTQKLGPWRRPVAYLSKKLDPVAAGWPPCLRMVAAIAVLTKDAGKLTMGQPLVILAPHAVEALVKQPPDRWLSNARMTHYQALLLDTDRVQFGPVVALNPATLLPLPEEGLQHDCLDILAEAHGTRSDLMDQPLPDADHTWYTDGSSFLQEGQRKAGAAVTTETEVIWARALPAGTSAQRAELIALTQALKMAEGKKLNVYTDSRYAFATAHIHGEIYRRRGWLTSEGKEIKNKDEILALLKALFLPKRLSIIHCPGHQKGNSAEARGNRMADQAAREVATRETPETSTLLAGKRTADGSEFEKRTADGSEFESPKKKAKVE

SEQ ID NO: 2325 - protein, 2105 aa, synthetic construct
MPAAKRVKLDGGDKKYSIGLDIGTNSVGWAVITDEYKVPSKKFKVLGNTDRHSIKKNLIGALLFDSGETAEATRLKRTARRRYTRRKNRICYLQEIFSNEMAKVDDSFFHRLEESFLVEEDKKHERHPIFGNIVDEVAYHEKYPTIYHLRKKLVDSTDKADLRLIYLALAHMIKFRGHFLIEGDLNPDNSDVDKLFIQLVQTYNQLFEENPINASGVDAKAILSARLSKSRRLENLIAQLPGEKKNGLFGNLIALSLGLTPNFKSNFDLAEDAKLQLSKDTYDDDLDNLLAQIGDQYADLFLAAKNLSDAILLSDILRVNTEITKAPLSASMIKRYDEHHQDLTLLKALVRQQLPEKYKEIFFDQSKNGYAGYIDGGASQEEFYKFIKPILEKMDGTEELLVKLNREDLLRKQRTFDNGSIPHQIHLGELHAILRRQEDFYPFLKDNREKIEKILTFRIPYYVGPLARGNSRFAWMTRKSEETITPWNFEEVVDKGASAQSFIERMTNFDKNLPNEKVLPKHSLLYEYFTVYNELTKVKYVTEGMRKPAFLSGEQKKAIVDLLFKTNRKVTVKQLKEDYFKKIECFDSVEISGVEDRFNASLGTYHDLLKIIKDKDFLDNEENEDILEDIVLTLTLFEDREMIEERLKTYAHLFDDKVMKQLKRRRYTGWGRLSRKLINGIRDKQSGKTILDFLKSDGFANRNFMQLIHDDSLTFKEDIQKAQVSGQGDSLHEHIANLAGSPAIKKGILQTVKVVDELVKVMGRHKPENIVIEMARENQTTQKGQKNSRERMKRIEEGIKELGSQILKEHPVENTQLQNEKLYLYYLQNGRDMYVDQELDINRLSDYDVDHIVPQSFLKDDSIDNKVLTRSDKARGKSDNVPSEEVVKKMKNYWRQLLNAKLITQRKFDNLTKAERGGLSELDKAGFIKRQLVETRQITKHVAQILDSRMNTKYDENDKLIREVKVITLKSKLVSDFRKDFQFYKVREINNYHHAHDAYLNAVVGTALIKKYPKLESEFVYGDYKVYDVRKMIAKSEQEIGKATAKYFFYSNIMNFFKTEITLANGEIRKRPLIETNGETGEIVWDKGRDFATVRKVLSMPQVNIVKKTEVQTGGFSKESILPKRNSDKLIARKKDWDPKKYGGFDSPTVAYSVLVVAKVEKGKSKKLKSVKELLGITIMERSSFEKNPIDFLEAKGYKEVKKDLIIKLPKYSLFELENGRKRMLASAGELQKGNELALPSKYVNFLYLASHYEKLKGSPEDNEQKQLFVEQHKHYLDEIIEQISEFSKRVILADANLDKVLSAYNKHRDKPIREQAENIIHLFTLTNLGAPAAFKYFDTTIDRKRYTSTKEVLDATLIHQSITGLYETRIDLSQLGGDGGEAAAKEAAAKEAAAKEAAAKGGTLNIEDEYRLHETSKEPDVSLGSTWLSDFPQAWAETGGMGLAVRQAPLIIPLKATSTPVSIKQYPMSQEARLGIKPHIQRLLDQGILVPCQSPWNTPLLPVKKPGTNDYRPVQDLREVNKRVEDIHPTVPNPYNLLSGLPPSHQWYTVLDLKDAFFCLRLHPTSQPLFAFEWRDPEMGISGQLTWTRLPQGFKNSPTLFNEALHRDLAGFRIQHPDLILLQYVDDLLLAATSELDCQQGTRALLQTLGDLGYRASAKKAQICQKQVKYLGYLLKEGQRWLTEARKETVMGQPIPKTPRQLREFLGKAGFCRLFIPGFAEMAAPLYPLTKPGTLFNWGPDQQKAFQEIKQALLTAPALGLPDLTKPFELFVDEKQGYAKGVLTQKLGPWRRPVAYLSKKLDPVAAGWPPCLRMVAAIAVLTKDAGKLTMGQPLVILAPHAVEALVKQPPDRWLSNARMTHYQALLLDTDRVQFGPVVALNPATLLPLPEEGLQHDCLDILAEAHGTRSDLMDQPLPDADHTWYTDGSSFLQEGQRKAGAAVTTETEVIWARALPAGTSAQRAELIALTQALKMAEGKKLNVYTDSRYAFATAHIHGEIYRRRGWLTSEGKEIKNKDEILALLKALFLPKRLSIIHCPGHQKGNSAEARGNRMADQAAREVATRETPETSTLLAGKRTADGSEFEKRTADGSEFESPKKKAKVE

SEQ ID NO: 2326 - protein, 2096 aa, synthetic construct
MPAAKRVKLDGGDKKYSIGLDIGTNSVGWAVITDEYKVPSKKFKVLGNTDRHSIKKNLIGALLFDSGETAEATRLKRTARRRYTRRKNRICYLQEIFSNEMAKVDDSFFHRLEESFLVEEDKKHERHPIFGNIVDEVAYHEKYPTIYHLRKKLVDSTDKADLRLIYLALAHMIKFRGHFLIEGDLNPDNSDVDKLFIQLVQTYNQLFEENPINASGVDAKAILSARLSKSRRLENLIAQLPGEKKNGLFGNLIALSLGLTPNFKSNFDLAEDAKLQLSKDTYDDDLDNLLAQIGDQYADLFLAAKNLSDAILLSDILRVNTEITKAPLSASMIKRYDEHHQDLTLLKALVRQQLPEKYKEIFFDQSKNGYAGYIDGGASQEEFYKFIKPILEKMDGTEELLVKLNREDLLRKQRTFDNGSIPHQIHLGELHAILRRQEDFYPFLKDNREKIEKILTFRIPYYVGPLARGNSRFAWMTRKSEETITPWNFEEVVDKGASAQSFIERMTNFDKNLPNEKVLPKHSLLYEYFTVYNELTKVKYVTEGMRKPAFLSGEQKKAIVDLLFKTNRKVTVKQLKEDYFKKIECFDSVEISGVEDRFNASLGTYHDLLKIIKDKDFLDNEENEDILEDIVLTLTLFEDREMIEERLKTYAHLFDDKVMKQLKRRRYTGWGRLSRKLINGIRDKQSGKTILDFLKSDGFANRNFMQLIHDDSLTFKEDIQKAQVSGQGDSLHEHIANLAGSPAIKKGILQTVKVVDELVKVMGRHKPENIVIEMARENQTTQKGQKNSRERMKRIEEGIKELGSQILKEHPVENTQLQNEKLYLYYLQNGRDMYVDQELDINRLSDYDVDHIVPQSFLKDDSIDNKVLTRSDKARGKSDNVPSEEVVKKMKNYWRQLLNAKLITQRKFDNLTKAERGGLSELDKAGFIKRQLVETRQITKHVAQILDSRMNTKYDENDKLIREVKVITLKSKLVSDFRKDFQFYKVREINNYHHAHDAYLNAVVGTALIKKYPKLESEFVYGDYKVYDVRKMIAKSEQEIGKATAKYFFYSNIMNFFKTEITLANGEIRKRPLIETNGETGEIVWDKGRDFATVRKVLSMPQVNIVKKTEVQTGGFSKESILPKRNSDKLIARKKDWDPKKYGGFDSPTVAYSVLVVAKVEKGKSKKLKSVKELLGITIMERSSFEKNPIDFLEAKGYKEVKKDLIIKLPKYSLFELENGRKRMLASAGELQKGNELALPSKYVNFLYLASHYEKLKGSPEDNEQKQLFVEQHKHYLDEIIEQISEFSKRVILADANLDKVLSAYNKHRDKPIREQAENIIHLFTLTNLGAPAAFKYFDTTIDRKRYTSTKEVLDATLIHQSITGLYETRIDLSQLGGDGGGGSEAAAKPAPGGTLNIEDEYRLHETSKEPDVSLGSTWLSDFPQAWAETGGMGLAVRQAPLIIPLKATSTPVSIKQYPMSQEARLGIKPHIQRLLDQGILVPCQSPWNTPLLPVKKPGTNDYRPVQDLREVNKRVEDIHPTVPNPYNLLSGLPPSHQWYTVLDLKDAFFCLRLHPTSQPLFAFEWRDPEMGISGQLTWTRLPQGFKNSPTLFNEALHRDLAGFRIQHPDLILLQYVDDLLLAATSELDCQQGTRALLQTLGDLGYRASAKKAQICQKQVKYLGYLLKEGQRWLTEARKETVMGQPIPKTPRQLREFLGKAGFCRLFIPGFAEMAAPLYPLTKPGTLFNWGPDQQKAFQEIKQALLTAPALGLPDLTKPFELFVDEKQGYAKGVLTQKLGPWRRPVAYLSKKLDPVAAGWPPCLRMVAAIAVLTKDAGKLTMGQPLVILAPHAVEALVKQPPDRWLSNARMTHYQALLLDTDRVQFGPVVALNPATLLPLPEEGLQHDCLDILAEAHGTRSDLMDQPLPDADHTWYTDGSSFLQEGQRKAGAAVTTETEVIWARALPAGTSAQRAELIALTQALKMAEGKKLNVYTDSRYAFATAHIHGEIYRRRGWLTSEGKEIKNKDEILALLKALFLPKRLSIIHCPGHQKGNSAEARGNRMADQAAREVATRETPETSTLLAGKRTADGSEFEKRTADGSEFESPKKKAKVE

SEQ ID NO: 2327 - protein, 2096 aa, synthetic construct
MPAAKRVKLDGGDKKYSIGLDIGTNSVGWAVITDEYKVPSKKFKVLGNTDRHSIKKNLIGALLFDSGETAEATRLKRTARRRYTRRKNRICYLQEIFSNEMAKVDDSFFHRLEESFLVEEDKKHERHPIFGNIVDEVAYHEKYPTIYHLRKKLVDSTDKADLRLIYLALAHMIKFRGHFLIEGDLNPDNSDVDKLFIQLVQTYNQLFEENPINASGVDAKAILSARLSKSRRLENLIAQLPGEKKNGLFGNLIALSLGLTPNFKSNFDLAEDAKLQLSKDTYDDDLDNLLAQIGDQYADLFLAAKNLSDAILLSDILRVNTEITKAPLSASMIKRYDEHHQDLTLLKALVRQQLPEKYKEIFFDQSKNGYAGYIDGGASQEEFYKFIKPILEKMDGTEELLVKLNREDLLRKQRTFDNGSIPHQIHLGELHAILRRQEDFYPFLKDNREKIEKILTFRIPYYVGPLARGNSRFAWMTRKSEETITPWNFEEVVDKGASAQSFIERMTNFDKNLPNEKVLPKHSLLYEYFTVYNELTKVKYVTEGMRKPAFLSGEQKKAIVDLLFKTNRKVTVKQLKEDYFKKIECFDSVEISGVEDRFNASLGTYHDLLKIIKDKDFLDNEENEDILEDIVLTLTLFEDREMIEERLKTYAHLFDDKVMKQLKRRRYTGWGRLSRKLINGIRDKQSGKTILDFLKSDGFANRNFMQLIHDDSLTFKEDIQKAQVSGQGDSLHEHIANLAGSPAIKKGILQTVKVVDELVKVMGRHKPENIVIEMARENQTTQKGQKNSRERMKRIEEGIKELGSQILKEHPVENTQLQNEKLYLYYLQNGRDMYVDQELDINRLSDYDVDHIVPQSFLKDDSIDNKVLTRSDKARGKSDNVPSEEVVKKMKNYWRQLLNAKLITQRKFDNLTKAERGGLSELDKAGFIKRQLVETRQITKHVAQILDSRMNTKYDENDKLIREVKVITLKSKLVSDFRKDFQFYKVREINNYHHAHDAYLNAVVGTALIKKYPKLESEFVYGDYKVYDVRKMIAKSEQEIGKATAKYFFYSNIMNFFKTEITLANGEIRKRPLIETNGETGEIVWDKGRDFATVRKVLSMPQVNIVKKTEVQTGGFSKESILPKRNSDKLIARKKDWDPKKYGGFDSPTVAYSVLVVAKVEKGKSKKLKSVKELLGITIMERSSFEKNPIDFLEAKGYKEVKKDLIIKLPKYSLFELENGRKRMLASAGELQKGNELALPSKYVNFLYLASHYEKLKGSPEDNEQKQLFVEQHKHYLDEIIEQISEFSKRVILADANLDKVLSAYNKHRDKPIREQAENIIHLFTLTNLGAPAAFKYFDTTIDRKRYTSTKEVLDATLIHQSITGLYETRIDLSQLGGDGGGGGGSSEAAAKGGTLNIEDEYRLHETSKEPDVSLGSTWLSDFPQAWAETGGMGLAVRQAPLIIPLKATSTPVSIKQYPMSQEARLGIKPHIQRLLDQGILVPCQSPWNTPLLPVKKPGTNDYRPVQDLREVNKRVEDIHPTVPNPYNLLSGLPPSHQWYTVLDLKDAFFCLRLHPTSQPLFAFEWRDPEMGISGQLTWTRLPQGFKNSPTLFNEALHRDLAGFRIQHPDLILLQYVDDLLLAATSELDCQQGTRALLQTLGDLGYRASAKKAQICQKQVKYLGYLLKEGQRWLTEARKETVMGQPIPKTPRQLREFLGKAGFCRLFIPGFAEMAAPLYPLTKPGTLFNWGPDQQKAFQEIKQALLTAPALGLPDLTKPFELFVDEKQGYAKGVLTQKLGPWRRPVAYLSKKLDPVAAGWPPCLRMVAAIAVLTKDAGKLTMGQPLVILAPHAVEALVKQPPDRWLSNARMTHYQALLLDTDRVQFGPVVALNPATLLPLPEEGLQHDCLDILAEAHGTRSDLMDQPLPDADHTWYTDGSSFLQEGQRKAGAAVTTETEVIWARALPAGTSAQRAELIALTQALKMAEGKKLNVYTDSRYAFATAHIHGEIYRRRGWLTSEGKEIKNKDEILALLKALFLPKRLSIIHCPGHQKGNSAEARGNRMADQAAREVATRETPETSTLLAGKRTADGSEFEKRTADGSEFESPKKKAKVE

SEQ ID NO: 2328 - protein, 2090 aa, synthetic construct
MPAAKRVKLDGGDKKYSIGLDIGTNSVGWAVITDEYKVPSKKFKVLGNTDRHSIKKNLIGALLFDSGETAEATRLKRTARRRYTRRKNRICYLQEIFSNEMAKVDDSFFHRLEESFLVEEDKKHERHPIFGNIVDEVAYHEKYPTIYHLRKKLVDSTDKADLRLIYLALAHMIKFRGHFLIEGDLNPDNSDVDKLFIQLVQTYNQLFEENPINASGVDAKAILSARLSKSRRLENLIAQLPGEKKNGLFGNLIALSLGLTPNFKSNFDLAEDAKLQLSKDTYDDDLDNLLAQIGDQYADLFLAAKNLSDAILLSDILRVNTEITKAPLSASMIKRYDEHHQDLTLLKALVRQQLPEKYKEIFFDQSKNGYAGYIDGGASQEEFYKFIKPILEKMDGTEELLVKLNREDLLRKQRTFDNGSIPHQIHLGELHAILRRQEDFYPFLKDNREKIEKILTFRIPYYVGPLARGNSRFAWMTRKSEETITPWNFEEVVDKGASAQSFIERMTNFDKNLPNEKVLPKHSLLYEYFTVYNELTKVKYVTEGMRKPAFLSGEQKKAIVDLLFKTNRKVTVKQLKEDYFKKIECFDSVEISGVEDRFNASLGTYHDLLKIIKDKDFLDNEENEDILEDIVLTLTLFEDREMIEERLKTYAHLFDDKVMKQLKRRRYTGWGRLSRKLINGIRDKQSGKTILDFLKSDGFANRNFMQLIHDDSLTFKEDIQKAQVSGQGDSLHEHIANLAGSPAIKKGILQTVKVVDELVKVMGRHKPENIVIEMARENQTTQKGQKNSRERMKRIEEGIKELGSQILKEHPVENTQLQNEKLYLYYLQNGRDMYVDQELDINRLSDYDVDHIVPQSFLKDDSIDNKVLTRSDKARGKSDNVPSEEVVKKMKNYWRQLLNAKLITQRKFDNLTKAERGGLSELDKAGFIKRQLVETRQITKHVAQILDSRMNTKYDENDKLIREVKVITLKSKLVSDFRKDFQFYKVREINNYHHAHDAYLNAVVGTALIKKYPKLESEFVYGDYKVYDVRKMIAKSEQEIGKATAKYFFYSNIMNFFKTEITLANGEIRKRPLIETNGETGEIVWDKGRDFATVRKVLSMPQVNIVKKTEVQTGGFSKESILPKRNSDKLIARKKDWDPKKYGGFDSPTVAYSVLVVAKVEKGKSKKLKSVKELLGITIMERSSFEKNPIDFLEAKGYKEVKKDLIIKLPKYSLFELENGRKRMLASAGELQKGNELALPSKYVNFLYLASHYEKLKGSPEDNEQKQLFVEQHKHYLDEIIEQISEFSKRVILADANLDKVLSAYNKHRDKPIREQAENIIHLFTLTNLGAPAAFKYFDTTIDRKRYTSTKEVLDATLIHQSITGLYETRIDLSQLGGDGGEAAAKGGTLNIEDEYRLHETSKEPDVSLGSTWLSDFPQAWAETGGMGLAVRQAPLIIPLKATSTPVSIKQYPMSQEARLGIKPHIQRLLDQGILVPCQSPWNTPLLPVKKPGTNDYRPVQDLREVNKRVEDIHPTVPNPYNLLSGLPPSHQWYTVLDLKDAFFCLRLHPTSQPLFAFEWRDPEMGISGQLTWTRLPQGFKNSPTLFNEALHRDLAGFRIQHPDLILLQYVDDLLLAATSELDCQQGTRALLQTLGDLGYRASAKKAQICQKQVKYLGYLLKEGQRWLTEARKETVMGQPIPKTPRQLREFLGKAGFCRLFIPGFAEMAAPLYPLTKPGTLFNWGPDQQKAFQEIKQALLTAPALGLPDLTKPFELFVDEKQGYAKGVLTQKLGPWRRPVAYLSKKLDPVAAGWPPCLRMVAAIAVLTKDAGKLTMGQPLVILAPHAVEALVKQPPDRWLSNARMTHYQALLLDTDRVQFGPVVALNPATLLPLPEEGLQHDCLDILAEAHGTRSDLMDQPLPDADHTWYTDGSSFLQEGQRKAGAAVTTETEVIWARALPAGTSAQRAELIALTQALKMAEGKKLNVYTDSRYAFATAHIHGEIYRRRGWLTSEGKEIKNKDEILALLKALFLPKRLSIIHCPGHQKGNSAEARGNRMADQAAREVATRETPETSTLLAGKRTADGSEFEKRTADGSEFESPKKKAKVE

SEQ ID NO: 2329 - protein, 2094 aa, synthetic construct
MPAAKRVKLDGGDKKYSIGLDIGTNSVGWAVITDEYKVPSKKFKVLGNTDRHSIKKNLIGALLFDSGETAEATRLKRTARRRYTRRKNRICYLQEIFSNEMAKVDDSFFHRLEESFLVEEDKKHERHPIFGNIVDEVAYHEKYPTIYHLRKKLVDSTDKADLRLIYLALAHMIKFRGHFLIEGDLNPDNSDVDKLFIQLVQTYNQLFEENPINASGVDAKAILSARLSKSRRLENLIAQLPGEKKNGLFGNLIALSLGLTPNFKSNFDLAEDAKLQLSKDTYDDDLDNLLAQIGDQYADLFLAAKNLSDAILLSDILRVNTEITKAPLSASMIKRYDEHHQDLTLLKALVRQQLPEKYKEIFFDQSKNGYAGYIDGGASQEEFYKFIKPILEKMDGTEELLVKLNREDLLRKQRTFDNGSIPHQIHLGELHAILRRQEDFYPFLKDNREKIEKILTFRIPYYVGPLARGNSRFAWMTRKSEETITPWNFEEVVDKGASAQSFIERMTNFDKNLPNEKVLPKHSLLYEYFTVYNELTKVKYVTEGMRKPAFLSGEQKKAIVDLLFKTNRKVTVKQLKEDYFKKIECFDSVEISGVEDRFNASLGTYHDLLKIIKDKDFLDNEENEDILEDIVLTLTLFEDREMIEERLKTYAHLFDDKVMKQLKRRRYTGWGRLSRKLINGIRDKQSGKTILDFLKSDGFANRNFMQLIHDDSLTFKEDIQKAQVSGQGDSLHEHIANLAGSPAIKKGILQTVKVVDELVKVMGRHKPENIVIEMARENQTTQKGQKNSRERMKRIEEGIKELGSQILKEHPVENTQLQNEKLYLYYLQNGRDMYVDQELDINRLSDYDVDHIVPQSFLKDDSIDNKVLTRSDKARGKSDNVPSEEVVKKMKNYWRQLLNAKLITQRKFDNLTKAERGGLSELDKAGFIKRQLVETRQITKHVAQILDSRMNTKYDENDKLIREVKVITLKSKLVSDFRKDFQFYKVREINNYHHAHDAYLNAVVGTALIKKYPKLESEFVYGDYKVYDVRKMIAKSEQEIGKATAKYFFYSNIMNFFKTEITLANGEIRKRPLIETNGETGEIVWDKGRDFATVRKVLSMPQVNIVKKTEVQTGGFSKESILPKRNSDKLIARKKDWDPKKYGGFDSPTVAYSVLVVAKVEKGKSKKLKSVKELLGITIMERSSFEKNPIDFLEAKGYKEVKKDLIIKLPKYSLFELENGRKRMLASAGELQKGNELALPSKYVNFLYLASHYEKLKGSPEDNEQKQLFVEQHKHYLDEIIEQISEFSKRVILADANLDKVLSAYNKHRDKPIREQAENIIHLFTLTNLGAPAAFKYFDTTIDRKRYTSTKEVLDATLIHQSITGLYETRIDLSQLGGDGGGSSPAPGGGGGTLNIEDEYRLHETSKEPDVSLGSTWLSDFPQAWAETGGMGLAVRQAPLIIPLKATSTPVSIKQYPMSQEARLGIKPHIQRLLDQGILVPCQSPWNTPLLPVKKPGTNDYRPVQDLREVNKRVEDIHPTVPNPYNLLSGLPPSHQWYTVLDLKDAFFCLRLHPTSQPLFAFEWRDPEMGISGQLTWTRLPQGFKNSPTLFNEALHRDLAGFRIQHPDLILLQYVDDLLLAATSELDCQQGTRALLQTLGDLGYRASAKKAQICQKQVKYLGYLLKEGQRWLTEARKETVMGQPIPKTPRQLREFLGKAGFCRLFIPGFAEMAAPLYPLTKPGTLFNWGPDQQKAFQEIKQALLTAPALGLPDLTKPFELFVDEKQGYAKGVLTQKLGPWRRPVAYLSKKLDPVAAGWPPCLRMVAAIAVLTKDAGKLTMGQPLVILAPHAVEALVKQPPDRWLSNARMTHYQALLLDTDRVQFGPVVALNPATLLPLPEEGLQHDCLDILAEAHGTRSDLMDQPLPDADHTWYTDGSSFLQEGQRKAGAAVTTETEVIWARALPAGTSAQRAELIALTQALKMAEGKKLNVYTDSRYAFATAHIHGEIYRRRGWLTSEGKEIKNKDEILALLKALFLPKRLSIIHCPGHQKGNSAEARGNRMADQAAREVATRETPETSTLLAGKRTADGSEFEKRTADGSEFESPKKKAKVE

SEQ ID NO: 2330 - protein, 2088 aa, synthetic construct
MPAAKRVKLDGGDKKYSIGLDIGTNSVGWAVITDEYKVPSKKFKVLGNTDRHSIKKNLIGALLFDSGETAEATRLKRTARRRYTRRKNRICYLQEIFSNEMAKVDDSFFHRLEESFLVEEDKKHERHPIFGNIVDEVAYHEKYPTIYHLRKKLVDSTDKADLRLIYLALAHMIKFRGHFLIEGDLNPDNSDVDKLFIQLVQTYNQLFEENPINASGVDAKAILSARLSKSRRLENLIAQLPGEKKNGLFGNLIALSLGLTPNFKSNFDLAEDAKLQLSKDTYDDDLDNLLAQIGDQYADLFLAAKNLSDAILLSDILRVNTEITKAPLSASMIKRYDEHHQDLTLLKALVRQQLPEKYKEIFFDQSKNGYAGYIDGGASQEEFYKFIKPILEKMDGTEELLVKLNREDLLRKQRTFDNGSIPHQIHLGELHAILRRQEDFYPFLKDNREKIEKILTFRIPYYVGPLARGNSRFAWMTRKSEETITPWNFEEVVDKGASAQSFIERMTNFDKNLPNEKVLPKHSLLYEYFTVYNELTKVKYVTEGMRKPAFLSGEQKKAIVDLLFKTNRKVTVKQLKEDYFKKIECFDSVEISGVEDRFNASLGTYHDLLKIIKDKDFLDNEENEDILEDIVLTLTLFEDREMIEERLKTYAHLFDDKVMKQLKRRRYTGWGRLSRKLINGIRDKQSGKTILDFLKSDGFANRNFMQLIHDDSLTFKEDIQKAQVSGQGDSLHEHIANLAGSPAIKKGILQTVKVVDELVKVMGRHKPENIVIEMARENQTTQKGQKNSRERMKRIEEGIKELGSQILKEHPVENTQLQNEKLYLYYLQNGRDMYVDQELDINRLSDYDVDHIVPQSFLKDDSIDNKVLTRSDKARGKSDNVPSEEVVKKMKNYWRQLLNAKLITQRKFDNLTKAERGGLSELDKAGFIKRQLVETRQITKHVAQILDSRMNTKYDENDKLIREVKVITLKSKLVSDFRKDFQFYKVREINNYHHAHDAYLNAVVGTALIKKYPKLESEFVYGDYKVYDVRKMIAKSEQEIGKATAKYFFYSNIMNFFKTEITLANGEIRKRPLIETNGETGEIVWDKGRDFATVRKVLSMPQVNIVKKTEVQTGGFSKESILPKRNSDKLIARKKDWDPKKYGGFDSPTVAYSVLVVAKVEKGKSKKLKSVKELLGITIMERSSFEKNPIDFLEAKGYKEVKKDLIIKLPKYSLFELENGRKRMLASAGELQKGNELALPSKYVNFLYLASHYEKLKGSPEDNEQKQLFVEQHKHYLDEIIEQISEFSKRVILADANLDKVLSAYNKHRDKPIREQAENIIHLFTLTNLGAPAAFKYFDTTIDRKRYTSTKEVLDATLIHQSITGLYETRIDLSQLGGDGGGSSGGTLNIEDEYRLHETSKEPDVSLGSTWLSDFPQAWAETGGMGLAVRQAPLIIPLKATSTPVSIKQYPMSQEARLGIKPHIQRLLDQGILVPCQSPWNTPLLPVKKPGTNDYRPVQDLREVNKRVEDIHPTVPNPYNLLSGLPPSHQWYTVLDLKDAFFCLRLHPTSQPLFAFEWRDPEMGISGQLTWTRLPQGFKNSPTLFNEALHRDLAGFRIQHPDLILLQYVDDLLLAATSELDCQQGTRALLQTLGDLGYRASAKKAQICQKQVKYLGYLLKEGQRWLTEARKETVMGQPIPKTPRQLREFLGKAGFCRLFIPGFAEMAAPLYPLTKPGTLFNWGPDQQKAFQEIKQALLTAPALGLPDLTKPFELFVDEKQGYAKGVLTQKLGPWRRPVAYLSKKLDPVAAGWPPCLRMVAAIAVLTKDAGKLTMGQPLVILAPHAVEALVKQPPDRWLSNARMTHYQALLLDTDRVQFGPVVALNPATLLPLPEEGLQHDCLDILAEAHGTRSDLMDQPLPDADHTWYTDGSSFLQEGQRKAGAAVTTETEVIWARALPAGTSAQRAELIALTQALKMAEGKKLNVYTDSRYAFATAHIHGEIYRRRGWLTSEGKEIKNKDEILALLKALFLPKRLSIIHCPGHQKGNSAEARGNRMADQAAREVATRETPETSTLLAGKRTADGSEFEKRTADGSEFESPKKKAKVE

SEQ ID NO: 2331 - protein, 2094 aa, synthetic construct
MPAAKRVKLDGGDKKYSIGLDIGTNSVGWAVITDEYKVPSKKFKVLGNTDRHSIKKNLIGALLFDSGETAEATRLKRTARRRYTRRKNRICYLQEIFSNEMAKVDDSFFHRLEESFLVEEDKKHERHPIFGNIVDEVAYHEKYPTIYHLRKKLVDSTDKADLRLIYLALAHMIKFRGHFLIEGDLNPDNSDVDKLFIQLVQTYNQLFEENPINASGVDAKAILSARLSKSRRLENLIAQLPGEKKNGLFGNLIALSLGLTPNFKSNFDLAEDAKLQLSKDTYDDDLDNLLAQIGDQYADLFLAAKNLSDAILLSDILRVNTEITKAPLSASMIKRYDEHHQDLTLLKALVRQQLPEKYKEIFFDQSKNGYAGYIDGGASQEEFYKFIKPILEKMDGTEELLVKLNREDLLRKQRTFDNGSIPHQIHLGELHAILRRQEDFYPFLKDNREKIEKILTFRIPYYVGPLARGNSRFAWMTRKSEETITPWNFEEVVDKGASAQSFIERMTNFDKNLPNEKVLPKHSLLYEYFTVYNELTKVKYVTEGMRKPAFLSGEQKKAIVDLLFKTNRKVTVKQLKEDYFKKIECFDSVEISGVEDRFNASLGTYHDLLKIIKDKDFLDNEENEDILEDIVLTLTLFEDREMIEERLKTYAHLFDDKVMKQLKRRRYTGWGRLSRKLINGIRDKQSGKTILDFLKSDGFANRNFMQLIHDDSLTFKEDIQKAQVSGQGDSLHEHIANLAGSPAIKKGILQTVKVVDELVKVMGRHKPENIVIEMARENQTTQKGQKNSRERMKRIEEGIKELGSQILKEHPVENTQLQNEKLYLYYLQNGRDMYVDQELDINRLSDYDVDHIVPQSFLKDDSIDNKVLTRSDKARGKSDNVPSEEVVKKMKNYWRQLLNAKLITQRKFDNLTKAERGGLSELDKAGFIKRQLVETRQITKHVAQILDSRMNTKYDENDKLIREVKVITLKSKLVSDFRKDFQFYKVREINNYHHAHDAYLNAVVGTALIKKYPKLESEFVYGDYKVYDVRKMIAKSEQEIGKATAKYFFYSNIMNFFKTEITLANGEIRKRPLIETNGETGEIVWDKGRDFATVRKVLSMPQVNIVKKTEVQTGGFSKESILPKRNSDKLIARKKDWDPKKYGGFDSPTVAYSVLVVAKVEKGKSKKLKSVKELLGITIMERSSFEKNPIDFLEAKGYKEVKKDLIIKLPKYSLFELENGRKRMLASAGELQKGNELALPSKYVNFLYLASHYEKLKGSPEDNEQKQLFVEQHKHYLDEIIEQISEFSKRVILADANLDKVLSAYNKHRDKPIREQAENIIHLFTLTNLGAPAAFKYFDTTIDRKRYTSTKEVLDATLIHQSITGLYETRIDLSQLGGDGGGGSGSSGGGGGTLNIEDEYRLHETSKEPDVSLGSTWLSDFPQAWAETGGMGLAVRQAPLIIPLKATSTPVSIKQYPMSQEARLGIKPHIQRLLDQGILVPCQSPWNTPLLPVKKPGTNDYRPVQDLREVNKRVEDIHPTVPNPYNLLSGLPPSHQWYTVLDLKDAFFCLRLHPTSQPLFAFEWRDPEMGISGQLTWTRLPQGFKNSPTLFNEALHRDLAGFRIQHPDLILLQYVDDLLLAATSELDCQQGTRALLQTLGDLGYRASAKKAQICQKQVKYLGYLLKEGQRWLTEARKETVMGQPIPKTPRQLREFLGKAGFCRLFIPGFAEMAAPLYPLTKPGTLFNWGPDQQKAFQEIKQALLTAPALGLPDLTKPFELFVDEKQGYAKGVLTQKLGPWRRPVAYLSKKLDPVAAGWPPCLRMVAAIAVLTKDAGKLTMGQPLVILAPHAVEALVKQPPDRWLSNARMTHYQALLLDTDRVQFGPVVALNPATLLPLPEEGLQHDCLDILAEAHGTRSDLMDQPLPDADHTWYTDGSSFLQEGQRKAGAAVTTETEVIWARALPAGTSAQRAELIALTQALKMAEGKKLNVYTDSRYAFATAHIHGEIYRRRGWLTSEGKEIKNKDEILALLKALFLPKRLSIIHCPGHQKGNSAEARGNRMADQAAREVATRETPETSTLLAGKRTADGSEFEKRTADGSEFESPKKKAKVE

SEQ ID NO: 2332 - protein, 2096 aa, synthetic construct
MPAAKRVKLDGGDKKYSIGLDIGTNSVGWAVITDEYKVPSKKFKVLGNTDRHSIKKNLIGALLFDSGETAEATRLKRTARRRYTRRKNRICYLQEIFSNEMAKVDDSFFHRLEESFLVEEDKKHERHPIFGNIVDEVAYHEKYPTIYHLRKKLVDSTDKADLRLIYLALAHMIKFRGHFLIEGDLNPDNSDVDKLFIQLVQTYNQLFEENPINASGVDAKAILSARLSKSRRLENLIAQLPGEKKNGLFGNLIALSLGLTPNFKSNFDLAEDAKLQLSKDTYDDDLDNLLAQIGDQYADLFLAAKNLSDAILLSDILRVNTEITKAPLSASMIKRYDEHHQDLTLLKALVRQQLPEKYKEIFFDQSKNGYAGYIDGGASQEEFYKFIKPILEKMDGTEELLVKLNREDLLRKQRTFDNGSIPHQIHLGELHAILRRQEDFYPFLKDNREKIEKILTFRIPYYVGPLARGNSRFAWMTRKSEETITPWNFEEVVDKGASAQSFIERMTNFDKNLPNEKVLPKHSLLYEYFTVYNELTKVKYVTEGMRKPAFLSGEQKKAIVDLLFKTNRKVTVKQLKEDYFKKIECFDSVEISGVEDRFNASLGTYHDLLKIIKDKDFLDNEENEDILEDIVLTLTLFEDREMIEERLKTYAHLFDDKVMKQLKRRRYTGWGRLSRKLINGIRDKQSGKTILDFLKSDGFANRNFMQLIHDDSLTFKEDIQKAQVSGQGDSLHEHIANLAGSPAIKKGILQTVKVVDELVKVMGRHKPENIVIEMARENQTTQKGQKNSRERMKRIEEGIKELGSQILKEHPVENTQLQNEKLYLYYLQNGRDMYVDQELDINRLSDYDVDHIVPQSFLKDDSIDNKVLTRSDKARGKSDNVPSEEVVKKMKNYWRQLLNAKLITQRKFDNLTKAERGGLSELDKAGFIKRQLVETRQITKHVAQILDSRMNTKYDENDKLIREVKVITLKSKLVSDFRKDFQFYKVREINNYHHAHDAYLNAVVGTALIKKYPKLESEFVYGDYKVYDVRKMIAKSEQEIGKATAKYFFYSNIMNFFKTEITLANGEIRKRPLIETNGETGEIVWDKGRDFATVRKVLSMPQVNIVKKTEVQTGGFSKESILPKRNSDKLIARKKDWDPKKYGGFDSPTVAYSVLVVAKVEKGKSKKLKSVKELLGITIMERSSFEKNPIDFLEAKGYKEVKKDLIIKLPKYSLFELENGRKRMLASAGELQKGNELALPSKYVNFLYLASHYEKLKGSPEDNEQKQLFVEQHKHYLDEIIEQISEFSKRVILADANLDKVLSAYNKHRDKPIREQAENIIHLFTLTNLGAPAAFKYFDTTIDRKRYTSTKEVLDATLIHQSITGLYETRIDLSQLGGDGGPAPGGSEAAAKGGTLNIEDEYRLHETSKEPDVSLGSTWLSDFPQAWAETGGMGLAVRQAPLIIPLKATSTPVSIKQYPMSQEARLGIKPHIQRLLDQGILVPCQSPWNTPLLPVKKPGTNDYRPVQDLREVNKRVEDIHPTVPNPYNLLSGLPPSHQWYTVLDLKDAFFCLRLHPTSQPLFAFEWRDPEMGISGQLTWTRLPQGFKNSPTLFNEALHRDLAGFRIQHPDLILLQYVDDLLLAATSELDCQQGTRALLQTLGDLGYRASAKKAQICQKQVKYLGYLLKEGQRWLTEARKETVMGQPIPKTPRQLREFLGKAGFCRLFIPGFAEMAAPLYPLTKPGTLFNWGPDQQKAFQEIKQALLTAPALGLPDLTKPFELFVDEKQGYAKGVLTQKLGPWRRPVAYLSKKLDPVAAGWPPCLRMVAAIAVLTKDAGKLTMGQPLVILAPHAVEALVKQPPDRWLSNARMTHYQALLLDTDRVQFGPVVALNPATLLPLPEEGLQHDCLDILAEAHGTRSDLMDQPLPDADHTWYTDGSSFLQEGQRKAGAAVTTETEVIWARALPAGTSAQRAELIALTQALKMAEGKKLNVYTDSRYAFATAHIHGEIYRRRGWLTSEGKEIKNKDEILALLKALFLPKRLSIIHCPGHQKGNSAEARGNRMADQAAREVATRETPETSTLLAGKRTADGSEFEKRTADGSEFESPKKKAKVE

SEQ ID NO: 2333 - protein, 2100 aa, synthetic construct
MPAAKRVKLDGGDKKYSIGLDIGTNSVGWAVITDEYKVPSKKFKVLGNTDRHSIKKNLIGALLFDSGETAEATRLKRTARRRYTRRKNRICYLQEIFSNEMAKVDDSFFHRLEESFLVEEDKKHERHPIFGNIVDEVAYHEKYPTIYHLRKKLVDSTDKADLRLIYLALAHMIKFRGHFLIEGDLNPDNSDVDKLFIQLVQTYNQLFEENPINASGVDAKAILSARLSKSRRLENLIAQLPGEKKNGLFGNLIALSLGLTPNFKSNFDLAEDAKLQLSKDTYDDDLDNLLAQIGDQYADLFLAAKNLSDAILLSDILRVNTEITKAPLSASMIKRYDEHHQDLTLLKALVRQQLPEKYKEIFFDQSKNGYAGYIDGGASQEEFYKFIKPILEKMDGTEELLVKLNREDLLRKQRTFDNGSIPHQIHLGELHAILRRQEDFYPFLKDNREKIEKILTFRIPYYVGPLARGNSRFAWMTRKSEETITPWNFEEVVDKGASAQSFIERMTNFDKNLPNEKVLPKHSLLYEYFTVYNELTKVKYVTEGMRKPAFLSGEQKKAIVDLLFKTNRKVTVKQLKEDYFKKIECFDSVEISGVEDRFNASLGTYHDLLKIIKDKDFLDNEENEDILEDIVLTLTLFEDREMIEERLKTYAHLFDDKVMKQLKRRRYTGWGRLSRKLINGIRDKQSGKTILDFLKSDGFANRNFMQLIHDDSLTFKEDIQKAQVSGQGDSLHEHIANLAGSPAIKKGILQTVKVVDELVKVMGRHKPENIVIEMARENQTTQKGQKNSRERMKRIEEGIKELGSQILKEHPVENTQLQNEKLYLYYLQNGRDMYVDQELDINRLSDYDVDHIVPQSFLKDDSIDNKVLTRSDKARGKSDNVPSEEVVKKMKNYWRQLLNAKLITQRKFDNLTKAERGGLSELDKAGFIKRQLVETRQITKHVAQILDSRMNTKYDENDKLIREVKVITLKSKLVSDFRKDFQFYKVREINNYHHAHDAYLNAVVGTALIKKYPKLESEFVYGDYKVYDVRKMIAKSEQEIGKATAKYFFYSNIMNFFKTEITLANGEIRKRPLIETNGETGEIVWDKGRDFATVRKVLSMPQVNIVKKTEVQTGGFSKESILPKRNSDKLIARKKDWDPKKYGGFDSPTVAYSVLVVAKVEKGKSKKLKSVKELLGITIMERSSFEKNPIDFLEAKGYKEVKKDLIIKLPKYSLFELENGRKRMLASAGELQKGNELALPSKYVNFLYLASHYEKLKGSPEDNEQKQLFVEQHKHYLDEIIEQISEFSKRVILADANLDKVLSAYNKHRDKPIREQAENIIHLFTLTNLGAPAAFKYFDTTIDRKRYTSTKEVLDATLIHQSITGLYETRIDLSQLGGDGGGGGGSGGGGSGGGGSGGTLNIEDEYRLHETSKEPDVSLGSTWLSDFPQAWAETGGMGLAVRQAPLIIPLKATSTPVSIKQYPMSQEARLGIKPHIQRLLDQGILVPCQSPWNTPLLPVKKPGTNDYRPVQDLREVNKRVEDIHPTVPNPYNLLSGLPPSHQWYTVLDLKDAFFCLRLHPTSQPLFAFEWRDPEMGISGQLTWTRLPQGFKNSPTLFNEALHRDLAGFRIQHPDLILLQYVDDLLLAATSELDCQQGTRALLQTLGDLGYRASAKKAQICQKQVKYLGYLLKEGQRWLTEARKETVMGQPIPKTPRQLREFLGKAGFCRLFIPGFAEMAAPLYPLTKPGTLFNWGPDQQKAFQEIKQALLTAPALGLPDLTKPFELFVDEKQGYAKGVLTQKLGPWRRPVAYLSKKLDPVAAGWPPCLRMVAAIAVLTKDAGKLTMGQPLVILAPHAVEALVKQPPDRWLSNARMTHYQALLLDTDRVQFGPVVALNPATLLPLPEEGLQHDCLDILAEAHGTRSDLMDQPLPDADHTWYTDGSSFLQEGQRKAGAAVTTETEVIWARALPAGTSAQRAELIALTQALKMAEGKKLNVYTDSRYAFATAHIHGEIYRRRGWLTSEGKEIKNKDEILALLKALFLPKRLSIIHCPGHQKGNSAEARGNRMADQAAREVATRETPETSTLLAGKRTADGSEFEKRTADGSEFESPKKKAKVE

SEQ ID NO: 2334 - protein, 2096 aa, synthetic construct
MPAAKRVKLDGGDKKYSIGLDIGTNSVGWAVITDEYKVPSKKFKVLGNTDRHSIKKNLIGALLFDSGETAEATRLKRTARRRYTRRKNRICYLQEIFSNEMAKVDDSFFHRLEESFLVEEDKKHERHPIFGNIVDEVAYHEKYPTIYHLRKKLVDSTDKADLRLIYLALAHMIKFRGHFLIEGDLNPDNSDVDKLFIQLVQTYNQLFEENPINASGVDAKAILSARLSKSRRLENLIAQLPGEKKNGLFGNLIALSLGLTPNFKSNFDLAEDAKLQLSKDTYDDDLDNLLAQIGDQYADLFLAAKNLSDAILLSDILRVNTEITKAPLSASMIKRYDEHHQDLTLLKALVRQQLPEKYKEIFFDQSKNGYAGYIDGGASQEEFYKFIKPILEKMDGTEELLVKLNREDLLRKQRTFDNGSIPHQIHLGELHAILRRQEDFYPFLKDNREKIEKILTFRIPYYVGPLARGNSRFAWMTRKSEETITPWNFEEVVDKGASAQSFIERMTNFDKNLPNEKVLPKHSLLYEYFTVYNELTKVKYVTEGMRKPAFLSGEQKKAIVDLLFKTNRKVTVKQLKEDYFKKIECFDSVEISGVEDRFNASLGTYHDLLKIIKDKDFLDNEENEDILEDIVLTLTLFEDREMIEERLKTYAHLFDDKVMKQLKRRRYTGWGRLSRKLINGIRDKQSGKTILDFLKSDGFANRNFMQLIHDDSLTFKEDIQKAQVSGQGDSLHEHIANLAGSPAIKKGILQTVKVVDELVKVMGRHKPENIVIEMARENQTTQKGQKNSRERMKRIEEGIKELGSQILKEHPVENTQLQNEKLYLYYLQNGRDMYVDQELDINRLSDYDVDHIVPQSFLKDDSIDNKVLTRSDKARGKSDNVPSEEVVKKMKNYWRQLLNAKLITQRKFDNLTKAERGGLSELDKAGFIKRQLVETRQITKHVAQILDSRMNTKYDENDKLIREVKVITLKSKLVSDFRKDFQFYKVREINNYHHAHDAYLNAVVGTALIKKYPKLESEFVYGDYKVYDVRKMIAKSEQEIGKATAKYFFYSNIMNFFKTEITLANGEIRKRPLIETNGETGEIVWDKGRDFATVRKVLSMPQVNIVKKTEVQTGGFSKESILPKRNSDKLIARKKDWDPKKYGGFDSPTVAYSVLVVAKVEKGKSKKLKSVKELLGITIMERSSFEKNPIDFLEAKGYKEVKKDLIIKLPKYSLFELENGRKRMLASAGELQKGNELALPSKYVNFLYLASHYEKLKGSPEDNEQKQLFVEQHKHYLDEIIEQISEFSKRVILADANLDKVLSAYNKHRDKPIREQAENIIHLFTLTNLGAPAAFKYFDTTIDRKRYTSTKEVLDATLIHQSITGLYETRIDLSQLGGDGGEAAAKGGSGGGGGTLNIEDEYRLHETSKEPDVSLGSTWLSDFPQAWAETGGMGLAVRQAPLIIPLKATSTPVSIKQYPMSQEARLGIKPHIQRLLDQGILVPCQSPWNTPLLPVKKPGTNDYRPVQDLREVNKRVEDIHPTVPNPYNLLSGLPPSHQWYTVLDLKDAFFCLRLHPTSQPLFAFEWRDPEMGISGQLTWTRLPQGFKNSPTLFNEALHRDLAGFRIQHPDLILLQYVDDLLLAATSELDCQQGTRALLQTLGDLGYRASAKKAQICQKQVKYLGYLLKEGQRWLTEARKETVMGQPIPKTPRQLREFLGKAGFCRLFIPGFAEMAAPLYPLTKPGTLFNWGPDQQKAFQEIKQALLTAPALGLPDLTKPFELFVDEKQGYAKGVLTQKLGPWRRPVAYLSKKLDPVAAGWPPCLRMVAAIAVLTKDAGKLTMGQPLVILAPHAVEALVKQPPDRWLSNARMTHYQALLLDTDRVQFGPVVALNPATLLPLPEEGLQHDCLDILAEAHGTRSDLMDQPLPDADHTWYTDGSSFLQEGQRKAGAAVTTETEVIWARALPAGTSAQRAELIALTQALKMAEGKKLNVYTDSRYAFATAHIHGEIYRRRGWLTSEGKEIKNKDEILALLKALFLPKRLSIIHCPGHQKGNSAEARGNRMADQAAREVATRETPETSTLLAGKRTADGSEFEKRTADGSEFESPKKKAKVE

SEQ ID NO: 2335 - protein, 2091 aa, synthetic construct
MPAAKRVKLDGGDKKYSIGLDIGTNSVGWAVITDEYKVPSKKFKVLGNTDRHSIKKNLIGALLFDSGETAEATRLKRTARRRYTRRKNRICYLQEIFSNEMAKVDDSFFHRLEESFLVEEDKKHERHPIFGNIVDEVAYHEKYPTIYHLRKKLVDSTDKADLRLIYLALAHMIKFRGHFLIEGDLNPDNSDVDKLFIQLVQTYNQLFEENPINASGVDAKAILSARLSKSRRLENLIAQLPGEKKNGLFGNLIALSLGLTPNFKSNFDLAEDAKLQLSKDTYDDDLDNLLAQIGDQYADLFLAAKNLSDAILLSDILRVNTEITKAPLSASMIKRYDEHHQDLTLLKALVRQQLPEKYKEIFFDQSKNGYAGYIDGGASQEEFYKFIKPILEKMDGTEELLVKLNREDLLRKQRTFDNGSIPHQIHLGELHAILRRQEDFYPFLKDNREKIEKILTFRIPYYVGPLARGNSRFAWMTRKSEETITPWNFEEVVDKGASAQSFIERMTNFDKNLPNEKVLPKHSLLYEYFTVYNELTKVKYVTEGMRKPAFLSGEQKKAIVDLLFKTNRKVTVKQLKEDYFKKIECFDSVEISGVEDRFNASLGTYHDLLKIIKDKDFLDNEENEDILEDIVLTLTLFEDREMIEERLKTYAHLFDDKVMKQLKRRRYTGWGRLSRKLINGIRDKQSGKTILDFLKSDGFANRNFMQLIHDDSLTFKEDIQKAQVSGQGDSLHEHIANLAGSPAIKKGILQTVKVVDELVKVMGRHKPENIVIEMARENQTTQKGQKNSRERMKRIEEGIKELGSQILKEHPVENTQLQNEKLYLYYLQNGRDMYVDQELDINRLSDYDVDHIVPQSFLKDDSIDNKVLTRSDKARGKSDNVPSEEVVKKMKNYWRQLLNAKLITQRKFDNLTKAERGGLSELDKAGFIKRQLVETRQITKHVAQILDSRMNTKYDENDKLIREVKVITLKSKLVSDFRKDFQFYKVREINNYHHAHDAYLNAVVGTALIKKYPKLESEFVYGDYKVYDVRKMIAKSEQEIGKATAKYFFYSNIMNFFKTEITLANGEIRKRPLIETNGETGEIVWDKGRDFATVRKVLSMPQVNIVKKTEVQTGGFSKESILPKRNSDKLIARKKDWDPKKYGGFDSPTVAYSVLVVAKVEKGKSKKLKSVKELLGITIMERSSFEKNPIDFLEAKGYKEVKKDLIIKLPKYSLFELENGRKRMLASAGELQKGNELALPSKYVNFLYLASHYEKLKGSPEDNEQKQLFVEQHKHYLDEIIEQISEFSKRVILADANLDKVLSAYNKHRDKPIREQAENIIHLFTLTNLGAPAAFKYFDTTIDRKRYTSTKEVLDATLIHQSITGLYETRIDLSQLGGDGGGGSGGGGGTLNIEDEYRLHETSKEPDVSLGSTWLSDFPQAWAETGGMGLAVRQAPLIIPLKATSTPVSIKQYPMSQEARLGIKPHIQRLLDQGILVPCQSPWNTPLLPVKKPGTNDYRPVQDLREVNKRVEDIHPTVPNPYNLLSGLPPSHQWYTVLDLKDAFFCLRLHPTSQPLFAFEWRDPEMGISGQLTWTRLPQGFKNSPTLFNEALHRDLAGFRIQHPDLILLQYVDDLLLAATSELDCQQGTRALLQTLGDLGYRASAKKAQICQKQVKYLGYLLKEGQRWLTEARKETVMGQPIPKTPRQLREFLGKAGFCRLFIPGFAEMAAPLYPLTKPGTLFNWGPDQQKAFQEIKQALLTAPALGLPDLTKPFELFVDEKQGYAKGVLTQKLGPWRRPVAYLSKKLDPVAAGWPPCLRMVAAIAVLTKDAGKLTMGQPLVILAPHAVEALVKQPPDRWLSNARMTHYQALLLDTDRVQFGPVVALNPATLLPLPEEGLQHDCLDILAEAHGTRSDLMDQPLPDADHTWYTDGSSFLQEGQRKAGAAVTTETEVIWARALPAGTSAQRAELIALTQALKMAEGKKLNVYTDSRYAFATAHIHGEIYRRRGWLTSEGKEIKNKDEILALLKALFLPKRLSIIHCPGHQKGNSAEARGNRMADQAAREVATRETPETSTLLAGKRTADGSEFEKRTADGSEFESPKKKAKVE

SEQ ID NO: 2336 - protein, 2091 aa, synthetic construct
MPAAKRVKLDGGDKKYSIGLDIGTNSVGWAVITDEYKVPSKKFKVLGNTDRHSIKKNLIGALLFDSGETAEATRLKRTARRRYTRRKNRICYLQEIFSNEMAKVDDSFFHRLEESFLVEEDKKHERHPIFGNIVDEVAYHEKYPTIYHLRKKLVDSTDKADLRLIYLALAHMIKFRGHFLIEGDLNPDNSDVDKLFIQLVQTYNQLFEENPINASGVDAKAILSARLSKSRRLENLIAQLPGEKKNGLFGNLIALSLGLTPNFKSNFDLAEDAKLQLSKDTYDDDLDNLLAQIGDQYADLFLAAKNLSDAILLSDILRVNTEITKAPLSASMIKRYDEHHQDLTLLKALVRQQLPEKYKEIFFDQSKNGYAGYIDGGASQEEFYKFIKPILEKMDGTEELLVKLNREDLLRKQRTFDNGSIPHQIHLGELHAILRRQEDFYPFLKDNREKIEKILTFRIPYYVGPLARGNSRFAWMTRKSEETITPWNFEEVVDKGASAQSFIERMTNFDKNLPNEKVLPKHSLLYEYFTVYNELTKVKYVTEGMRKPAFLSGEQKKAIVDLLFKTNRKVTVKQLKEDYFKKIECFDSVEISGVEDRFNASLGTYHDLLKIIKDKDFLDNEENEDILEDIVLTLTLFEDREMIEERLKTYAHLFDDKVMKQLKRRRYTGWGRLSRKLINGIRDKQSGKTILDFLKSDGFANRNFMQLIHDDSLTFKEDIQKAQVSGQGDSLHEHIANLAGSPAIKKGILQTVKVVDELVKVMGRHKPENIVIEMARENQTTQKGQKNSRERMKRIEEGIKELGSQILKEHPVENTQLQNEKLYLYYLQNGRDMYVDQELDINRLSDYDVDHIVPQSFLKDDSIDNKVLTRSDKARGKSDNVPSEEVVKKMKNYWRQLLNAKLITQRKFDNLTKAERGGLSELDKAGFIKRQLVETRQITKHVAQILDSRMNTKYDENDKLIREVKVITLKSKLVSDFRKDFQFYKVREINNYHHAHDAYLNAVVGTALIKKYPKLESEFVYGDYKVYDVRKMIAKSEQEIGKATAKYFFYSNIMNFFKTEITLANGEIRKRPLIETNGETGEIVWDKGRDFATVRKVLSMPQVNIVKKTEVQTGGFSKESILPKRNSDKLIARKKDWDPKKYGGFDSPTVAYSVLVVAKVEKGKSKKLKSVKELLGITIMERSSFEKNPIDFLEAKGYKEVKKDLIIKLPKYSLFELENGRKRMLASAGELQKGNELALPSKYVNFLYLASHYEKLKGSPEDNEQKQLFVEQHKHYLDEIIEQISEFSKRVILADANLDKVLSAYNKHRDKPIREQAENIIHLFTLTNLGAPAAFKYFDTTIDRKRYTSTKEVLDATLIHQSITGLYETRIDLSQLGGDGGPAPGSSGGTLNIEDEYRLHETSKEPDVSLGSTWLSDFPQAWAETGGMGLAVRQAPLIIPLKATSTPVSIKQYPMSQEARLGIKPHIQRLLDQGILVPCQSPWNTPLLPVKKPGTNDYRPVQDLREVNKRVEDIHPTVPNPYNLLSGLPPSHQWYTVLDLKDAFFCLRLHPTSQPLFAFEWRDPEMGISGQLTWTRLPQGFKNSPTLFNEALHRDLAGFRIQHPDLILLQYVDDLLLAATSELDCQQGTRALLQTLGDLGYRASAKKAQICQKQVKYLGYLLKEGQRWLTEARKETVMGQPIPKTPRQLREFLGKAGFCRLFIPGFAEMAAPLYPLTKPGTLFNWGPDQQKAFQEIKQALLTAPALGLPDLTKPFELFVDEKQGYAKGVLTQKLGPWRRPVAYLSKKLDPVAAGWPPCLRMVAAIAVLTKDAGKLTMGQPLVILAPHAVEALVKQPPDRWLSNARMTHYQALLLDTDRVQFGPVVALNPATLLPLPEEGLQHDCLDILAEAHGTRSDLMDQPLPDADHTWYTDGSSFLQEGQRKAGAAVTTETEVIWARALPAGTSAQRAELIALTQALKMAEGKKLNVYTDSRYAFATAHIHGEIYRRRGWLTSEGKEIKNKDEILALLKALFLPKRLSIIHCPGHQKGNSAEARGNRMADQAAREVATRETPETSTLLAGKRTADGSEFEKRTADGSEFESPKKKAKVE

SEQ ID NO: 2337 - protein, 2093 aa, synthetic construct
MPAAKRVKLDGGDKKYSIGLDIGTNSVGWAVITDEYKVPSKKFKVLGNTDRHSIKKNLIGALLFDSGETAEATRLKRTARRRYTRRKNRICYLQEIFSNEMAKVDDSFFHRLEESFLVEEDKKHERHPIFGNIVDEVAYHEKYPTIYHLRKKLVDSTDKADLRLIYLALAHMIKFRGHFLIEGDLNPDNSDVDKLFIQLVQTYNQLFEENPINASGVDAKAILSARLSKSRRLENLIAQLPGEKKNGLFGNLIALSLGLTPNFKSNFDLAEDAKLQLSKDTYDDDLDNLLAQIGDQYADLFLAAKNLSDAILLSDILRVNTEITKAPLSASMIKRYDEHHQDLTLLKALVRQQLPEKYKEIFFDQSKNGYAGYIDGGASQEEFYKFIKPILEKMDGTEELLVKLNREDLLRKQRTFDNGSIPHQIHLGELHAILRRQEDFYPFLKDNREKIEKILTFRIPYYVGPLARGNSRFAWMTRKSEETITPWNFEEVVDKGASAQSFIERMTNFDKNLPNEKVLPKHSLLYEYFTVYNELTKVKYVTEGMRKPAFLSGEQKKAIVDLLFKTNRKVTVKQLKEDYFKKIECFDSVEISGVEDRFNASLGTYHDLLKIIKDKDFLDNEENEDILEDIVLTLTLFEDREMIEERLKTYAHLFDDKVMKQLKRRRYTGWGRLSRKLINGIRDKQSGKTILDFLKSDGFANRNFMQLIHDDSLTFKEDIQKAQVSGQGDSLHEHIANLAGSPAIKKGILQTVKVVDELVKVMGRHKPENIVIEMARENQTTQKGQKNSRERMKRIEEGIKELGSQILKEHPVENTQLQNEKLYLYYLQNGRDMYVDQELDINRLSDYDVDHIVPQSFLKDDSIDNKVLTRSDKARGKSDNVPSEEVVKKMKNYWRQLLNAKLITQRKFDNLTKAERGGLSELDKAGFIKRQLVETRQITKHVAQILDSRMNTKYDENDKLIREVKVITLKSKLVSDFRKDFQFYKVREINNYHHAHDAYLNAVVGTALIKKYPKLESEFVYGDYKVYDVRKMIAKSEQEIGKATAKYFFYSNIMNFFKTEITLANGEIRKRPLIETNGETGEIVWDKGRDFATVRKVLSMPQVNIVKKTEVQTGGFSKESILPKRNSDKLIARKKDWDPKKYGGFDSPTVAYSVLVVAKVEKGKSKKLKSVKELLGITIMERSSFEKNPIDFLEAKGYKEVKKDLIIKLPKYSLFELENGRKRMLASAGELQKGNELALPSKYVNFLYLASHYEKLKGSPEDNEQKQLFVEQHKHYLDEIIEQISEFSKRVILADANLDKVLSAYNKHRDKPIREQAENIIHLFTLTNLGAPAAFKYFDTTIDRKRYTSTKEVLDATLIHQSITGLYETRIDLSQLGGDGGEAAAKPAPGGTLNIEDEYRLHETSKEPDVSLGSTWLSDFPQAWAETGGMGLAVRQAPLIIPLKATSTPVSIKQYPMSQEARLGIKPHIQRLLDQGILVPCQSPWNTPLLPVKKPGTNDYRPVQDLREVNKRVEDIHPTVPNPYNLLSGLPPSHQWYTVLDLKDAFFCLRLHPTSQPLFAFEWRDPEMGISGQLTWTRLPQGFKNSPTLFNEALHRDLAGFRIQHPDLILLQYVDDLLLAATSELDCQQGTRALLQTLGDLGYRASAKKAQICQKQVKYLGYLLKEGQRWLTEARKETVMGQPIPKTPRQLREFLGKAGFCRLFIPGFAEMAAPLYPLTKPGTLFNWGPDQQKAFQEIKQALLTAPALGLPDLTKPFELFVDEKQGYAKGVLTQKLGPWRRPVAYLSKKLDPVAAGWPPCLRMVAAIAVLTKDAGKLTMGQPLVILAPHAVEALVKQPPDRWLSNARMTHYQALLLDTDRVQFGPVVALNPATLLPLPEEGLQHDCLDILAEAHGTRSDLMDQPLPDADHTWYTDGSSFLQEGQRKAGAAVTTETEVIWARALPAGTSAQRAELIALTQALKMAEGKKLNVYTDSRYAFATAHIHGEIYRRRGWLTSEGKEIKNKDEILALLKALFLPKRLSIIHCPGHQKGNSAEARGNRMADQAAREVATRETPETSTLLAGKRTADGSEFEKRTADGSEFESPKKKAKVE

SEQ ID NO: 2338 - protein, 2096 aa, synthetic construct
MPAAKRVKLDGGDKKYSIGLDIGTNSVGWAVITDEYKVPSKKFKVLGNTDRHSIKKNLIGALLFDSGETAEATRLKRTARRRYTRRKNRICYLQEIFSNEMAKVDDSFFHRLEESFLVEEDKKHERHPIFGNIVDEVAYHEKYPTIYHLRKKLVDSTDKADLRLIYLALAHMIKFRGHFLIEGDLNPDNSDVDKLFIQLVQTYNQLFEENPINASGVDAKAILSARLSKSRRLENLIAQLPGEKKNGLFGNLIALSLGLTPNFKSNFDLAEDAKLQLSKDTYDDDLDNLLAQIGDQYADLFLAAKNLSDAILLSDILRVNTEITKAPLSASMIKRYDEHHQDLTLLKALVRQQLPEKYKEIFFDQSKNGYAGYIDGGASQEEFYKFIKPILEKMDGTEELLVKLNREDLLRKQRTFDNGSIPHQIHLGELHAILRRQEDFYPFLKDNREKIEKILTFRIPYYVGPLARGNSRFAWMTRKSEETITPWNFEEVVDKGASAQSFIERMTNFDKNLPNEKVLPKHSLLYEYFTVYNELTKVKYVTEGMRKPAFLSGEQKKAIVDLLFKTNRKVTVKQLKEDYFKKIECFDSVEISGVEDRFNASLGTYHDLLKIIKDKDFLDNEENEDILEDIVLTLTLFEDREMIEERLKTYAHLFDDKVMKQLKRRRYTGWGRLSRKLINGIRDKQSGKTILDFLKSDGFANRNFMQLIHDDSLTFKEDIQKAQVSGQGDSLHEHIANLAGSPAIKKGILQTVKVVDELVKVMGRHKPENIVIEMARENQTTQKGQKNSRERMKRIEEGIKELGSQILKEHPVENTQLQNEKLYLYYLQNGRDMYVDQELDINRLSDYDVDHIVPQSFLKDDSIDNKVLTRSDKARGKSDNVPSEEVVKKMKNYWRQLLNAKLITQRKFDNLTKAERGGLSELDKAGFIKRQLVETRQITKHVAQILDSRMNTKYDENDKLIREVKVITLKSKLVSDFRKDFQFYKVREINNYHHAHDAYLNAVVGTALIKKYPKLESEFVYGDYKVYDVRKMIAKSEQEIGKATAKYFFYSNIMNFFKTEITLANGEIRKRPLIETNGETGEIVWDKGRDFATVRKVLSMPQVNIVKKTEVQTGGFSKESILPKRNSDKLIARKKDWDPKKYGGFDSPTVAYSVLVVAKVEKGKSKKLKSVKELLGITIMERSSFEKNPIDFLEAKGYKEVKKDLIIKLPKYSLFELENGRKRMLASAGELQKGNELALPSKYVNFLYLASHYEKLKGSPEDNEQKQLFVEQHKHYLDEIIEQISEFSKRVILADANLDKVLSAYNKHRDKPIREQAENIIHLFTLTNLGAPAAFKYFDTTIDRKRYTSTKEVLDATLIHQSITGLYETRIDLSQLGGDGGGGSPAPEAAAKGGTLNIEDEYRLHETSKEPDVSLGSTWLSDFPQAWAETGGMGLAVRQAPLIIPLKATSTPVSIKQYPMSQEARLGIKPHIQRLLDQGILVPCQSPWNTPLLPVKKPGTNDYRPVQDLREVNKRVEDIHPTVPNPYNLLSGLPPSHQWYTVLDLKDAFFCLRLHPTSQPLFAFEWRDPEMGISGQLTWTRLPQGFKNSPTLFNEALHRDLAGFRIQHPDLILLQYVDDLLLAATSELDCQQGTRALLQTLGDLGYRASAKKAQICQKQVKYLGYLLKEGQRWLTEARKETVMGQPIPKTPRQLREFLGKAGFCRLFIPGFAEMAAPLYPLTKPGTLFNWGPDQQKAFQEIKQALLTAPALGLPDLTKPFELFVDEKQGYAKGVLTQKLGPWRRPVAYLSKKLDPVAAGWPPCLRMVAAIAVLTKDAGKLTMGQPLVILAPHAVEALVKQPPDRWLSNARMTHYQALLLDTDRVQFGPVVALNPATLLPLPEEGLQHDCLDILAEAHGTRSDLMDQPLPDADHTWYTDGSSFLQEGQRKAGAAVTTETEVIWARALPAGTSAQRAELIALTQALKMAEGKKLNVYTDSRYAFATAHIHGEIYRRRGWLTSEGKEIKNKDEILALLKALFLPKRLSIIHCPGHQKGNSAEARGNRMADQAAREVATRETPETSTLLAGKRTADGSEFEKRTADGSEFESPKKKAKVE

SEQ ID NO: 2339 - protein, 2094 aa, synthetic construct
MPAAKRVKLDGGDKKYSIGLDIGTNSVGWAVITDEYKVPSKKFKVLGNTDRHSIKKNLIGALLFDSGETAEATRLKRTARRRYTRRKNRICYLQEIFSNEMAKVDDSFFHRLEESFLVEEDKKHERHPIFGNIVDEVAYHEKYPTIYHLRKKLVDSTDKADLRLIYLALAHMIKFRGHFLIEGDLNPDNSDVDKLFIQLVQTYNQLFEENPINASGVDAKAILSARLSKSRRLENLIAQLPGEKKNGLFGNLIALSLGLTPNFKSNFDLAEDAKLQLSKDTYDDDLDNLLAQIGDQYADLFLAAKNLSDAILLSDILRVNTEITKAPLSASMIKRYDEHHQDLTLLKALVRQQLPEKYKEIFFDQSKNGYAGYIDGGASQEEFYKFIKPILEKMDGTEELLVKLNREDLLRKQRTFDNGSIPHQIHLGELHAILRRQEDFYPFLKDNREKIEKILTFRIPYYVGPLARGNSRFAWMTRKSEETITPWNFEEVVDKGASAQSFIERMTNFDKNLPNEKVLPKHSLLYEYFTVYNELTKVKYVTEGMRKPAFLSGEQKKAIVDLLFKTNRKVTVKQLKEDYFKKIECFDSVEISGVEDRFNASLGTYHDLLKIIKDKDFLDNEENEDILEDIVLTLTLFEDREMIEERLKTYAHLFDDKVMKQLKRRRYTGWGRLSRKLINGIRDKQSGKTILDFLKSDGFANRNFMQLIHDDSLTFKEDIQKAQVSGQGDSLHEHIANLAGSPAIKKGILQTVKVVDELVKVMGRHKPENIVIEMARENQTTQKGQKNSRERMKRIEEGIKELGSQILKEHPVENTQLQNEKLYLYYLQNGRDMYVDQELDINRLSDYDVDHIVPQSFLKDDSIDNKVLTRSDKARGKSDNVPSEEVVKKMKNYWRQLLNAKLITQRKFDNLTKAERGGLSELDKAGFIKRQLVETRQITKHVAQILDSRMNTKYDENDKLIREVKVITLKSKLVSDFRKDFQFYKVREINNYHHAHDAYLNAVVGTALIKKYPKLESEFVYGDYKVYDVRKMIAKSEQEIGKATAKYFFYSNIMNFFKTEITLANGEIRKRPLIETNGETGEIVWDKGRDFATVRKVLSMPQVNIVKKTEVQTGGFSKESILPKRNSDKLIARKKDWDPKKYGGFDSPTVAYSVLVVAKVEKGKSKKLKSVKELLGITIMERSSFEKNPIDFLEAKGYKEVKKDLIIKLPKYSLFELENGRKRMLASAGELQKGNELALPSKYVNFLYLASHYEKLKGSPEDNEQKQLFVEQHKHYLDEIIEQISEFSKRVILADANLDKVLSAYNKHRDKPIREQAENIIHLFTLTNLGAPAAFKYFDTTIDRKRYTSTKEVLDATLIHQSITGLYETRIDLSQLGGDGGGGSGSSPAPGGTLNIEDEYRLHETSKEPDVSLGSTWLSDFPQAWAETGGMGLAVRQAPLIIPLKATSTPVSIKQYPMSQEARLGIKPHIQRLLDQGILVPCQSPWNTPLLPVKKPGTNDYRPVQDLREVNKRVEDIHPTVPNPYNLLSGLPPSHQWYTVLDLKDAFFCLRLHPTSQPLFAFEWRDPEMGISGQLTWTRLPQGFKNSPTLFNEALHRDLAGFRIQHPDLILLQYVDDLLLAATSELDCQQGTRALLQTLGDLGYRASAKKAQICQKQVKYLGYLLKEGQRWLTEARKETVMGQPIPKTPRQLREFLGKAGFCRLFIPGFAEMAAPLYPLTKPGTLFNWGPDQQKAFQEIKQALLTAPALGLPDLTKPFELFVDEKQGYAKGVLTQKLGPWRRPVAYLSKKLDPVAAGWPPCLRMVAAIAVLTKDAGKLTMGQPLVILAPHAVEALVKQPPDRWLSNARMTHYQALLLDTDRVQFGPVVALNPATLLPLPEEGLQHDCLDILAEAHGTRSDLMDQPLPDADHTWYTDGSSFLQEGQRKAGAAVTTETEVIWARALPAGTSAQRAELIALTQALKMAEGKKLNVYTDSRYAFATAHIHGEIYRRRGWLTSEGKEIKNKDEILALLKALFLPKRLSIIHCPGHQKGNSAEARGNRMADQAAREVATRETPETSTLLAGKRTADGSEFEKRTADGSEFESPKKKAKVE

SEQ ID NO: 2340 - protein, 2091 aa, synthetic construct
MPAAKRVKLDGGDKKYSIGLDIGTNSVGWAVITDEYKVPSKKFKVLGNTDRHSIKKNLIGALLFDSGETAEATRLKRTARRRYTRRKNRICYLQEIFSNEMAKVDDSFFHRLEESFLVEEDKKHERHPIFGNIVDEVAYHEKYPTIYHLRKKLVDSTDKADLRLIYLALAHMIKFRGHFLIEGDLNPDNSDVDKLFIQLVQTYNQLFEENPINASGVDAKAILSARLSKSRRLENLIAQLPGEKKNGLFGNLIALSLGLTPNFKSNFDLAEDAKLQLSKDTYDDDLDNLLAQIGDQYADLFLAAKNLSDAILLSDILRVNTEITKAPLSASMIKRYDEHHQDLTLLKALVRQQLPEKYKEIFFDQSKNGYAGYIDGGASQEEFYKFIKPILEKMDGTEELLVKLNREDLLRKQRTFDNGSIPHQIHLGELHAILRRQEDFYPFLKDNREKIEKILTFRIPYYVGPLARGNSRFAWMTRKSEETITPWNFEEVVDKGASAQSFIERMTNFDKNLPNEKVLPKHSLLYEYFTVYNELTKVKYVTEGMRKPAFLSGEQKKAIVDLLFKTNRKVTVKQLKEDYFKKIECFDSVEISGVEDRFNASLGTYHDLLKIIKDKDFLDNEENEDILEDIVLTLTLFEDREMIEERLKTYAHLFDDKVMKQLKRRRYTGWGRLSRKLINGIRDKQSGKTILDFLKSDGFANRNFMQLIHDDSLTFKEDIQKAQVSGQGDSLHEHIANLAGSPAIKKGILQTVKVVDELVKVMGRHKPENIVIEMARENQTTQKGQKNSRERMKRIEEGIKELGSQILKEHPVENTQLQNEKLYLYYLQNGRDMYVDQELDINRLSDYDVDHIVPQSFLKDDSIDNKVLTRSDKARGKSDNVPSEEVVKKMKNYWRQLLNAKLITQRKFDNLTKAERGGLSELDKAGFIKRQLVETRQITKHVAQILDSRMNTKYDENDKLIREVKVITLKSKLVSDFRKDFQFYKVREINNYHHAHDAYLNAVVGTALIKKYPKLESEFVYGDYKVYDVRKMIAKSEQEIGKATAKYFFYSNIMNFFKTEITLANGEIRKRPLIETNGETGEIVWDKGRDFATVRKVLSMPQVNIVKKTEVQTGGFSKESILPKRNSDKLIARKKDWDPKKYGGFDSPTVAYSVLVVAKVEKGKSKKLKSVKELLGITIMERSSFEKNPIDFLEAKGYKEVKKDLIIKLPKYSLFELENGRKRMLASAGELQKGNELALPSKYVNFLYLASHYEKLKGSPEDNEQKQLFVEQHKHYLDEIIEQISEFSKRVILADANLDKVLSAYNKHRDKPIREQAENIIHLFTLTNLGAPAAFKYFDTTIDRKRYTSTKEVLDATLIHQSITGLYETRIDLSQLGGDGGPAPGGSGGTLNIEDEYRLHETSKEPDVSLGSTWLSDFPQAWAETGGMGLAVRQAPLIIPLKATSTPVSIKQYPMSQEARLGIKPHIQRLLDQGILVPCQSPWNTPLLPVKKPGTNDYRPVQDLREVNKRVEDIHPTVPNPYNLLSGLPPSHQWYTVLDLKDAFFCLRLHPTSQPLFAFEWRDPEMGISGQLTWTRLPQGFKNSPTLFNEALHRDLAGFRIQHPDLILLQYVDDLLLAATSELDCQQGTRALLQTLGDLGYRASAKKAQICQKQVKYLGYLLKEGQRWLTEARKETVMGQPIPKTPRQLREFLGKAGFCRLFIPGFAEMAAPLYPLTKPGTLFNWGPDQQKAFQEIKQALLTAPALGLPDLTKPFELFVDEKQGYAKGVLTQKLGPWRRPVAYLSKKLDPVAAGWPPCLRMVAAIAVLTKDAGKLTMGQPLVILAPHAVEALVKQPPDRWLSNARMTHYQALLLDTDRVQFGPVVALNPATLLPLPEEGLQHDCLDILAEAHGTRSDLMDQPLPDADHTWYTDGSSFLQEGQRKAGAAVTTETEVIWARALPAGTSAQRAELIALTQALKMAEGKKLNVYTDSRYAFATAHIHGEIYRRRGWLTSEGKEIKNKDEILALLKALFLPKRLSIIHCPGHQKGNSAEARGNRMADQAAREVATRETPETSTLLAGKRTADGSEFEKRTADGSEFESPKKKAKVE

SEQ ID NO: 2341 - protein, 2093 aa, synthetic construct
MPAAKRVKLDGGDKKYSIGLDIGTNSVGWAVITDEYKVPSKKFKVLGNTDRHSIKKNLIGALLFDSGETAEATRLKRTARRRYTRRKNRICYLQEIFSNEMAKVDDSFFHRLEESFLVEEDKKHERHPIFGNIVDEVAYHEKYPTIYHLRKKLVDSTDKADLRLIYLALAHMIKFRGHFLIEGDLNPDNSDVDKLFIQLVQTYNQLFEENPINASGVDAKAILSARLSKSRRLENLIAQLPGEKKNGLFGNLIALSLGLTPNFKSNFDLAEDAKLQLSKDTYDDDLDNLLAQIGDQYADLFLAAKNLSDAILLSDILRVNTEITKAPLSASMIKRYDEHHQDLTLLKALVRQQLPEKYKEIFFDQSKNGYAGYIDGGASQEEFYKFIKPILEKMDGTEELLVKLNREDLLRKQRTFDNGSIPHQIHLGELHAILRRQEDFYPFLKDNREKIEKILTFRIPYYVGPLARGNSRFAWMTRKSEETITPWNFEEVVDKGASAQSFIERMTNFDKNLPNEKVLPKHSLLYEYFTVYNELTKVKYVTEGMRKPAFLSGEQKKAIVDLLFKTNRKVTVKQLKEDYFKKIECFDSVEISGVEDRFNASLGTYHDLLKIIKDKDFLDNEENEDILEDIVLTLTLFEDREMIEERLKTYAHLFDDKVMKQLKRRRYTGWGRLSRKLINGIRDKQSGKTILDFLKSDGFANRNFMQLIHDDSLTFKEDIQKAQVSGQGDSLHEHIANLAGSPAIKKGILQTVKVVDELVKVMGRHKPENIVIEMARENQTTQKGQKNSRERMKRIEEGIKELGSQILKEHPVENTQLQNEKLYLYYLQNGRDMYVDQELDINRLSDYDVDHIVPQSFLKDDSIDNKVLTRSDKARGKSDNVPSEEVVKKMKNYWRQLLNAKLITQRKFDNLTKAERGGLSELDKAGFIKRQLVETRQITKHVAQILDSRMNTKYDENDKLIREVKVITLKSKLVSDFRKDFQFYKVREINNYHHAHDAYLNAVVGTALIKKYPKLESEFVYGDYKVYDVRKMIAKSEQEIGKATAKYFFYSNIMNFFKTEITLANGEIRKRPLIETNGETGEIVWDKGRDFATVRKVLSMPQVNIVKKTEVQTGGFSKESILPKRNSDKLIARKKDWDPKKYGGFDSPTVAYSVLVVAKVEKGKSKKLKSVKELLGITIMERSSFEKNPIDFLEAKGYKEVKKDLIIKLPKYSLFELENGRKRMLASAGELQKGNELALPSKYVNFLYLASHYEKLKGSPEDNEQKQLFVEQHKHYLDEIIEQISEFSKRVILADANLDKVLSAYNKHRDKPIREQAENIIHLFTLTNLGAPAAFKYFDTTIDRKRYTSTKEVLDATLIHQSITGLYETRIDLSQLGGDGGEAAAKGGSGGTLNIEDEYRLHETSKEPDVSLGSTWLSDFPQAWAETGGMGLAVRQAPLIIPLKATSTPVSIKQYPMSQEARLGIKPHIQRLLDQGILVPCQSPWNTPLLPVKKPGTNDYRPVQDLREVNKRVEDIHPTVPNPYNLLSGLPPSHQWYTVLDLKDAFFCLRLHPTSQPLFAFEWRDPEMGISGQLTWTRLPQGFKNSPTLFNEALHRDLAGFRIQHPDLILLQYVDDLLLAATSELDCQQGTRALLQTLGDLGYRASAKKAQICQKQVKYLGYLLKEGQRWLTEARKETVMGQPIPKTPRQLREFLGKAGFCRLFIPGFAEMAAPLYPLTKPGTLFNWGPDQQKAFQEIKQALLTAPALGLPDLTKPFELFVDEKQGYAKGVLTQKLGPWRRPVAYLSKKLDPVAAGWPPCLRMVAAIAVLTKDAGKLTMGQPLVILAPHAVEALVKQPPDRWLSNARMTHYQALLLDTDRVQFGPVVALNPATLLPLPEEGLQHDCLDILAEAHGTRSDLMDQPLPDADHTWYTDGSSFLQEGQRKAGAAVTTETEVIWARALPAGTSAQRAELIALTQALKMAEGKKLNVYTDSRYAFATAHIHGEIYRRRGWLTSEGKEIKNKDEILALLKALFLPKRLSIIHCPGHQKGNSAEARGNRMADQAAREVATRETPETSTLLAGKRTADGSEFEKRTADGSEFESPKKKAKVE

SEQ ID NO: 2342 - protein, 2093 aa, synthetic construct
MPAAKRVKLDGGDKKYSIGLDIGTNSVGWAVITDEYKVPSKKFKVLGNTDRHSIKKNLIGALLFDSGETAEATRLKRTARRRYTRRKNRICYLQEIFSNEMAKVDDSFFHRLEESFLVEEDKKHERHPIFGNIVDEVAYHEKYPTIYHLRKKLVDSTDKADLRLIYLALAHMIKFRGHFLIEGDLNPDNSDVDKLFIQLVQTYNQLFEENPINASGVDAKAILSARLSKSRRLENLIAQLPGEKKNGLFGNLIALSLGLTPNFKSNFDLAEDAKLQLSKDTYDDDLDNLLAQIGDQYADLFLAAKNLSDAILLSDILRVNTEITKAPLSASMIKRYDEHHQDLTLLKALVRQQLPEKYKEIFFDQSKNGYAGYIDGGASQEEFYKFIKPILEKMDGTEELLVKLNREDLLRKQRTFDNGSIPHQIHLGELHAILRRQEDFYPFLKDNREKIEKILTFRIPYYVGPLARGNSRFAWMTRKSEETITPWNFEEVVDKGASAQSFIERMTNFDKNLPNEKVLPKHSLLYEYFTVYNELTKVKYVTEGMRKPAFLSGEQKKAIVDLLFKTNRKVTVKQLKEDYFKKIECFDSVEISGVEDRFNASLGTYHDLLKIIKDKDFLDNEENEDILEDIVLTLTLFEDREMIEERLKTYAHLFDDKVMKQLKRRRYTGWGRLSRKLINGIRDKQSGKTILDFLKSDGFANRNFMQLIHDDSLTFKEDIQKAQVSGQGDSLHEHIANLAGSPAIKKGILQTVKVVDELVKVMGRHKPENIVIEMARENQTTQKGQKNSRERMKRIEEGIKELGSQILKEHPVENTQLQNEKLYLYYLQNGRDMYVDQELDINRLSDYDVDHIVPQSFLKDDSIDNKVLTRSDKARGKSDNVPSEEVVKKMKNYWRQLLNAKLITQRKFDNLTKAERGGLSELDKAGFIKRQLVETRQITKHVAQILDSRMNTKYDENDKLIREVKVITLKSKLVSDFRKDFQFYKVREINNYHHAHDAYLNAVVGTALIKKYPKLESEFVYGDYKVYDVRKMIAKSEQEIGKATAKYFFYSNIMNFFKTEITLANGEIRKRPLIETNGETGEIVWDKGRDFATVRKVLSMPQVNIVKKTEVQTGGFSKESILPKRNSDKLIARKKDWDPKKYGGFDSPTVAYSVLVVAKVEKGKSKKLKSVKELLGITIMERSSFEKNPIDFLEAKGYKEVKKDLIIKLPKYSLFELENGRKRMLASAGELQKGNELALPSKYVNFLYLASHYEKLKGSPEDNEQKQLFVEQHKHYLDEIIEQISEFSKRVILADANLDKVLSAYNKHRDKPIREQAENIIHLFTLTNLGAPAAFKYFDTTIDRKRYTSTKEVLDATLIHQSITGLYETRIDLSQLGGDGGGGGEAAAKGGTLNIEDEYRLHETSKEPDVSLGSTWLSDFPQAWAETGGMGLAVRQAPLIIPLKATSTPVSIKQYPMSQEARLGIKPHIQRLLDQGILVPCQSPWNTPLLPVKKPGTNDYRPVQDLREVNKRVEDIHPTVPNPYNLLSGLPPSHQWYTVLDLKDAFFCLRLHPTSQPLFAFEWRDPEMGISGQLTWTRLPQGFKNSPTLFNEALHRDLAGFRIQHPDLILLQYVDDLLLAATSELDCQQGTRALLQTLGDLGYRASAKKAQICQKQVKYLGYLLKEGQRWLTEARKETVMGQPIPKTPRQLREFLGKAGFCRLFIPGFAEMAAPLYPLTKPGTLFNWGPDQQKAFQEIKQALLTAPALGLPDLTKPFELFVDEKQGYAKGVLTQKLGPWRRPVAYLSKKLDPVAAGWPPCLRMVAAIAVLTKDAGKLTMGQPLVILAPHAVEALVKQPPDRWLSNARMTHYQALLLDTDRVQFGPVVALNPATLLPLPEEGLQHDCLDILAEAHGTRSDLMDQPLPDADHTWYTDGSSFLQEGQRKAGAAVTTETEVIWARALPAGTSAQRAELIALTQALKMAEGKKLNVYTDSRYAFATAHIHGEIYRRRGWLTSEGKEIKNKDEILALLKALFLPKRLSIIHCPGHQKGNSAEARGNRMADQAAREVATRETPETSTLLAGKRTADGSEFEKRTADGSEFESPKKKAKVE

SEQ ID NO: 2343 - protein, 2131 aa, synthetic construct
MPAAKRVKLDGGDKKYSIGLDIGTNSVGWAVITDEYKVPSKKFKVLGNTDRHSIKKNLIGALLFDSGETAEATRLKRTARRRYTRRKNRICYLQEIFSNEMAKVDDSFFHRLEESFLVEEDKKHERHPIFGNIVDEVAYHEKYPTIYHLRKKLVDSTDKADLRLIYLALAHMIKFRGHFLIEGDLNPDNSDVDKLFIQLVQTYNQLFEENPINASGVDAKAILSARLSKSRRLENLIAQLPGEKKNGLFGNLIALSLGLTPNFKSNFDLAEDAKLQLSKDTYDDDLDNLLAQIGDQYADLFLAAKNLSDAILLSDILRVNTEITKAPLSASMIKRYDEHHQDLTLLKALVRQQLPEKYKEIFFDQSKNGYAGYIDGGASQEEFYKFIKPILEKMDGTEELLVKLNREDLLRKQRTFDNGSIPHQIHLGELHAILRRQEDFYPFLKDNREKIEKILTFRIPYYVGPLARGNSRFAWMTRKSEETITPWNFEEVVDKGASAQSFIERMTNFDKNLPNEKVLPKHSLLYEYFTVYNELTKVKYVTEGMRKPAFLSGEQKKAIVDLLFKTNRKVTVKQLKEDYFKKIECFDSVEISGVEDRFNASLGTYHDLLKIIKDKDFLDNEENEDILEDIVLTLTLFEDREMIEERLKTYAHLFDDKVMKQLKRRRYTGWGRLSRKLINGIRDKQSGKTILDFLKSDGFANRNFMQLIHDDSLTFKEDIQKAQVSGQGDSLHEHIANLAGSPAIKKGILQTVKVVDELVKVMGRHKPENIVIEMARENQTTQKGQKNSRERMKRIEEGIKELGSQILKEHPVENTQLQNEKLYLYYLQNGRDMYVDQELDINRLSDYDVDHIVPQSFLKDDSIDNKVLTRSDKARGKSDNVPSEEVVKKMKNYWRQLLNAKLITQRKFDNLTKAERGGLSELDKAGFIKRQLVETRQITKHVAQILDSRMNTKYDENDKLIREVKVITLKSKLVSDFRKDFQFYKVREINNYHHAHDAYLNAVVGTALIKKYPKLESEFVYGDYKVYDVRKMIAKSEQEIGKATAKYFFYSNIMNFFKTEITLANGEIRKRPLIETNGETGEIVWDKGRDFATVRKVLSMPQVNIVKKTEVQTGGFSKESILPKRNSDKLIARKKDWDPKKYGGFDSPTVAYSVLVVAKVEKGKSKKLKSVKELLGITIMERSSFEKNPIDFLEAKGYKEVKKDLIIKLPKYSLFELENGRKRMLASAGELQKGNELALPSKYVNFLYLASHYEKLKGSPEDNEQKQLFVEQHKHYLDEIIEQISEFSKRVILADANLDKVLSAYNKHRDKPIREQAENIIHLFTLTNLGAPAAFKYFDTTIDRKRYTSTKEVLDATLIHQSITGLYETRIDLSQLGGDGGAEAAAKEAAAKEAAAKEAAAKALEAEAAAKEAAAKEAAAKEAAAKAGGTLNIEDEYRLHETSKEPDVSLGSTWLSDFPQAWAETGGMGLAVRQAPLIIPLKATSTPVSIKQYPMSQEARLGIKPHIQRLLDQGILVPCQSPWNTPLLPVKKPGTNDYRPVQDLREVNKRVEDIHPTVPNPYNLLSGLPPSHQWYTVLDLKDAFFCLRLHPTSQPLFAFEWRDPEMGISGQLTWTRLPQGFKNSPTLFNEALHRDLAGFRIQHPDLILLQYVDDLLLAATSELDCQQGTRALLQTLGDLGYRASAKKAQICQKQVKYLGYLLKEGQRWLTEARKETVMGQPIPKTPRQLREFLGKAGFCRLFIPGFAEMAAPLYPLTKPGTLFNWGPDQQKAFQEIKQALLTAPALGLPDLTKPFELFVDEKQGYAKGVLTQKLGPWRRPVAYLSKKLDPVAAGWPPCLRMVAAIAVLTKDAGKLTMGQPLVILAPHAVEALVKQPPDRWLSNARMTHYQALLLDTDRVQFGPVVALNPATLLPLPEEGLQHDCLDILAEAHGTRSDLMDQPLPDADHTWYTDGSSFLQEGQRKAGAAVTTETEVIWARALPAGTSAQRAELIALTQALKMAEGKKLNVYTDSRYAFATAHIHGEIYRRRGWLTSEGKEIKNKDEILALLKALFLPKRLSIIHCPGHQKGNSAEARGNRMADQAAREVATRETPETSTLLAGKRTADGSEFEKRTADGSEFESPKKKAKVE

SEQ ID NO: 2344 - protein, 2096 aa, synthetic construct
MPAAKRVKLDGGDKKYSIGLDIGTNSVGWAVITDEYKVPSKKFKVLGNTDRHSIKKNLIGALLFDSGETAEATRLKRTARRRYTRRKNRICYLQEIFSNEMAKVDDSFFHRLEESFLVEEDKKHERHPIFGNIVDEVAYHEKYPTIYHLRKKLVDSTDKADLRLIYLALAHMIKFRGHFLIEGDLNPDNSDVDKLFIQLVQTYNQLFEENPINASGVDAKAILSARLSKSRRLENLIAQLPGEKKNGLFGNLIALSLGLTPNFKSNFDLAEDAKLQLSKDTYDDDLDNLLAQIGDQYADLFLAAKNLSDAILLSDILRVNTEITKAPLSASMIKRYDEHHQDLTLLKALVRQQLPEKYKEIFFDQSKNGYAGYIDGGASQEEFYKFIKPILEKMDGTEELLVKLNREDLLRKQRTFDNGSIPHQIHLGELHAILRRQEDFYPFLKDNREKIEKILTFRIPYYVGPLARGNSRFAWMTRKSEETITPWNFEEVVDKGASAQSFIERMTNFDKNLPNEKVLPKHSLLYEYFTVYNELTKVKYVTEGMRKPAFLSGEQKKAIVDLLFKTNRKVTVKQLKEDYFKKIECFDSVEISGVEDRFNASLGTYHDLLKIIKDKDFLDNEENEDILEDIVLTLTLFEDREMIEERLKTYAHLFDDKVMKQLKRRRYTGWGRLSRKLINGIRDKQSGKTILDFLKSDGFANRNFMQLIHDDSLTFKEDIQKAQVSGQGDSLHEHIANLAGSPAIKKGILQTVKVVDELVKVMGRHKPENIVIEMARENQTTQKGQKNSRERMKRIEEGIKELGSQILKEHPVENTQLQNEKLYLYYLQNGRDMYVDQELDINRLSDYDVDHIVPQSFLKDDSIDNKVLTRSDKARGKSDNVPSEEVVKKMKNYWRQLLNAKLITQRKFDNLTKAERGGLSELDKAGFIKRQLVETRQITKHVAQILDSRMNTKYDENDKLIREVKVITLKSKLVSDFRKDFQFYKVREINNYHHAHDAYLNAVVGTALIKKYPKLESEFVYGDYKVYDVRKMIAKSEQEIGKATAKYFFYSNIMNFFKTEITLANGEIRKRPLIETNGETGEIVWDKGRDFATVRKVLSMPQVNIVKKTEVQTGGFSKESILPKRNSDKLIARKKDWDPKKYGGFDSPTVAYSVLVVAKVEKGKSKKLKSVKELLGITIMERSSFEKNPIDFLEAKGYKEVKKDLIIKLPKYSLFELENGRKRMLASAGELQKGNELALPSKYVNFLYLASHYEKLKGSPEDNEQKQLFVEQHKHYLDEIIEQISEFSKRVILADANLDKVLSAYNKHRDKPIREQAENIIHLFTLTNLGAPAAFKYFDTTIDRKRYTSTKEVLDATLIHQSITGLYETRIDLSQLGGDGGEAAAKGGGGGSGGTLNIEDEYRLHETSKEPDVSLGSTWLSDFPQAWAETGGMGLAVRQAPLIIPLKATSTPVSIKQYPMSQEARLGIKPHIQRLLDQGILVPCQSPWNTPLLPVKKPGTNDYRPVQDLREVNKRVEDIHPTVPNPYNLLSGLPPSHQWYTVLDLKDAFFCLRLHPTSQPLFAFEWRDPEMGISGQLTWTRLPQGFKNSPTLFNEALHRDLAGFRIQHPDLILLQYVDDLLLAATSELDCQQGTRALLQTLGDLGYRASAKKAQICQKQVKYLGYLLKEGQRWLTEARKETVMGQPIPKTPRQLREFLGKAGFCRLFIPGFAEMAAPLYPLTKPGTLFNWGPDQQKAFQEIKQALLTAPALGLPDLTKPFELFVDEKQGYAKGVLTQKLGPWRRPVAYLSKKLDPVAAGWPPCLRMVAAIAVLTKDAGKLTMGQPLVILAPHAVEALVKQPPDRWLSNARMTHYQALLLDTDRVQFGPVVALNPATLLPLPEEGLQHDCLDILAEAHGTRSDLMDQPLPDADHTWYTDGSSFLQEGQRKAGAAVTTETEVIWARALPAGTSAQRAELIALTQALKMAEGKKLNVYTDSRYAFATAHIHGEIYRRRGWLTSEGKEIKNKDEILALLKALFLPKRLSIIHCPGHQKGNSAEARGNRMADQAAREVATRETPETSTLLAGKRTADGSEFEKRTADGSEFESPKKKAKVE

SEQ ID NO: 2345 - protein, 2096 aa, synthetic construct
MPAAKRVKLDGGDKKYSIGLDIGTNSVGWAVITDEYKVPSKKFKVLGNTDRHSIKKNLIGALLFDSGETAEATRLKRTARRRYTRRKNRICYLQEIFSNEMAKVDDSFFHRLEESFLVEEDKKHERHPIFGNIVDEVAYHEKYPTIYHLRKKLVDSTDKADLRLIYLALAHMIKFRGHFLIEGDLNPDNSDVDKLFIQLVQTYNQLFEENPINASGVDAKAILSARLSKSRRLENLIAQLPGEKKNGLFGNLIALSLGLTPNFKSNFDLAEDAKLQLSKDTYDDDLDNLLAQIGDQYADLFLAAKNLSDAILLSDILRVNTEITKAPLSASMIKRYDEHHQDLTLLKALVRQQLPEKYKEIFFDQSKNGYAGYIDGGASQEEFYKFIKPILEKMDGTEELLVKLNREDLLRKQRTFDNGSIPHQIHLGELHAILRRQEDFYPFLKDNREKIEKILTFRIPYYVGPLARGNSRFAWMTRKSEETITPWNFEEVVDKGASAQSFIERMTNFDKNLPNEKVLPKHSLLYEYFTVYNELTKVKYVTEGMRKPAFLSGEQKKAIVDLLFKTNRKVTVKQLKEDYFKKIECFDSVEISGVEDRFNASLGTYHDLLKIIKDKDFLDNEENEDILEDIVLTLTLFEDREMIEERLKTYAHLFDDKVMKQLKRRRYTGWGRLSRKLINGIRDKQSGKTILDFLKSDGFANRNFMQLIHDDSLTFKEDIQKAQVSGQGDSLHEHIANLAGSPAIKKGILQTVKVVDELVKVMGRHKPENIVIEMARENQTTQKGQKNSRERMKRIEEGIKELGSQILKEHPVENTQLQNEKLYLYYLQNGRDMYVDQELDINRLSDYDVDHIVPQSFLKDDSIDNKVLTRSDKARGKSDNVPSEEVVKKMKNYWRQLLNAKLITQRKFDNLTKAERGGLSELDKAGFIKRQLVETRQITKHVAQILDSRMNTKYDENDKLIREVKVITLKSKLVSDFRKDFQFYKVREINNYHHAHDAYLNAVVGTALIKKYPKLESEFVYGDYKVYDVRKMIAKSEQEIGKATAKYFFYSNIMNFFKTEITLANGEIRKRPLIETNGETGEIVWDKGRDFATVRKVLSMPQVNIVKKTEVQTGGFSKESILPKRNSDKLIARKKDWDPKKYGGFDSPTVAYSVLVVAKVEKGKSKKLKSVKELLGITIMERSSFEKNPIDFLEAKGYKEVKKDLIIKLPKYSLFELENGRKRMLASAGELQKGNELALPSKYVNFLYLASHYEKLKGSPEDNEQKQLFVEQHKHYLDEIIEQISEFSKRVILADANLDKVLSAYNKHRDKPIREQAENIIHLFTLTNLGAPAAFKYFDTTIDRKRYTSTKEVLDATLIHQSITGLYETRIDLSQLGGDGGGSSPAPEAAAKGGTLNIEDEYRLHETSKEPDVSLGSTWLSDFPQAWAETGGMGLAVRQAPLIIPLKATSTPVSIKQYPMSQEARLGIKPHIQRLLDQGILVPCQSPWNTPLLPVKKPGTNDYRPVQDLREVNKRVEDIHPTVPNPYNLLSGLPPSHQWYTVLDLKDAFFCLRLHPTSQPLFAFEWRDPEMGISGQLTWTRLPQGFKNSPTLFNEALHRDLAGFRIQHPDLILLQYVDDLLLAATSELDCQQGTRALLQTLGDLGYRASAKKAQICQKQVKYLGYLLKEGQRWLTEARKETVMGQPIPKTPRQLREFLGKAGFCRLFIPGFAEMAAPLYPLTKPGTLFNWGPDQQKAFQEIKQALLTAPALGLPDLTKPFELFVDEKQGYAKGVLTQKLGPWRRPVAYLSKKLDPVAAGWPPCLRMVAAIAVLTKDAGKLTMGQPLVILAPHAVEALVKQPPDRWLSNARMTHYQALLLDTDRVQFGPVVALNPATLLPLPEEGLQHDCLDILAEAHGTRSDLMDQPLPDADHTWYTDGSSFLQEGQRKAGAAVTTETEVIWARALPAGTSAQRAELIALTQALKMAEGKKLNVYTDSRYAFATAHIHGEIYRRRGWLTSEGKEIKNKDEILALLKALFLPKRLSIIHCPGHQKGNSAEARGNRMADQAAREVATRETPETSTLLAGKRTADGSEFEKRTADGSEFESPKKKAKVE

SEQ ID NO: 2346 - protein, 2094 aa, synthetic construct
MPAAKRVKLDGGDKKYSIGLDIGTNSVGWAVITDEYKVPSKKFKVLGNTDRHSIKKNLIGALLFDSGETAEATRLKRTARRRYTRRKNRICYLQEIFSNEMAKVDDSFFHRLEESFLVEEDKKHERHPIFGNIVDEVAYHEKYPTIYHLRKKLVDSTDKADLRLIYLALAHMIKFRGHFLIEGDLNPDNSDVDKLFIQLVQTYNQLFEENPINASGVDAKAILSARLSKSRRLENLIAQLPGEKKNGLFGNLIALSLGLTPNFKSNFDLAEDAKLQLSKDTYDDDLDNLLAQIGDQYADLFLAAKNLSDAILLSDILRVNTEITKAPLSASMIKRYDEHHQDLTLLKALVRQQLPEKYKEIFFDQSKNGYAGYIDGGASQEEFYKFIKPILEKMDGTEELLVKLNREDLLRKQRTFDNGSIPHQIHLGELHAILRRQEDFYPFLKDNREKIEKILTFRIPYYVGPLARGNSRFAWMTRKSEETITPWNFEEVVDKGASAQSFIERMTNFDKNLPNEKVLPKHSLLYEYFTVYNELTKVKYVTEGMRKPAFLSGEQKKAIVDLLFKTNRKVTVKQLKEDYFKKIECFDSVEISGVEDRFNASLGTYHDLLKIIKDKDFLDNEENEDILEDIVLTLTLFEDREMIEERLKTYAHLFDDKVMKQLKRRRYTGWGRLSRKLINGIRDKQSGKTILDFLKSDGFANRNFMQLIHDDSLTFKEDIQKAQVSGQGDSLHEHIANLAGSPAIKKGILQTVKVVDELVKVMGRHKPENIVIEMARENQTTQKGQKNSRERMKRIEEGIKELGSQILKEHPVENTQLQNEKLYLYYLQNGRDMYVDQELDINRLSDYDVDHIVPQSFLKDDSIDNKVLTRSDKARGKSDNVPSEEVVKKMKNYWRQLLNAKLITQRKFDNLTKAERGGLSELDKAGFIKRQLVETRQITKHVAQILDSRMNTKYDENDKLIREVKVITLKSKLVSDFRKDFQFYKVREINNYHHAHDAYLNAVVGTALIKKYPKLESEFVYGDYKVYDVRKMIAKSEQEIGKATAKYFFYSNIMNFFKTEITLANGEIRKRPLIETNGETGEIVWDKGRDFATVRKVLSMPQVNIVKKTEVQTGGFSKESILPKRNSDKLIARKKDWDPKKYGGFDSPTVAYSVLVVAKVEKGKSKKLKSVKELLGITIMERSSFEKNPIDFLEAKGYKEVKKDLIIKLPKYSLFELENGRKRMLASAGELQKGNELALPSKYVNFLYLASHYEKLKGSPEDNEQKQLFVEQHKHYLDEIIEQISEFSKRVILADANLDKVLSAYNKHRDKPIREQAENIIHLFTLTNLGAPAAFKYFDTTIDRKRYTSTKEVLDATLIHQSITGLYETRIDLSQLGGDGGGGGGSSPAPGGTLNIEDEYRLHETSKEPDVSLGSTWLSDFPQAWAETGGMGLAVRQAPLIIPLKATSTPVSIKQYPMSQEARLGIKPHIQRLLDQGILVPCQSPWNTPLLPVKKPGTNDYRPVQDLREVNKRVEDIHPTVPNPYNLLSGLPPSHQWYTVLDLKDAFFCLRLHPTSQPLFAFEWRDPEMGISGQLTWTRLPQGFKNSPTLFNEALHRDLAGFRIQHPDLILLQYVDDLLLAATSELDCQQGTRALLQTLGDLGYRASAKKAQICQKQVKYLGYLLKEGQRWLTEARKETVMGQPIPKTPRQLREFLGKAGFCRLFIPGFAEMAAPLYPLTKPGTLFNWGPDQQKAFQEIKQALLTAPALGLPDLTKPFELFVDEKQGYAKGVLTQKLGPWRRPVAYLSKKLDPVAAGWPPCLRMVAAIAVLTKDAGKLTMGQPLVILAPHAVEALVKQPPDRWLSNARMTHYQALLLDTDRVQFGPVVALNPATLLPLPEEGLQHDCLDILAEAHGTRSDLMDQPLPDADHTWYTDGSSFLQEGQRKAGAAVTTETEVIWARALPAGTSAQRAELIALTQALKMAEGKKLNVYTDSRYAFATAHIHGEIYRRRGWLTSEGKEIKNKDEILALLKALFLPKRLSIIHCPGHQKGNSAEARGNRMADQAAREVATRETPETSTLLAGKRTADGSEFEKRTADGSEFESPKKKAKVE

SEQ ID NO: 2347 - protein, 2096 aa, synthetic construct
MPAAKRVKLDGGDKKYSIGLDIGTNSVGWAVITDEYKVPSKKFKVLGNTDRHSIKKNLIGALLFDSGETAEATRLKRTARRRYTRRKNRICYLQEIFSNEMAKVDDSFFHRLEESFLVEEDKKHERHPIFGNIVDEVAYHEKYPTIYHLRKKLVDSTDKADLRLIYLALAHMIKFRGHFLIEGDLNPDNSDVDKLFIQLVQTYNQLFEENPINASGVDAKAILSARLSKSRRLENLIAQLPGEKKNGLFGNLIALSLGLTPNFKSNFDLAEDAKLQLSKDTYDDDLDNLLAQIGDQYADLFLAAKNLSDAILLSDILRVNTEITKAPLSASMIKRYDEHHQDLTLLKALVRQQLPEKYKEIFFDQSKNGYAGYIDGGASQEEFYKFIKPILEKMDGTEELLVKLNREDLLRKQRTFDNGSIPHQIHLGELHAILRRQEDFYPFLKDNREKIEKILTFRIPYYVGPLARGNSRFAWMTRKSEETITPWNFEEVVDKGASAQSFIERMTNFDKNLPNEKVLPKHSLLYEYFTVYNELTKVKYVTEGMRKPAFLSGEQKKAIVDLLFKTNRKVTVKQLKEDYFKKIECFDSVEISGVEDRFNASLGTYHDLLKIIKDKDFLDNEENEDILEDIVLTLTLFEDREMIEERLKTYAHLFDDKVMKQLKRRRYTGWGRLSRKLINGIRDKQSGKTILDFLKSDGFANRNFMQLIHDDSLTFKEDIQKAQVSGQGDSLHEHIANLAGSPAIKKGILQTVKVVDELVKVMGRHKPENIVIEMARENQTTQKGQKNSRERMKRIEEGIKELGSQILKEHPVENTQLQNEKLYLYYLQNGRDMYVDQELDINRLSDYDVDHIVPQSFLKDDSIDNKVLTRSDKARGKSDNVPSEEVVKKMKNYWRQLLNAKLITQRKFDNLTKAERGGLSELDKAGFIKRQLVETRQITKHVAQILDSRMNTKYDENDKLIREVKVITLKSKLVSDFRKDFQFYKVREINNYHHAHDAYLNAVVGTALIKKYPKLESEFVYGDYKVYDVRKMIAKSEQEIGKATAKYFFYSNIMNFFKTEITLANGEIRKRPLIETNGETGEIVWDKGRDFATVRKVLSMPQVNIVKKTEVQTGGFSKESILPKRNSDKLIARKKDWDPKKYGGFDSPTVAYSVLVVAKVEKGKSKKLKSVKELLGITIMERSSFEKNPIDFLEAKGYKEVKKDLIIKLPKYSLFELENGRKRMLASAGELQKGNELALPSKYVNFLYLASHYEKLKGSPEDNEQKQLFVEQHKHYLDEIIEQISEFSKRVILADANLDKVLSAYNKHRDKPIREQAENIIHLFTLTNLGAPAAFKYFDTTIDRKRYTSTKEVLDATLIHQSITGLYETRIDLSQLGGDGGPAPEAAAKGSSGGTLNIEDEYRLHETSKEPDVSLGSTWLSDFPQAWAETGGMGLAVRQAPLIIPLKATSTPVSIKQYPMSQEARLGIKPHIQRLLDQGILVPCQSPWNTPLLPVKKPGTNDYRPVQDLREVNKRVEDIHPTVPNPYNLLSGLPPSHQWYTVLDLKDAFFCLRLHPTSQPLFAFEWRDPEMGISGQLTWTRLPQGFKNSPTLFNEALHRDLAGFRIQHPDLILLQYVDDLLLAATSELDCQQGTRALLQTLGDLGYRASAKKAQICQKQVKYLGYLLKEGQRWLTEARKETVMGQPIPKTPRQLREFLGKAGFCRLFIPGFAEMAAPLYPLTKPGTLFNWGPDQQKAFQEIKQALLTAPALGLPDLTKPFELFVDEKQGYAKGVLTQKLGPWRRPVAYLSKKLDPVAAGWPPCLRMVAAIAVLTKDAGKLTMGQPLVILAPHAVEALVKQPPDRWLSNARMTHYQALLLDTDRVQFGPVVALNPATLLPLPEEGLQHDCLDILAEAHGTRSDLMDQPLPDADHTWYTDGSSFLQEGQRKAGAAVTTETEVIWARALPAGTSAQRAELIALTQALKMAEGKKLNVYTDSRYAFATAHIHGEIYRRRGWLTSEGKEIKNKDEILALLKALFLPKRLSIIHCPGHQKGNSAEARGNRMADQAAREVATRETPETSTLLAGKRTADGSEFEKRTADGSEFESPKKKAKVE

SEQ ID NO: 2348 - protein, 2093 aa, synthetic construct
MPAAKRVKLDGGDKKYSIGLDIGTNSVGWAVITDEYKVPSKKFKVLGNTDRHSIKKNLIGALLFDSGETAEATRLKRTARRRYTRRKNRICYLQEIFSNEMAKVDDSFFHRLEESFLVEEDKKHERHPIFGNIVDEVAYHEKYPTIYHLRKKLVDSTDKADLRLIYLALAHMIKFRGHFLIEGDLNPDNSDVDKLFIQLVQTYNQLFEENPINASGVDAKAILSARLSKSRRLENLIAQLPGEKKNGLFGNLIALSLGLTPNFKSNFDLAEDAKLQLSKDTYDDDLDNLLAQIGDQYADLFLAAKNLSDAILLSDILRVNTEITKAPLSASMIKRYDEHHQDLTLLKALVRQQLPEKYKEIFFDQSKNGYAGYIDGGASQEEFYKFIKPILEKMDGTEELLVKLNREDLLRKQRTFDNGSIPHQIHLGELHAILRRQEDFYPFLKDNREKIEKILTFRIPYYVGPLARGNSRFAWMTRKSEETITPWNFEEVVDKGASAQSFIERMTNFDKNLPNEKVLPKHSLLYEYFTVYNELTKVKYVTEGMRKPAFLSGEQKKAIVDLLFKTNRKVTVKQLKEDYFKKIECFDSVEISGVEDRFNASLGTYHDLLKIIKDKDFLDNEENEDILEDIVLTLTLFEDREMIEERLKTYAHLFDDKVMKQLKRRRYTGWGRLSRKLINGIRDKQSGKTILDFLKSDGFANRNFMQLIHDDSLTFKEDIQKAQVSGQGDSLHEHIANLAGSPAIKKGILQTVKVVDELVKVMGRHKPENIVIEMARENQTTQKGQKNSRERMKRIEEGIKELGSQILKEHPVENTQLQNEKLYLYYLQNGRDMYVDQELDINRLSDYDVDHIVPQSFLKDDSIDNKVLTRSDKARGKSDNVPSEEVVKKMKNYWRQLLNAKLITQRKFDNLTKAERGGLSELDKAGFIKRQLVETRQITKHVAQILDSRMNTKYDENDKLIREVKVITLKSKLVSDFRKDFQFYKVREINNYHHAHDAYLNAVVGTALIKKYPKLESEFVYGDYKVYDVRKMIAKSEQEIGKATAKYFFYSNIMNFFKTEITLANGEIRKRPLIETNGETGEIVWDKGRDFATVRKVLSMPQVNIVKKTEVQTGGFSKESILPKRNSDKLIARKKDWDPKKYGGFDSPTVAYSVLVVAKVEKGKSKKLKSVKELLGITIMERSSFEKNPIDFLEAKGYKEVKKDLIIKLPKYSLFELENGRKRMLASAGELQKGNELALPSKYVNFLYLASHYEKLKGSPEDNEQKQLFVEQHKHYLDEIIEQISEFSKRVILADANLDKVLSAYNKHRDKPIREQAENIIHLFTLTNLGAPAAFKYFDTTIDRKRYTSTKEVLDATLIHQSITGLYETRIDLSQLGGDGGEAAAKGGGGGTLNIEDEYRLHETSKEPDVSLGSTWLSDFPQAWAETGGMGLAVRQAPLIIPLKATSTPVSIKQYPMSQEARLGIKPHIQRLLDQGILVPCQSPWNTPLLPVKKPGTNDYRPVQDLREVNKRVEDIHPTVPNPYNLLSGLPPSHQWYTVLDLKDAFFCLRLHPTSQPLFAFEWRDPEMGISGQLTWTRLPQGFKNSPTLFNEALHRDLAGFRIQHPDLILLQYVDDLLLAATSELDCQQGTRALLQTLGDLGYRASAKKAQICQKQVKYLGYLLKEGQRWLTEARKETVMGQPIPKTPRQLREFLGKAGFCRLFIPGFAEMAAPLYPLTKPGTLFNWGPDQQKAFQEIKQALLTAPALGLPDLTKPFELFVDEKQGYAKGVLTQKLGPWRRPVAYLSKKLDPVAAGWPPCLRMVAAIAVLTKDAGKLTMGQPLVILAPHAVEALVKQPPDRWLSNARMTHYQALLLDTDRVQFGPVVALNPATLLPLPEEGLQHDCLDILAEAHGTRSDLMDQPLPDADHTWYTDGSSFLQEGQRKAGAAVTTETEVIWARALPAGTSAQRAELIALTQALKMAEGKKLNVYTDSRYAFATAHIHGEIYRRRGWLTSEGKEIKNKDEILALLKALFLPKRLSIIHCPGHQKGNSAEARGNRMADQAAREVATRETPETSTLLAGKRTADGSEFEKRTADGSEFESPKKKAKVE

SEQ ID NO: 2349 - protein, 2093 aa, synthetic construct
MPAAKRVKLDGGDKKYSIGLDIGTNSVGWAVITDEYKVPSKKFKVLGNTDRHSIKKNLIGALLFDSGETAEATRLKRTARRRYTRRKNRICYLQEIFSNEMAKVDDSFFHRLEESFLVEEDKKHERHPIFGNIVDEVAYHEKYPTIYHLRKKLVDSTDKADLRLIYLALAHMIKFRGHFLIEGDLNPDNSDVDKLFIQLVQTYNQLFEENPINASGVDAKAILSARLSKSRRLENLIAQLPGEKKNGLFGNLIALSLGLTPNFKSNFDLAEDAKLQLSKDTYDDDLDNLLAQIGDQYADLFLAAKNLSDAILLSDILRVNTEITKAPLSASMIKRYDEHHQDLTLLKALVRQQLPEKYKEIFFDQSKNGYAGYIDGGASQEEFYKFIKPILEKMDGTEELLVKLNREDLLRKQRTFDNGSIPHQIHLGELHAILRRQEDFYPFLKDNREKIEKILTFRIPYYVGPLARGNSRFAWMTRKSEETITPWNFEEVVDKGASAQSFIERMTNFDKNLPNEKVLPKHSLLYEYFTVYNELTKVKYVTEGMRKPAFLSGEQKKAIVDLLFKTNRKVTVKQLKEDYFKKIECFDSVEISGVEDRFNASLGTYHDLLKIIKDKDFLDNEENEDILEDIVLTLTLFEDREMIEERLKTYAHLFDDKVMKQLKRRRYTGWGRLSRKLINGIRDKQSGKTILDFLKSDGFANRNFMQLIHDDSLTFKEDIQKAQVSGQGDSLHEHIANLAGSPAIKKGILQTVKVVDELVKVMGRHKPENIVIEMARENQTTQKGQKNSRERMKRIEEGIKELGSQILKEHPVENTQLQNEKLYLYYLQNGRDMYVDQELDINRLSDYDVDHIVPQSFLKDDSIDNKVLTRSDKARGKSDNVPSEEVVKKMKNYWRQLLNAKLITQRKFDNLTKAERGGLSELDKAGFIKRQLVETRQITKHVAQILDSRMNTKYDENDKLIREVKVITLKSKLVSDFRKDFQFYKVREINNYHHAHDAYLNAVVGTALIKKYPKLESEFVYGDYKVYDVRKMIAKSEQEIGKATAKYFFYSNIMNFFKTEITLANGEIRKRPLIETNGETGEIVWDKGRDFATVRKVLSMPQVNIVKKTEVQTGGFSKESILPKRNSDKLIARKKDWDPKKYGGFDSPTVAYSVLVVAKVEKGKSKKLKSVKELLGITIMERSSFEKNPIDFLEAKGYKEVKKDLIIKLPKYSLFELENGRKRMLASAGELQKGNELALPSKYVNFLYLASHYEKLKGSPEDNEQKQLFVEQHKHYLDEIIEQISEFSKRVILADANLDKVLSAYNKHRDKPIREQAENIIHLFTLTNLGAPAAFKYFDTTIDRKRYTSTKEVLDATLIHQSITGLYETRIDLSQLGGDGGGGGGGGGGGGTLNIEDEYRLHETSKEPDVSLGSTWLSDFPQAWAETGGMGLAVRQAPLIIPLKATSTPVSIKQYPMSQEARLGIKPHIQRLLDQGILVPCQSPWNTPLLPVKKPGTNDYRPVQDLREVNKRVEDIHPTVPNPYNLLSGLPPSHQWYTVLDLKDAFFCLRLHPTSQPLFAFEWRDPEMGISGQLTWTRLPQGFKNSPTLFNEALHRDLAGFRIQHPDLILLQYVDDLLLAATSELDCQQGTRALLQTLGDLGYRASAKKAQICQKQVKYLGYLLKEGQRWLTEARKETVMGQPIPKTPRQLREFLGKAGFCRLFIPGFAEMAAPLYPLTKPGTLFNWGPDQQKAFQEIKQALLTAPALGLPDLTKPFELFVDEKQGYAKGVLTQKLGPWRRPVAYLSKKLDPVAAGWPPCLRMVAAIAVLTKDAGKLTMGQPLVILAPHAVEALVKQPPDRWLSNARMTHYQALLLDTDRVQFGPVVALNPATLLPLPEEGLQHDCLDILAEAHGTRSDLMDQPLPDADHTWYTDGSSFLQEGQRKAGAAVTTETEVIWARALPAGTSAQRAELIALTQALKMAEGKKLNVYTDSRYAFATAHIHGEIYRRRGWLTSEGKEIKNKDEILALLKALFLPKRLSIIHCPGHQKGNSAEARGNRMADQAAREVATRETPETSTLLAGKRTADGSEFEKRTADGSEFESPKKKAKVE

SEQ ID NO: 2350 - protein, 2093 aa, synthetic construct
MPAAKRVKLDGGDKKYSIGLDIGTNSVGWAVITDEYKVPSKKFKVLGNTDRHSIKKNLIGALLFDSGETAEATRLKRTARRRYTRRKNRICYLQEIFSNEMAKVDDSFFHRLEESFLVEEDKKHERHPIFGNIVDEVAYHEKYPTIYHLRKKLVDSTDKADLRLIYLALAHMIKFRGHFLIEGDLNPDNSDVDKLFIQLVQTYNQLFEENPINASGVDAKAILSARLSKSRRLENLIAQLPGEKKNGLFGNLIALSLGLTPNFKSNFDLAEDAKLQLSKDTYDDDLDNLLAQIGDQYADLFLAAKNLSDAILLSDILRVNTEITKAPLSASMIKRYDEHHQDLTLLKALVRQQLPEKYKEIFFDQSKNGYAGYIDGGASQEEFYKFIKPILEKMDGTEELLVKLNREDLLRKQRTFDNGSIPHQIHLGELHAILRRQEDFYPFLKDNREKIEKILTFRIPYYVGPLARGNSRFAWMTRKSEETITPWNFEEVVDKGASAQSFIERMTNFDKNLPNEKVLPKHSLLYEYFTVYNELTKVKYVTEGMRKPAFLSGEQKKAIVDLLFKTNRKVTVKQLKEDYFKKIECFDSVEISGVEDRFNASLGTYHDLLKIIKDKDFLDNEENEDILEDIVLTLTLFEDREMIEERLKTYAHLFDDKVMKQLKRRRYTGWGRLSRKLINGIRDKQSGKTILDFLKSDGFANRNFMQLIHDDSLTFKEDIQKAQVSGQGDSLHEHIANLAGSPAIKKGILQTVKVVDELVKVMGRHKPENIVIEMARENQTTQKGQKNSRERMKRIEEGIKELGSQILKEHPVENTQLQNEKLYLYYLQNGRDMYVDQELDINRLSDYDVDHIVPQSFLKDDSIDNKVLTRSDKARGKSDNVPSEEVVKKMKNYWRQLLNAKLITQRKFDNLTKAERGGLSELDKAGFIKRQLVETRQITKHVAQILDSRMNTKYDENDKLIREVKVITLKSKLVSDFRKDFQFYKVREINNYHHAHDAYLNAVVGTALIKKYPKLESEFVYGDYKVYDVRKMIAKSEQEIGKATAKYFFYSNIMNFFKTEITLANGEIRKRPLIETNGETGEIVWDKGRDFATVRKVLSMPQVNIVKKTEVQTGGFSKESILPKRNSDKLIARKKDWDPKKYGGFDSPTVAYSVLVVAKVEKGKSKKLKSVKELLGITIMERSSFEKNPIDFLEAKGYKEVKKDLIIKLPKYSLFELENGRKRMLASAGELQKGNELALPSKYVNFLYLASHYEKLKGSPEDNEQKQLFVEQHKHYLDEIIEQISEFSKRVILADANLDKVLSAYNKHRDKPIREQAENIIHLFTLTNLGAPAAFKYFDTTIDRKRYTSTKEVLDATLIHQSITGLYETRIDLSQLGGDGGEAAAKGSSGGTLNIEDEYRLHETSKEPDVSLGSTWLSDFPQAWAETGGMGLAVRQAPLIIPLKATSTPVSIKQYPMSQEARLGIKPHIQRLLDQGILVPCQSPWNTPLLPVKKPGTNDYRPVQDLREVNKRVEDIHPTVPNPYNLLSGLPPSHQWYTVLDLKDAFFCLRLHPTSQPLFAFEWRDPEMGISGQLTWTRLPQGFKNSPTLFNEALHRDLAGFRIQHPDLILLQYVDDLLLAATSELDCQQGTRALLQTLGDLGYRASAKKAQICQKQVKYLGYLLKEGQRWLTEARKETVMGQPIPKTPRQLREFLGKAGFCRLFIPGFAEMAAPLYPLTKPGTLFNWGPDQQKAFQEIKQALLTAPALGLPDLTKPFELFVDEKQGYAKGVLTQKLGPWRRPVAYLSKKLDPVAAGWPPCLRMVAAIAVLTKDAGKLTMGQPLVILAPHAVEALVKQPPDRWLSNARMTHYQALLLDTDRVQFGPVVALNPATLLPLPEEGLQHDCLDILAEAHGTRSDLMDQPLPDADHTWYTDGSSFLQEGQRKAGAAVTTETEVIWARALPAGTSAQRAELIALTQALKMAEGKKLNVYTDSRYAFATAHIHGEIYRRRGWLTSEGKEIKNKDEILALLKALFLPKRLSIIHCPGHQKGNSAEARGNRMADQAAREVATRETPETSTLLAGKRTADGSEFEKRTADGSEFESPKKKAKVE

SEQ ID NO: 2351 - protein, 2096 aa, synthetic construct
MPAAKRVKLDGGDKKYSIGLDIGTNSVGWAVITDEYKVPSKKFKVLGNTDRHSIKKNLIGALLFDSGETAEATRLKRTARRRYTRRKNRICYLQEIFSNEMAKVDDSFFHRLEESFLVEEDKKHERHPIFGNIVDEVAYHEKYPTIYHLRKKLVDSTDKADLRLIYLALAHMIKFRGHFLIEGDLNPDNSDVDKLFIQLVQTYNQLFEENPINASGVDAKAILSARLSKSRRLENLIAQLPGEKKNGLFGNLIALSLGLTPNFKSNFDLAEDAKLQLSKDTYDDDLDNLLAQIGDQYADLFLAAKNLSDAILLSDILRVNTEITKAPLSASMIKRYDEHHQDLTLLKALVRQQLPEKYKEIFFDQSKNGYAGYIDGGASQEEFYKFIKPILEKMDGTEELLVKLNREDLLRKQRTFDNGSIPHQIHLGELHAILRRQEDFYPFLKDNREKIEKILTFRIPYYVGPLARGNSRFAWMTRKSEETITPWNFEEVVDKGASAQSFIERMTNFDKNLPNEKVLPKHSLLYEYFTVYNELTKVKYVTEGMRKPAFLSGEQKKAIVDLLFKTNRKVTVKQLKEDYFKKIECFDSVEISGVEDRFNASLGTYHDLLKIIKDKDFLDNEENEDILEDIVLTLTLFEDREMIEERLKTYAHLFDDKVMKQLKRRRYTGWGRLSRKLINGIRDKQSGKTILDFLKSDGFANRNFMQLIHDDSLTFKEDIQKAQVSGQGDSLHEHIANLAGSPAIKKGILQTVKVVDELVKVMGRHKPENIVIEMARENQTTQKGQKNSRERMKRIEEGIKELGSQILKEHPVENTQLQNEKLYLYYLQNGRDMYVDQELDINRLSDYDVDHIVPQSFLKDDSIDNKVLTRSDKARGKSDNVPSEEVVKKMKNYWRQLLNAKLITQRKFDNLTKAERGGLSELDKAGFIKRQLVETRQITKHVAQILDSRMNTKYDENDKLIREVKVITLKSKLVSDFRKDFQFYKVREINNYHHAHDAYLNAVVGTALIKKYPKLESEFVYGDYKVYDVRKMIAKSEQEIGKATAKYFFYSNIMNFFKTEITLANGEIRKRPLIETNGETGEIVWDKGRDFATVRKVLSMPQVNIVKKTEVQTGGFSKESILPKRNSDKLIARKKDWDPKKYGGFDSPTVAYSVLVVAKVEKGKSKKLKSVKELLGITIMERSSFEKNPIDFLEAKGYKEVKKDLIIKLPKYSLFELENGRKRMLASAGELQKGNELALPSKYVNFLYLASHYEKLKGSPEDNEQKQLFVEQHKHYLDEIIEQISEFSKRVILADANLDKVLSAYNKHRDKPIREQAENIIHLFTLTNLGAPAAFKYFDTTIDRKRYTSTKEVLDATLIHQSITGLYETRIDLSQLGGDGGGGGGGSEAAAKGGTLNIEDEYRLHETSKEPDVSLGSTWLSDFPQAWAETGGMGLAVRQAPLIIPLKATSTPVSIKQYPMSQEARLGIKPHIQRLLDQGILVPCQSPWNTPLLPVKKPGTNDYRPVQDLREVNKRVEDIHPTVPNPYNLLSGLPPSHQWYTVLDLKDAFFCLRLHPTSQPLFAFEWRDPEMGISGQLTWTRLPQGFKNSPTLFNEALHRDLAGFRIQHPDLILLQYVDDLLLAATSELDCQQGTRALLQTLGDLGYRASAKKAQICQKQVKYLGYLLKEGQRWLTEARKETVMGQPIPKTPRQLREFLGKAGFCRLFIPGFAEMAAPLYPLTKPGTLFNWGPDQQKAFQEIKQALLTAPALGLPDLTKPFELFVDEKQGYAKGVLTQKLGPWRRPVAYLSKKLDPVAAGWPPCLRMVAAIAVLTKDAGKLTMGQPLVILAPHAVEALVKQPPDRWLSNARMTHYQALLLDTDRVQFGPVVALNPATLLPLPEEGLQHDCLDILAEAHGTRSDLMDQPLPDADHTWYTDGSSFLQEGQRKAGAAVTTETEVIWARALPAGTSAQRAELIALTQALKMAEGKKLNVYTDSRYAFATAHIHGEIYRRRGWLTSEGKEIKNKDEILALLKALFLPKRLSIIHCPGHQKGNSAEARGNRMADQAAREVATRETPETSTLLAGKRTADGSEFEKRTADGSEFESPKKKAKVE

SEQ ID NO: 2352 - protein, 2096 aa, synthetic construct
MPAAKRVKLDGGDKKYSIGLDIGTNSVGWAVITDEYKVPSKKFKVLGNTDRHSIKKNLIGALLFDSGETAEATRLKRTARRRYTRRKNRICYLQEIFSNEMAKVDDSFFHRLEESFLVEEDKKHERHPIFGNIVDEVAYHEKYPTIYHLRKKLVDSTDKADLRLIYLALAHMIKFRGHFLIEGDLNPDNSDVDKLFIQLVQTYNQLFEENPINASGVDAKAILSARLSKSRRLENLIAQLPGEKKNGLFGNLIALSLGLTPNFKSNFDLAEDAKLQLSKDTYDDDLDNLLAQIGDQYADLFLAAKNLSDAILLSDILRVNTEITKAPLSASMIKRYDEHHQDLTLLKALVRQQLPEKYKEIFFDQSKNGYAGYIDGGASQEEFYKFIKPILEKMDGTEELLVKLNREDLLRKQRTFDNGSIPHQIHLGELHAILRRQEDFYPFLKDNREKIEKILTFRIPYYVGPLARGNSRFAWMTRKSEETITPWNFEEVVDKGASAQSFIERMTNFDKNLPNEKVLPKHSLLYEYFTVYNELTKVKYVTEGMRKPAFLSGEQKKAIVDLLFKTNRKVTVKQLKEDYFKKIECFDSVEISGVEDRFNASLGTYHDLLKIIKDKDFLDNEENEDILEDIVLTLTLFEDREMIEERLKTYAHLFDDKVMKQLKRRRYTGWGRLSRKLINGIRDKQSGKTILDFLKSDGFANRNFMQLIHDDSLTFKEDIQKAQVSGQGDSLHEHIANLAGSPAIKKGILQTVKVVDELVKVMGRHKPENIVIEMARENQTTQKGQKNSRERMKRIEEGIKELGSQILKEHPVENTQLQNEKLYLYYLQNGRDMYVDQELDINRLSDYDVDHIVPQSFLKDDSIDNKVLTRSDKARGKSDNVPSEEVVKKMKNYWRQLLNAKLITQRKFDNLTKAERGGLSELDKAGFIKRQLVETRQITKHVAQILDSRMNTKYDENDKLIREVKVITLKSKLVSDFRKDFQFYKVREINNYHHAHDAYLNAVVGTALIKKYPKLESEFVYGDYKVYDVRKMIAKSEQEIGKATAKYFFYSNIMNFFKTEITLANGEIRKRPLIETNGETGEIVWDKGRDFATVRKVLSMPQVNIVKKTEVQTGGFSKESILPKRNSDKLIARKKDWDPKKYGGFDSPTVAYSVLVVAKVEKGKSKKLKSVKELLGITIMERSSFEKNPIDFLEAKGYKEVKKDLIIKLPKYSLFELENGRKRMLASAGELQKGNELALPSKYVNFLYLASHYEKLKGSPEDNEQKQLFVEQHKHYLDEIIEQISEFSKRVILADANLDKVLSAYNKHRDKPIREQAENIIHLFTLTNLGAPAAFKYFDTTIDRKRYTSTKEVLDATLIHQSITGLYETRIDLSQLGGDGGGSSEAAAKGGSGGTLNIEDEYRLHETSKEPDVSLGSTWLSDFPQAWAETGGMGLAVRQAPLIIPLKATSTPVSIKQYPMSQEARLGIKPHIQRLLDQGILVPCQSPWNTPLLPVKKPGTNDYRPVQDLREVNKRVEDIHPTVPNPYNLLSGLPPSHQWYTVLDLKDAFFCLRLHPTSQPLFAFEWRDPEMGISGQLTWTRLPQGFKNSPTLFNEALHRDLAGFRIQHPDLILLQYVDDLLLAATSELDCQQGTRALLQTLGDLGYRASAKKAQICQKQVKYLGYLLKEGQRWLTEARKETVMGQPIPKTPRQLREFLGKAGFCRLFIPGFAEMAAPLYPLTKPGTLFNWGPDQQKAFQEIKQALLTAPALGLPDLTKPFELFVDEKQGYAKGVLTQKLGPWRRPVAYLSKKLDPVAAGWPPCLRMVAAIAVLTKDAGKLTMGQPLVILAPHAVEALVKQPPDRWLSNARMTHYQALLLDTDRVQFGPVVALNPATLLPLPEEGLQHDCLDILAEAHGTRSDLMDQPLPDADHTWYTDGSSFLQEGQRKAGAAVTTETEVIWARALPAGTSAQRAELIALTQALKMAEGKKLNVYTDSRYAFATAHIHGEIYRRRGWLTSEGKEIKNKDEILALLKALFLPKRLSIIHCPGHQKGNSAEARGNRMADQAAREVATRETPETSTLLAGKRTADGSEFEKRTADGSEFESPKKKAKVE

SEQ ID NO: 2353 - protein, 2091 aa, synthetic construct
MPAAKRVKLDGGDKKYSIGLDIGTNSVGWAVITDEYKVPSKKFKVLGNTDRHSIKKNLIGALLFDSGETAEATRLKRTARRRYTRRKNRICYLQEIFSNEMAKVDDSFFHRLEESFLVEEDKKHERHPIFGNIVDEVAYHEKYPTIYHLRKKLVDSTDKADLRLIYLALAHMIKFRGHFLIEGDLNPDNSDVDKLFIQLVQTYNQLFEENPINASGVDAKAILSARLSKSRRLENLIAQLPGEKKNGLFGNLIALSLGLTPNFKSNFDLAEDAKLQLSKDTYDDDLDNLLAQIGDQYADLFLAAKNLSDAILLSDILRVNTEITKAPLSASMIKRYDEHHQDLTLLKALVRQQLPEKYKEIFFDQSKNGYAGYIDGGASQEEFYKFIKPILEKMDGTEELLVKLNREDLLRKQRTFDNGSIPHQIHLGELHAILRRQEDFYPFLKDNREKIEKILTFRIPYYVGPLARGNSRFAWMTRKSEETITPWNFEEVVDKGASAQSFIERMTNFDKNLPNEKVLPKHSLLYEYFTVYNELTKVKYVTEGMRKPAFLSGEQKKAIVDLLFKTNRKVTVKQLKEDYFKKIECFDSVEISGVEDRFNASLGTYHDLLKIIKDKDFLDNEENEDILEDIVLTLTLFEDREMIEERLKTYAHLFDDKVMKQLKRRRYTGWGRLSRKLINGIRDKQSGKTILDFLKSDGFANRNFMQLIHDDSLTFKEDIQKAQVSGQGDSLHEHIANLAGSPAIKKGILQTVKVVDELVKVMGRHKPENIVIEMARENQTTQKGQKNSRERMKRIEEGIKELGSQILKEHPVENTQLQNEKLYLYYLQNGRDMYVDQELDINRLSDYDVDHIVPQSFLKDDSIDNKVLTRSDKARGKSDNVPSEEVVKKMKNYWRQLLNAKLITQRKFDNLTKAERGGLSELDKAGFIKRQLVETRQITKHVAQILDSRMNTKYDENDKLIREVKVITLKSKLVSDFRKDFQFYKVREINNYHHAHDAYLNAVVGTALIKKYPKLESEFVYGDYKVYDVRKMIAKSEQEIGKATAKYFFYSNIMNFFKTEITLANGEIRKRPLIETNGETGEIVWDKGRDFATVRKVLSMPQVNIVKKTEVQTGGFSKESILPKRNSDKLIARKKDWDPKKYGGFDSPTVAYSVLVVAKVEKGKSKKLKSVKELLGITIMERSSFEKNPIDFLEAKGYKEVKKDLIIKLPKYSLFELENGRKRMLASAGELQKGNELALPSKYVNFLYLASHYEKLKGSPEDNEQKQLFVEQHKHYLDEIIEQISEFSKRVILADANLDKVLSAYNKHRDKPIREQAENIIHLFTLTNLGAPAAFKYFDTTIDRKRYTSTKEVLDATLIHQSITGLYETRIDLSQLGGDGGGGSGSSGGTLNIEDEYRLHETSKEPDVSLGSTWLSDFPQAWAETGGMGLAVRQAPLIIPLKATSTPVSIKQYPMSQEARLGIKPHIQRLLDQGILVPCQSPWNTPLLPVKKPGTNDYRPVQDLREVNKRVEDIHPTVPNPYNLLSGLPPSHQWYTVLDLKDAFFCLRLHPTSQPLFAFEWRDPEMGISGQLTWTRLPQGFKNSPTLFNEALHRDLAGFRIQHPDLILLQYVDDLLLAATSELDCQQGTRALLQTLGDLGYRASAKKAQICQKQVKYLGYLLKEGQRWLTEARKETVMGQPIPKTPRQLREFLGKAGFCRLFIPGFAEMAAPLYPLTKPGTLFNWGPDQQKAFQEIKQALLTAPALGLPDLTKPFELFVDEKQGYAKGVLTQKLGPWRRPVAYLSKKLDPVAAGWPPCLRMVAAIAVLTKDAGKLTMGQPLVILAPHAVEALVKQPPDRWLSNARMTHYQALLLDTDRVQFGPVVALNPATLLPLPEEGLQHDCLDILAEAHGTRSDLMDQPLPDADHTWYTDGSSFLQEGQRKAGAAVTTETEVIWARALPAGTSAQRAELIALTQALKMAEGKKLNVYTDSRYAFATAHIHGEIYRRRGWLTSEGKEIKNKDEILALLKALFLPKRLSIIHCPGHQKGNSAEARGNRMADQAAREVATRETPETSTLLAGKRTADGSEFEKRTADGSEFESPKKKAKVE

SEQ ID NO: 2354 - protein, 2091 aa, synthetic construct
MPAAKRVKLDGGDKKYSIGLDIGTNSVGWAVITDEYKVPSKKFKVLGNTDRHSIKKNLIGALLFDSGETAEATRLKRTARRRYTRRKNRICYLQEIFSNEMAKVDDSFFHRLEESFLVEEDKKHERHPIFGNIVDEVAYHEKYPTIYHLRKKLVDSTDKADLRLIYLALAHMIKFRGHFLIEGDLNPDNSDVDKLFIQLVQTYNQLFEENPINASGVDAKAILSARLSKSRRLENLIAQLPGEKKNGLFGNLIALSLGLTPNFKSNFDLAEDAKLQLSKDTYDDDLDNLLAQIGDQYADLFLAAKNLSDAILLSDILRVNTEITKAPLSASMIKRYDEHHQDLTLLKALVRQQLPEKYKEIFFDQSKNGYAGYIDGGASQEEFYKFIKPILEKMDGTEELLVKLNREDLLRKQRTFDNGSIPHQIHLGELHAILRRQEDFYPFLKDNREKIEKILTFRIPYYVGPLARGNSRFAWMTRKSEETITPWNFEEVVDKGASAQSFIERMTNFDKNLPNEKVLPKHSLLYEYFTVYNELTKVKYVTEGMRKPAFLSGEQKKAIVDLLFKTNRKVTVKQLKEDYFKKIECFDSVEISGVEDRFNASLGTYHDLLKIIKDKDFLDNEENEDILEDIVLTLTLFEDREMIEERLKTYAHLFDDKVMKQLKRRRYTGWGRLSRKLINGIRDKQSGKTILDFLKSDGFANRNFMQLIHDDSLTFKEDIQKAQVSGQGDSLHEHIANLAGSPAIKKGILQTVKVVDELVKVMGRHKPENIVIEMARENQTTQKGQKNSRERMKRIEEGIKELGSQILKEHPVENTQLQNEKLYLYYLQNGRDMYVDQELDINRLSDYDVDHIVPQSFLKDDSIDNKVLTRSDKARGKSDNVPSEEVVKKMKNYWRQLLNAKLITQRKFDNLTKAERGGLSELDKAGFIKRQLVETRQITKHVAQILDSRMNTKYDENDKLIREVKVITLKSKLVSDFRKDFQFYKVREINNYHHAHDAYLNAVVGTALIKKYPKLESEFVYGDYKVYDVRKMIAKSEQEIGKATAKYFFYSNIMNFFKTEITLANGEIRKRPLIETNGETGEIVWDKGRDFATVRKVLSMPQVNIVKKTEVQTGGFSKESILPKRNSDKLIARKKDWDPKKYGGFDSPTVAYSVLVVAKVEKGKSKKLKSVKELLGITIMERSSFEKNPIDFLEAKGYKEVKKDLIIKLPKYSLFELENGRKRMLASAGELQKGNELALPSKYVNFLYLASHYEKLKGSPEDNEQKQLFVEQHKHYLDEIIEQISEFSKRVILADANLDKVLSAYNKHRDKPIREQAENIIHLFTLTNLGAPAAFKYFDTTIDRKRYTSTKEVLDATLIHQSITGLYETRIDLSQLGGDGGGGGGGGGGTLNIEDEYRLHETSKEPDVSLGSTWLSDFPQAWAETGGMGLAVRQAPLIIPLKATSTPVSIKQYPMSQEARLGIKPHIQRLLDQGILVPCQSPWNTPLLPVKKPGTNDYRPVQDLREVNKRVEDIHPTVPNPYNLLSGLPPSHQWYTVLDLKDAFFCLRLHPTSQPLFAFEWRDPEMGISGQLTWTRLPQGFKNSPTLFNEALHRDLAGFRIQHPDLILLQYVDDLLLAATSELDCQQGTRALLQTLGDLGYRASAKKAQICQKQVKYLGYLLKEGQRWLTEARKETVMGQPIPKTPRQLREFLGKAGFCRLFIPGFAEMAAPLYPLTKPGTLFNWGPDQQKAFQEIKQALLTAPALGLPDLTKPFELFVDEKQGYAKGVLTQKLGPWRRPVAYLSKKLDPVAAGWPPCLRMVAAIAVLTKDAGKLTMGQPLVILAPHAVEALVKQPPDRWLSNARMTHYQALLLDTDRVQFGPVVALNPATLLPLPEEGLQHDCLDILAEAHGTRSDLMDQPLPDADHTWYTDGSSFLQEGQRKAGAAVTTETEVIWARALPAGTSAQRAELIALTQALKMAEGKKLNVYTDSRYAFATAHIHGEIYRRRGWLTSEGKEIKNKDEILALLKALFLPKRLSIIHCPGHQKGNSAEARGNRMADQAAREVATRETPETSTLLAGKRTADGSEFEKRTADGSEFESPKKKAKVE

SEQ ID NO: 2355 - protein, 2096 aa, synthetic construct
MPAAKRVKLDGGDKKYSIGLDIGTNSVGWAVITDEYKVPSKKFKVLGNTDRHSIKKNLIGALLFDSGETAEATRLKRTARRRYTRRKNRICYLQEIFSNEMAKVDDSFFHRLEESFLVEEDKKHERHPIFGNIVDEVAYHEKYPTIYHLRKKLVDSTDKADLRLIYLALAHMIKFRGHFLIEGDLNPDNSDVDKLFIQLVQTYNQLFEENPINASGVDAKAILSARLSKSRRLENLIAQLPGEKKNGLFGNLIALSLGLTPNFKSNFDLAEDAKLQLSKDTYDDDLDNLLAQIGDQYADLFLAAKNLSDAILLSDILRVNTEITKAPLSASMIKRYDEHHQDLTLLKALVRQQLPEKYKEIFFDQSKNGYAGYIDGGASQEEFYKFIKPILEKMDGTEELLVKLNREDLLRKQRTFDNGSIPHQIHLGELHAILRRQEDFYPFLKDNREKIEKILTFRIPYYVGPLARGNSRFAWMTRKSEETITPWNFEEVVDKGASAQSFIERMTNFDKNLPNEKVLPKHSLLYEYFTVYNELTKVKYVTEGMRKPAFLSGEQKKAIVDLLFKTNRKVTVKQLKEDYFKKIECFDSVEISGVEDRFNASLGTYHDLLKIIKDKDFLDNEENEDILEDIVLTLTLFEDREMIEERLKTYAHLFDDKVMKQLKRRRYTGWGRLSRKLINGIRDKQSGKTILDFLKSDGFANRNFMQLIHDDSLTFKEDIQKAQVSGQGDSLHEHIANLAGSPAIKKGILQTVKVVDELVKVMGRHKPENIVIEMARENQTTQKGQKNSRERMKRIEEGIKELGSQILKEHPVENTQLQNEKLYLYYLQNGRDMYVDQELDINRLSDYDVDHIVPQSFLKDDSIDNKVLTRSDKARGKSDNVPSEEVVKKMKNYWRQLLNAKLITQRKFDNLTKAERGGLSELDKAGFIKRQLVETRQITKHVAQILDSRMNTKYDENDKLIREVKVITLKSKLVSDFRKDFQFYKVREINNYHHAHDAYLNAVVGTALIKKYPKLESEFVYGDYKVYDVRKMIAKSEQEIGKATAKYFFYSNIMNFFKTEITLANGEIRKRPLIETNGETGEIVWDKGRDFATVRKVLSMPQVNIVKKTEVQTGGFSKESILPKRNSDKLIARKKDWDPKKYGGFDSPTVAYSVLVVAKVEKGKSKKLKSVKELLGITIMERSSFEKNPIDFLEAKGYKEVKKDLIIKLPKYSLFELENGRKRMLASAGELQKGNELALPSKYVNFLYLASHYEKLKGSPEDNEQKQLFVEQHKHYLDEIIEQISEFSKRVILADANLDKVLSAYNKHRDKPIREQAENIIHLFTLTNLGAPAAFKYFDTTIDRKRYTSTKEVLDATLIHQSITGLYETRIDLSQLGGDGGPAPGSSEAAAKGGTLNIEDEYRLHETSKEPDVSLGSTWLSDFPQAWAETGGMGLAVRQAPLIIPLKATSTPVSIKQYPMSQEARLGIKPHIQRLLDQGILVPCQSPWNTPLLPVKKPGTNDYRPVQDLREVNKRVEDIHPTVPNPYNLLSGLPPSHQWYTVLDLKDAFFCLRLHPTSQPLFAFEWRDPEMGISGQLTWTRLPQGFKNSPTLFNEALHRDLAGFRIQHPDLILLQYVDDLLLAATSELDCQQGTRALLQTLGDLGYRASAKKAQICQKQVKYLGYLLKEGQRWLTEARKETVMGQPIPKTPRQLREFLGKAGFCRLFIPGFAEMAAPLYPLTKPGTLFNWGPDQQKAFQEIKQALLTAPALGLPDLTKPFELFVDEKQGYAKGVLTQKLGPWRRPVAYLSKKLDPVAAGWPPCLRMVAAIAVLTKDAGKLTMGQPLVILAPHAVEALVKQPPDRWLSNARMTHYQALLLDTDRVQFGPVVALNPATLLPLPEEGLQHDCLDILAEAHGTRSDLMDQPLPDADHTWYTDGSSFLQEGQRKAGAAVTTETEVIWARALPAGTSAQRAELIALTQALKMAEGKKLNVYTDSRYAFATAHIHGEIYRRRGWLTSEGKEIKNKDEILALLKALFLPKRLSIIHCPGHQKGNSAEARGNRMADQAAREVATRETPETSTLLAGKRTADGSEFEKRTADGSEFESPKKKAKVE

SEQ ID NO: 2356 - protein, 2093 aa, synthetic construct
MPAAKRVKLDGGDKKYSIGLDIGTNSVGWAVITDEYKVPSKKFKVLGNTDRHSIKKNLIGALLFDSGETAEATRLKRTARRRYTRRKNRICYLQEIFSNEMAKVDDSFFHRLEESFLVEEDKKHERHPIFGNIVDEVAYHEKYPTIYHLRKKLVDSTDKADLRLIYLALAHMIKFRGHFLIEGDLNPDNSDVDKLFIQLVQTYNQLFEENPINASGVDAKAILSARLSKSRRLENLIAQLPGEKKNGLFGNLIALSLGLTPNFKSNFDLAEDAKLQLSKDTYDDDLDNLLAQIGDQYADLFLAAKNLSDAILLSDILRVNTEITKAPLSASMIKRYDEHHQDLTLLKALVRQQLPEKYKEIFFDQSKNGYAGYIDGGASQEEFYKFIKPILEKMDGTEELLVKLNREDLLRKQRTFDNGSIPHQIHLGELHAILRRQEDFYPFLKDNREKIEKILTFRIPYYVGPLARGNSRFAWMTRKSEETITPWNFEEVVDKGASAQSFIERMTNFDKNLPNEKVLPKHSLLYEYFTVYNELTKVKYVTEGMRKPAFLSGEQKKAIVDLLFKTNRKVTVKQLKEDYFKKIECFDSVEISGVEDRFNASLGTYHDLLKIIKDKDFLDNEENEDILEDIVLTLTLFEDREMIEERLKTYAHLFDDKVMKQLKRRRYTGWGRLSRKLINGIRDKQSGKTILDFLKSDGFANRNFMQLIHDDSLTFKEDIQKAQVSGQGDSLHEHIANLAGSPAIKKGILQTVKVVDELVKVMGRHKPENIVIEMARENQTTQKGQKNSRERMKRIEEGIKELGSQILKEHPVENTQLQNEKLYLYYLQNGRDMYVDQELDINRLSDYDVDHIVPQSFLKDDSIDNKVLTRSDKARGKSDNVPSEEVVKKMKNYWRQLLNAKLITQRKFDNLTKAERGGLSELDKAGFIKRQLVETRQITKHVAQILDSRMNTKYDENDKLIREVKVITLKSKLVSDFRKDFQFYKVREINNYHHAHDAYLNAVVGTALIKKYPKLESEFVYGDYKVYDVRKMIAKSEQEIGKATAKYFFYSNIMNFFKTEITLANGEIRKRPLIETNGETGEIVWDKGRDFATVRKVLSMPQVNIVKKTEVQTGGFSKESILPKRNSDKLIARKKDWDPKKYGGFDSPTVAYSVLVVAKVEKGKSKKLKSVKELLGITIMERSSFEKNPIDFLEAKGYKEVKKDLIIKLPKYSLFELENGRKRMLASAGELQKGNELALPSKYVNFLYLASHYEKLKGSPEDNEQKQLFVEQHKHYLDEIIEQISEFSKRVILADANLDKVLSAYNKHRDKPIREQAENIIHLFTLTNLGAPAAFKYFDTTIDRKRYTSTKEVLDATLIHQSITGLYETRIDLSQLGGDGGPAPEAAAKGGTLNIEDEYRLHETSKEPDVSLGSTWLSDFPQAWAETGGMGLAVRQAPLIIPLKATSTPVSIKQYPMSQEARLGIKPHIQRLLDQGILVPCQSPWNTPLLPVKKPGTNDYRPVQDLREVNKRVEDIHPTVPNPYNLLSGLPPSHQWYTVLDLKDAFFCLRLHPTSQPLFAFEWRDPEMGISGQLTWTRLPQGFKNSPTLFNEALHRDLAGFRIQHPDLILLQYVDDLLLAATSELDCQQGTRALLQTLGDLGYRASAKKAQICQKQVKYLGYLLKEGQRWLTEARKETVMGQPIPKTPRQLREFLGKAGFCRLFIPGFAEMAAPLYPLTKPGTLFNWGPDQQKAFQEIKQALLTAPALGLPDLTKPFELFVDEKQGYAKGVLTQKLGPWRRPVAYLSKKLDPVAAGWPPCLRMVAAIAVLTKDAGKLTMGQPLVILAPHAVEALVKQPPDRWLSNARMTHYQALLLDTDRVQFGPVVALNPATLLPLPEEGLQHDCLDILAEAHGTRSDLMDQPLPDADHTWYTDGSSFLQEGQRKAGAAVTTETEVIWARALPAGTSAQRAELIALTQALKMAEGKKLNVYTDSRYAFATAHIHGEIYRRRGWLTSEGKEIKNKDEILALLKALFLPKRLSIIHCPGHQKGNSAEARGNRMADQAAREVATRETPETSTLLAGKRTADGSEFEKRTADGSEFESPKKKAKVE

SEQ ID NO: 2357 - protein, 2096 aa, synthetic construct
MPAAKRVKLDGGDKKYSIGLDIGTNSVGWAVITDEYKVPSKKFKVLGNTDRHSIKKNLIGALLFDSGETAEATRLKRTARRRYTRRKNRICYLQEIFSNEMAKVDDSFFHRLEESFLVEEDKKHERHPIFGNIVDEVAYHEKYPTIYHLRKKLVDSTDKADLRLIYLALAHMIKFRGHFLIEGDLNPDNSDVDKLFIQLVQTYNQLFEENPINASGVDAKAILSARLSKSRRLENLIAQLPGEKKNGLFGNLIALSLGLTPNFKSNFDLAEDAKLQLSKDTYDDDLDNLLAQIGDQYADLFLAAKNLSDAILLSDILRVNTEITKAPLSASMIKRYDEHHQDLTLLKALVRQQLPEKYKEIFFDQSKNGYAGYIDGGASQEEFYKFIKPILEKMDGTEELLVKLNREDLLRKQRTFDNGSIPHQIHLGELHAILRRQEDFYPFLKDNREKIEKILTFRIPYYVGPLARGNSRFAWMTRKSEETITPWNFEEVVDKGASAQSFIERMTNFDKNLPNEKVLPKHSLLYEYFTVYNELTKVKYVTEGMRKPAFLSGEQKKAIVDLLFKTNRKVTVKQLKEDYFKKIECFDSVEISGVEDRFNASLGTYHDLLKIIKDKDFLDNEENEDILEDIVLTLTLFEDREMIEERLKTYAHLFDDKVMKQLKRRRYTGWGRLSRKLINGIRDKQSGKTILDFLKSDGFANRNFMQLIHDDSLTFKEDIQKAQVSGQGDSLHEHIANLAGSPAIKKGILQTVKVVDELVKVMGRHKPENIVIEMARENQTTQKGQKNSRERMKRIEEGIKELGSQILKEHPVENTQLQNEKLYLYYLQNGRDMYVDQELDINRLSDYDVDHIVPQSFLKDDSIDNKVLTRSDKARGKSDNVPSEEVVKKMKNYWRQLLNAKLITQRKFDNLTKAERGGLSELDKAGFIKRQLVETRQITKHVAQILDSRMNTKYDENDKLIREVKVITLKSKLVSDFRKDFQFYKVREINNYHHAHDAYLNAVVGTALIKKYPKLESEFVYGDYKVYDVRKMIAKSEQEIGKATAKYFFYSNIMNFFKTEITLANGEIRKRPLIETNGETGEIVWDKGRDFATVRKVLSMPQVNIVKKTEVQTGGFSKESILPKRNSDKLIARKKDWDPKKYGGFDSPTVAYSVLVVAKVEKGKSKKLKSVKELLGITIMERSSFEKNPIDFLEAKGYKEVKKDLIIKLPKYSLFELENGRKRMLASAGELQKGNELALPSKYVNFLYLASHYEKLKGSPEDNEQKQLFVEQHKHYLDEIIEQISEFSKRVILADANLDKVLSAYNKHRDKPIREQAENIIHLFTLTNLGAPAAFKYFDTTIDRKRYTSTKEVLDATLIHQSITGLYETRIDLSQLGGDGGEAAAKPAPGSSGGTLNIEDEYRLHETSKEPDVSLGSTWLSDFPQAWAETGGMGLAVRQAPLIIPLKATSTPVSIKQYPMSQEARLGIKPHIQRLLDQGILVPCQSPWNTPLLPVKKPGTNDYRPVQDLREVNKRVEDIHPTVPNPYNLLSGLPPSHQWYTVLDLKDAFFCLRLHPTSQPLFAFEWRDPEMGISGQLTWTRLPQGFKNSPTLFNEALHRDLAGFRIQHPDLILLQYVDDLLLAATSELDCQQGTRALLQTLGDLGYRASAKKAQICQKQVKYLGYLLKEGQRWLTEARKETVMGQPIPKTPRQLREFLGKAGFCRLFIPGFAEMAAPLYPLTKPGTLFNWGPDQQKAFQEIKQALLTAPALGLPDLTKPFELFVDEKQGYAKGVLTQKLGPWRRPVAYLSKKLDPVAAGWPPCLRMVAAIAVLTKDAGKLTMGQPLVILAPHAVEALVKQPPDRWLSNARMTHYQALLLDTDRVQFGPVVALNPATLLPLPEEGLQHDCLDILAEAHGTRSDLMDQPLPDADHTWYTDGSSFLQEGQRKAGAAVTTETEVIWARALPAGTSAQRAELIALTQALKMAEGKKLNVYTDSRYAFATAHIHGEIYRRRGWLTSEGKEIKNKDEILALLKALFLPKRLSIIHCPGHQKGNSAEARGNRMADQAAREVATRETPETSTLLAGKRTADGSEFEKRTADGSEFESPKKKAKVE

SEQ ID NO: 2358 - protein, 2096 aa, synthetic construct
MPAAKRVKLDGGDKKYSIGLDIGTNSVGWAVITDEYKVPSKKFKVLGNTDRHSIKKNLIGALLFDSGETAEATRLKRTARRRYTRRKNRICYLQEIFSNEMAKVDDSFFHRLEESFLVEEDKKHERHPIFGNIVDEVAYHEKYPTIYHLRKKLVDSTDKADLRLIYLALAHMIKFRGHFLIEGDLNPDNSDVDKLFIQLVQTYNQLFEENPINASGVDAKAILSARLSKSRRLENLIAQLPGEKKNGLFGNLIALSLGLTPNFKSNFDLAEDAKLQLSKDTYDDDLDNLLAQIGDQYADLFLAAKNLSDAILLSDILRVNTEITKAPLSASMIKRYDEHHQDLTLLKALVRQQLPEKYKEIFFDQSKNGYAGYIDGGASQEEFYKFIKPILEKMDGTEELLVKLNREDLLRKQRTFDNGSIPHQIHLGELHAILRRQEDFYPFLKDNREKIEKILTFRIPYYVGPLARGNSRFAWMTRKSEETITPWNFEEVVDKGASAQSFIERMTNFDKNLPNEKVLPKHSLLYEYFTVYNELTKVKYVTEGMRKPAFLSGEQKKAIVDLLFKTNRKVTVKQLKEDYFKKIECFDSVEISGVEDRFNASLGTYHDLLKIIKDKDFLDNEENEDILEDIVLTLTLFEDREMIEERLKTYAHLFDDKVMKQLKRRRYTGWGRLSRKLINGIRDKQSGKTILDFLKSDGFANRNFMQLIHDDSLTFKEDIQKAQVSGQGDSLHEHIANLAGSPAIKKGILQTVKVVDELVKVMGRHKPENIVIEMARENQTTQKGQKNSRERMKRIEEGIKELGSQILKEHPVENTQLQNEKLYLYYLQNGRDMYVDQELDINRLSDYDVDHIVPQSFLKDDSIDNKVLTRSDKARGKSDNVPSEEVVKKMKNYWRQLLNAKLITQRKFDNLTKAERGGLSELDKAGFIKRQLVETRQITKHVAQILDSRMNTKYDENDKLIREVKVITLKSKLVSDFRKDFQFYKVREINNYHHAHDAYLNAVVGTALIKKYPKLESEFVYGDYKVYDVRKMIAKSEQEIGKATAKYFFYSNIMNFFKTEITLANGEIRKRPLIETNGETGEIVWDKGRDFATVRKVLSMPQVNIVKKTEVQTGGFSKESILPKRNSDKLIARKKDWDPKKYGGFDSPTVAYSVLVVAKVEKGKSKKLKSVKELLGITIMERSSFEKNPIDFLEAKGYKEVKKDLIIKLPKYSLFELENGRKRMLASAGELQKGNELALPSKYVNFLYLASHYEKLKGSPEDNEQKQLFVEQHKHYLDEIIEQISEFSKRVILADANLDKVLSAYNKHRDKPIREQAENIIHLFTLTNLGAPAAFKYFDTTIDRKRYTSTKEVLDATLIHQSITGLYETRIDLSQLGGDGGGGSEAAAKGGGGGTLNIEDEYRLHETSKEPDVSLGSTWLSDFPQAWAETGGMGLAVRQAPLIIPLKATSTPVSIKQYPMSQEARLGIKPHIQRLLDQGILVPCQSPWNTPLLPVKKPGTNDYRPVQDLREVNKRVEDIHPTVPNPYNLLSGLPPSHQWYTVLDLKDAFFCLRLHPTSQPLFAFEWRDPEMGISGQLTWTRLPQGFKNSPTLFNEALHRDLAGFRIQHPDLILLQYVDDLLLAATSELDCQQGTRALLQTLGDLGYRASAKKAQICQKQVKYLGYLLKEGQRWLTEARKETVMGQPIPKTPRQLREFLGKAGFCRLFIPGFAEMAAPLYPLTKPGTLFNWGPDQQKAFQEIKQALLTAPALGLPDLTKPFELFVDEKQGYAKGVLTQKLGPWRRPVAYLSKKLDPVAAGWPPCLRMVAAIAVLTKDAGKLTMGQPLVILAPHAVEALVKQPPDRWLSNARMTHYQALLLDTDRVQFGPVVALNPATLLPLPEEGLQHDCLDILAEAHGTRSDLMDQPLPDADHTWYTDGSSFLQEGQRKAGAAVTTETEVIWARALPAGTSAQRAELIALTQALKMAEGKKLNVYTDSRYAFATAHIHGEIYRRRGWLTSEGKEIKNKDEILALLKALFLPKRLSIIHCPGHQKGNSAEARGNRMADQAAREVATRETPETSTLLAGKRTADGSEFEKRTADGSEFESPKKKAKVE

SEQ ID NO: 2359 - protein, 2096 aa, synthetic construct
MPAAKRVKLDGGDKKYSIGLDIGTNSVGWAVITDEYKVPSKKFKVLGNTDRHSIKKNLIGALLFDSGETAEATRLKRTARRRYTRRKNRICYLQEIFSNEMAKVDDSFFHRLEESFLVEEDKKHERHPIFGNIVDEVAYHEKYPTIYHLRKKLVDSTDKADLRLIYLALAHMIKFRGHFLIEGDLNPDNSDVDKLFIQLVQTYNQLFEENPINASGVDAKAILSARLSKSRRLENLIAQLPGEKKNGLFGNLIALSLGLTPNFKSNFDLAEDAKLQLSKDTYDDDLDNLLAQIGDQYADLFLAAKNLSDAILLSDILRVNTEITKAPLSASMIKRYDEHHQDLTLLKALVRQQLPEKYKEIFFDQSKNGYAGYIDGGASQEEFYKFIKPILEKMDGTEELLVKLNREDLLRKQRTFDNGSIPHQIHLGELHAILRRQEDFYPFLKDNREKIEKILTFRIPYYVGPLARGNSRFAWMTRKSEETITPWNFEEVVDKGASAQSFIERMTNFDKNLPNEKVLPKHSLLYEYFTVYNELTKVKYVTEGMRKPAFLSGEQKKAIVDLLFKTNRKVTVKQLKEDYFKKIECFDSVEISGVEDRFNASLGTYHDLLKIIKDKDFLDNEENEDILEDIVLTLTLFEDREMIEERLKTYAHLFDDKVMKQLKRRRYTGWGRLSRKLINGIRDKQSGKTILDFLKSDGFANRNFMQLIHDDSLTFKEDIQKAQVSGQGDSLHEHIANLAGSPAIKKGILQTVKVVDELVKVMGRHKPENIVIEMARENQTTQKGQKNSRERMKRIEEGIKELGSQILKEHPVENTQLQNEKLYLYYLQNGRDMYVDQELDINRLSDYDVDHIVPQSFLKDDSIDNKVLTRSDKARGKSDNVPSEEVVKKMKNYWRQLLNAKLITQRKFDNLTKAERGGLSELDKAGFIKRQLVETRQITKHVAQILDSRMNTKYDENDKLIREVKVITLKSKLVSDFRKDFQFYKVREINNYHHAHDAYLNAVVGTALIKKYPKLESEFVYGDYKVYDVRKMIAKSEQEIGKATAKYFFYSNIMNFFKTEITLANGEIRKRPLIETNGETGEIVWDKGRDFATVRKVLSMPQVNIVKKTEVQTGGFSKESILPKRNSDKLIARKKDWDPKKYGGFDSPTVAYSVLVVAKVEKGKSKKLKSVKELLGITIMERSSFEKNPIDFLEAKGYKEVKKDLIIKLPKYSLFELENGRKRMLASAGELQKGNELALPSKYVNFLYLASHYEKLKGSPEDNEQKQLFVEQHKHYLDEIIEQISEFSKRVILADANLDKVLSAYNKHRDKPIREQAENIIHLFTLTNLGAPAAFKYFDTTIDRKRYTSTKEVLDATLIHQSITGLYETRIDLSQLGGDGGGSSEAAAKPAPGGTLNIEDEYRLHETSKEPDVSLGSTWLSDFPQAWAETGGMGLAVRQAPLIIPLKATSTPVSIKQYPMSQEARLGIKPHIQRLLDQGILVPCQSPWNTPLLPVKKPGTNDYRPVQDLREVNKRVEDIHPTVPNPYNLLSGLPPSHQWYTVLDLKDAFFCLRLHPTSQPLFAFEWRDPEMGISGQLTWTRLPQGFKNSPTLFNEALHRDLAGFRIQHPDLILLQYVDDLLLAATSELDCQQGTRALLQTLGDLGYRASAKKAQICQKQVKYLGYLLKEGQRWLTEARKETVMGQPIPKTPRQLREFLGKAGFCRLFIPGFAEMAAPLYPLTKPGTLFNWGPDQQKAFQEIKQALLTAPALGLPDLTKPFELFVDEKQGYAKGVLTQKLGPWRRPVAYLSKKLDPVAAGWPPCLRMVAAIAVLTKDAGKLTMGQPLVILAPHAVEALVKQPPDRWLSNARMTHYQALLLDTDRVQFGPVVALNPATLLPLPEEGLQHDCLDILAEAHGTRSDLMDQPLPDADHTWYTDGSSFLQEGQRKAGAAVTTETEVIWARALPAGTSAQRAELIALTQALKMAEGKKLNVYTDSRYAFATAHIHGEIYRRRGWLTSEGKEIKNKDEILALLKALFLPKRLSIIHCPGHQKGNSAEARGNRMADQAAREVATRETPETSTLLAGKRTADGSEFEKRTADGSEFESPKKKAKVE

SEQ ID NO: 2360 - protein, 2094 aa, synthetic construct
MPAAKRVKLDGGDKKYSIGLDIGTNSVGWAVITDEYKVPSKKFKVLGNTDRHSIKKNLIGALLFDSGETAEATRLKRTARRRYTRRKNRICYLQEIFSNEMAKVDDSFFHRLEESFLVEEDKKHERHPIFGNIVDEVAYHEKYPTIYHLRKKLVDSTDKADLRLIYLALAHMIKFRGHFLIEGDLNPDNSDVDKLFIQLVQTYNQLFEENPINASGVDAKAILSARLSKSRRLENLIAQLPGEKKNGLFGNLIALSLGLTPNFKSNFDLAEDAKLQLSKDTYDDDLDNLLAQIGDQYADLFLAAKNLSDAILLSDILRVNTEITKAPLSASMIKRYDEHHQDLTLLKALVRQQLPEKYKEIFFDQSKNGYAGYIDGGASQEEFYKFIKPILEKMDGTEELLVKLNREDLLRKQRTFDNGSIPHQIHLGELHAILRRQEDFYPFLKDNREKIEKILTFRIPYYVGPLARGNSRFAWMTRKSEETITPWNFEEVVDKGASAQSFIERMTNFDKNLPNEKVLPKHSLLYEYFTVYNELTKVKYVTEGMRKPAFLSGEQKKAIVDLLFKTNRKVTVKQLKEDYFKKIECFDSVEISGVEDRFNASLGTYHDLLKIIKDKDFLDNEENEDILEDIVLTLTLFEDREMIEERLKTYAHLFDDKVMKQLKRRRYTGWGRLSRKLINGIRDKQSGKTILDFLKSDGFANRNFMQLIHDDSLTFKEDIQKAQVSGQGDSLHEHIANLAGSPAIKKGILQTVKVVDELVKVMGRHKPENIVIEMARENQTTQKGQKNSRERMKRIEEGIKELGSQILKEHPVENTQLQNEKLYLYYLQNGRDMYVDQELDINRLSDYDVDHIVPQSFLKDDSIDNKVLTRSDKARGKSDNVPSEEVVKKMKNYWRQLLNAKLITQRKFDNLTKAERGGLSELDKAGFIKRQLVETRQITKHVAQILDSRMNTKYDENDKLIREVKVITLKSKLVSDFRKDFQFYKVREINNYHHAHDAYLNAVVGTALIKKYPKLESEFVYGDYKVYDVRKMIAKSEQEIGKATAKYFFYSNIMNFFKTEITLANGEIRKRPLIETNGETGEIVWDKGRDFATVRKVLSMPQVNIVKKTEVQTGGFSKESILPKRNSDKLIARKKDWDPKKYGGFDSPTVAYSVLVVAKVEKGKSKKLKSVKELLGITIMERSSFEKNPIDFLEAKGYKEVKKDLIIKLPKYSLFELENGRKRMLASAGELQKGNELALPSKYVNFLYLASHYEKLKGSPEDNEQKQLFVEQHKHYLDEIIEQISEFSKRVILADANLDKVLSAYNKHRDKPIREQAENIIHLFTLTNLGAPAAFKYFDTTIDRKRYTSTKEVLDATLIHQSITGLYETRIDLSQLGGDGGGGSGGSGGSGGTLNIEDEYRLHETSKEPDVSLGSTWLSDFPQAWAETGGMGLAVRQAPLIIPLKATSTPVSIKQYPMSQEARLGIKPHIQRLLDQGILVPCQSPWNTPLLPVKKPGTNDYRPVQDLREVNKRVEDIHPTVPNPYNLLSGLPPSHQWYTVLDLKDAFFCLRLHPTSQPLFAFEWRDPEMGISGQLTWTRLPQGFKNSPTLFNEALHRDLAGFRIQHPDLILLQYVDDLLLAATSELDCQQGTRALLQTLGDLGYRASAKKAQICQKQVKYLGYLLKEGQRWLTEARKETVMGQPIPKTPRQLREFLGKAGFCRLFIPGFAEMAAPLYPLTKPGTLFNWGPDQQKAFQEIKQALLTAPALGLPDLTKPFELFVDEKQGYAKGVLTQKLGPWRRPVAYLSKKLDPVAAGWPPCLRMVAAIAVLTKDAGKLTMGQPLVILAPHAVEALVKQPPDRWLSNARMTHYQALLLDTDRVQFGPVVALNPATLLPLPEEGLQHDCLDILAEAHGTRSDLMDQPLPDADHTWYTDGSSFLQEGQRKAGAAVTTETEVIWARALPAGTSAQRAELIALTQALKMAEGKKLNVYTDSRYAFATAHIHGEIYRRRGWLTSEGKEIKNKDEILALLKALFLPKRLSIIHCPGHQKGNSAEARGNRMADQAAREVATRETPETSTLLAGKRTADGSEFEKRTADGSEFESPKKKAKVE

SEQ ID NO: 2361 - protein, 2095 aa, synthetic construct
MPAAKRVKLDGGDKKYSIGLDIGTNSVGWAVITDEYKVPSKKFKVLGNTDRHSIKKNLIGALLFDSGETAEATRLKRTARRRYTRRKNRICYLQEIFSNEMAKVDDSFFHRLEESFLVEEDKKHERHPIFGNIVDEVAYHEKYPTIYHLRKKLVDSTDKADLRLIYLALAHMIKFRGHFLIEGDLNPDNSDVDKLFIQLVQTYNQLFEENPINASGVDAKAILSARLSKSRRLENLIAQLPGEKKNGLFGNLIALSLGLTPNFKSNFDLAEDAKLQLSKDTYDDDLDNLLAQIGDQYADLFLAAKNLSDAILLSDILRVNTEITKAPLSASMIKRYDEHHQDLTLLKALVRQQLPEKYKEIFFDQSKNGYAGYIDGGASQEEFYKFIKPILEKMDGTEELLVKLNREDLLRKQRTFDNGSIPHQIHLGELHAILRRQEDFYPFLKDNREKIEKILTFRIPYYVGPLARGNSRFAWMTRKSEETITPWNFEEVVDKGASAQSFIERMTNFDKNLPNEKVLPKHSLLYEYFTVYNELTKVKYVTEGMRKPAFLSGEQKKAIVDLLFKTNRKVTVKQLKEDYFKKIECFDSVEISGVEDRFNASLGTYHDLLKIIKDKDFLDNEENEDILEDIVLTLTLFEDREMIEERLKTYAHLFDDKVMKQLKRRRYTGWGRLSRKLINGIRDKQSGKTILDFLKSDGFANRNFMQLIHDDSLTFKEDIQKAQVSGQGDSLHEHIANLAGSPAIKKGILQTVKVVDELVKVMGRHKPENIVIEMARENQTTQKGQKNSRERMKRIEEGIKELGSQILKEHPVENTQLQNEKLYLYYLQNGRDMYVDQELDINRLSDYDVDHIVPQSFLKDDSIDNKVLTRSDKARGKSDNVPSEEVVKKMKNYWRQLLNAKLITQRKFDNLTKAERGGLSELDKAGFIKRQLVETRQITKHVAQILDSRMNTKYDENDKLIREVKVITLKSKLVSDFRKDFQFYKVREINNYHHAHDAYLNAVVGTALIKKYPKLESEFVYGDYKVYDVRKMIAKSEQEIGKATAKYFFYSNIMNFFKTEITLANGEIRKRPLIETNGETGEIVWDKGRDFATVRKVLSMPQVNIVKKTEVQTGGFSKESILPKRNSDKLIARKKDWDPKKYGGFDSPTVAYSVLVVAKVEKGKSKKLKSVKELLGITIMERSSFEKNPIDFLEAKGYKEVKKDLIIKLPKYSLFELENGRKRMLASAGELQKGNELALPSKYVNFLYLASHYEKLKGSPEDNEQKQLFVEQHKHYLDEIIEQISEFSKRVILADANLDKVLSAYNKHRDKPIREQAENIIHLFTLTNLGAPAAFKYFDTTIDRKRYTSTKEVLDATLIHQSITGLYETRIDLSQLGGDGGEAAAKEAAAKGGTLNIEDEYRLHETSKEPDVSLGSTWLSDFPQAWAETGGMGLAVRQAPLIIPLKATSTPVSIKQYPMSQEARLGIKPHIQRLLDQGILVPCQSPWNTPLLPVKKPGTNDYRPVQDLREVNKRVEDIHPTVPNPYNLLSGLPPSHQWYTVLDLKDAFFCLRLHPTSQPLFAFEWRDPEMGISGQLTWTRLPQGFKNSPTLFNEALHRDLAGFRIQHPDLILLQYVDDLLLAATSELDCQQGTRALLQTLGDLGYRASAKKAQICQKQVKYLGYLLKEGQRWLTEARKETVMGQPIPKTPRQLREFLGKAGFCRLFIPGFAEMAAPLYPLTKPGTLFNWGPDQQKAFQEIKQALLTAPALGLPDLTKPFELFVDEKQGYAKGVLTQKLGPWRRPVAYLSKKLDPVAAGWPPCLRMVAAIAVLTKDAGKLTMGQPLVILAPHAVEALVKQPPDRWLSNARMTHYQALLLDTDRVQFGPVVALNPATLLPLPEEGLQHDCLDILAEAHGTRSDLMDQPLPDADHTWYTDGSSFLQEGQRKAGAAVTTETEVIWARALPAGTSAQRAELIALTQALKMAEGKKLNVYTDSRYAFATAHIHGEIYRRRGWLTSEGKEIKNKDEILALLKALFLPKRLSIIHCPGHQKGNSAEARGNRMADQAAREVATRETPETSTLLAGKRTADGSEFEKRTADGSEFESPKKKAKVE

SEQ ID NO: 2362 - protein, 2091 aa, synthetic construct
MPAAKRVKLDGGDKKYSIGLDIGTNSVGWAVITDEYKVPSKKFKVLGNTDRHSIKKNLIGALLFDSGETAEATRLKRTARRRYTRRKNRICYLQEIFSNEMAKVDDSFFHRLEESFLVEEDKKHERHPIFGNIVDEVAYHEKYPTIYHLRKKLVDSTDKADLRLIYLALAHMIKFRGHFLIEGDLNPDNSDVDKLFIQLVQTYNQLFEENPINASGVDAKAILSARLSKSRRLENLIAQLPGEKKNGLFGNLIALSLGLTPNFKSNFDLAEDAKLQLSKDTYDDDLDNLLAQIGDQYADLFLAAKNLSDAILLSDILRVNTEITKAPLSASMIKRYDEHHQDLTLLKALVRQQLPEKYKEIFFDQSKNGYAGYIDGGASQEEFYKFIKPILEKMDGTEELLVKLNREDLLRKQRTFDNGSIPHQIHLGELHAILRRQEDFYPFLKDNREKIEKILTFRIPYYVGPLARGNSRFAWMTRKSEETITPWNFEEVVDKGASAQSFIERMTNFDKNLPNEKVLPKHSLLYEYFTVYNELTKVKYVTEGMRKPAFLSGEQKKAIVDLLFKTNRKVTVKQLKEDYFKKIECFDSVEISGVEDRFNASLGTYHDLLKIIKDKDFLDNEENEDILEDIVLTLTLFEDREMIEERLKTYAHLFDDKVMKQLKRRRYTGWGRLSRKLINGIRDKQSGKTILDFLKSDGFANRNFMQLIHDDSLTFKEDIQKAQVSGQGDSLHEHIANLAGSPAIKKGILQTVKVVDELVKVMGRHKPENIVIEMARENQTTQKGQKNSRERMKRIEEGIKELGSQILKEHPVENTQLQNEKLYLYYLQNGRDMYVDQELDINRLSDYDVDHIVPQSFLKDDSIDNKVLTRSDKARGKSDNVPSEEVVKKMKNYWRQLLNAKLITQRKFDNLTKAERGGLSELDKAGFIKRQLVETRQITKHVAQILDSRMNTKYDENDKLIREVKVITLKSKLVSDFRKDFQFYKVREINNYHHAHDAYLNAVVGTALIKKYPKLESEFVYGDYKVYDVRKMIAKSEQEIGKATAKYFFYSNIMNFFKTEITLANGEIRKRPLIETNGETGEIVWDKGRDFATVRKVLSMPQVNIVKKTEVQTGGFSKESILPKRNSDKLIARKKDWDPKKYGGFDSPTVAYSVLVVAKVEKGKSKKLKSVKELLGITIMERSSFEKNPIDFLEAKGYKEVKKDLIIKLPKYSLFELENGRKRMLASAGELQKGNELALPSKYVNFLYLASHYEKLKGSPEDNEQKQLFVEQHKHYLDEIIEQISEFSKRVILADANLDKVLSAYNKHRDKPIREQAENIIHLFTLTNLGAPAAFKYFDTTIDRKRYTSTKEVLDATLIHQSITGLYETRIDLSQLGGDGGGSSGGGGGTLNIEDEYRLHETSKEPDVSLGSTWLSDFPQAWAETGGMGLAVRQAPLIIPLKATSTPVSIKQYPMSQEARLGIKPHIQRLLDQGILVPCQSPWNTPLLPVKKPGTNDYRPVQDLREVNKRVEDIHPTVPNPYNLLSGLPPSHQWYTVLDLKDAFFCLRLHPTSQPLFAFEWRDPEMGISGQLTWTRLPQGFKNSPTLFNEALHRDLAGFRIQHPDLILLQYVDDLLLAATSELDCQQGTRALLQTLGDLGYRASAKKAQICQKQVKYLGYLLKEGQRWLTEARKETVMGQPIPKTPRQLREFLGKAGFCRLFIPGFAEMAAPLYPLTKPGTLFNWGPDQQKAFQEIKQALLTAPALGLPDLTKPFELFVDEKQGYAKGVLTQKLGPWRRPVAYLSKKLDPVAAGWPPCLRMVAAIAVLTKDAGKLTMGQPLVILAPHAVEALVKQPPDRWLSNARMTHYQALLLDTDRVQFGPVVALNPATLLPLPEEGLQHDCLDILAEAHGTRSDLMDQPLPDADHTWYTDGSSFLQEGQRKAGAAVTTETEVIWARALPAGTSAQRAELIALTQALKMAEGKKLNVYTDSRYAFATAHIHGEIYRRRGWLTSEGKEIKNKDEILALLKALFLPKRLSIIHCPGHQKGNSAEARGNRMADQAAREVATRETPETSTLLAGKRTADGSEFEKRTADGSEFESPKKKAKVE

SEQ ID NO: 2363 - protein, 2093 aa, synthetic construct
MPAAKRVKLDGGDKKYSIGLDIGTNSVGWAVITDEYKVPSKKFKVLGNTDRHSIKKNLIGALLFDSGETAEATRLKRTARRRYTRRKNRICYLQEIFSNEMAKVDDSFFHRLEESFLVEEDKKHERHPIFGNIVDEVAYHEKYPTIYHLRKKLVDSTDKADLRLIYLALAHMIKFRGHFLIEGDLNPDNSDVDKLFIQLVQTYNQLFEENPINASGVDAKAILSARLSKSRRLENLIAQLPGEKKNGLFGNLIALSLGLTPNFKSNFDLAEDAKLQLSKDTYDDDLDNLLAQIGDQYADLFLAAKNLSDAILLSDILRVNTEITKAPLSASMIKRYDEHHQDLTLLKALVRQQLPEKYKEIFFDQSKNGYAGYIDGGASQEEFYKFIKPILEKMDGTEELLVKLNREDLLRKQRTFDNGSIPHQIHLGELHAILRRQEDFYPFLKDNREKIEKILTFRIPYYVGPLARGNSRFAWMTRKSEETITPWNFEEVVDKGASAQSFIERMTNFDKNLPNEKVLPKHSLLYEYFTVYNELTKVKYVTEGMRKPAFLSGEQKKAIVDLLFKTNRKVTVKQLKEDYFKKIECFDSVEISGVEDRFNASLGTYHDLLKIIKDKDFLDNEENEDILEDIVLTLTLFEDREMIEERLKTYAHLFDDKVMKQLKRRRYTGWGRLSRKLINGIRDKQSGKTILDFLKSDGFANRNFMQLIHDDSLTFKEDIQKAQVSGQGDSLHEHIANLAGSPAIKKGILQTVKVVDELVKVMGRHKPENIVIEMARENQTTQKGQKNSRERMKRIEEGIKELGSQILKEHPVENTQLQNEKLYLYYLQNGRDMYVDQELDINRLSDYDVDHIVPQSFLKDDSIDNKVLTRSDKARGKSDNVPSEEVVKKMKNYWRQLLNAKLITQRKFDNLTKAERGGLSELDKAGFIKRQLVETRQITKHVAQILDSRMNTKYDENDKLIREVKVITLKSKLVSDFRKDFQFYKVREINNYHHAHDAYLNAVVGTALIKKYPKLESEFVYGDYKVYDVRKMIAKSEQEIGKATAKYFFYSNIMNFFKTEITLANGEIRKRPLIETNGETGEIVWDKGRDFATVRKVLSMPQVNIVKKTEVQTGGFSKESILPKRNSDKLIARKKDWDPKKYGGFDSPTVAYSVLVVAKVEKGKSKKLKSVKELLGITIMERSSFEKNPIDFLEAKGYKEVKKDLIIKLPKYSLFELENGRKRMLASAGELQKGNELALPSKYVNFLYLASHYEKLKGSPEDNEQKQLFVEQHKHYLDEIIEQISEFSKRVILADANLDKVLSAYNKHRDKPIREQAENIIHLFTLTNLGAPAAFKYFDTTIDRKRYTSTKEVLDATLIHQSITGLYETRIDLSQLGGDGGGGSEAAAKGGTLNIEDEYRLHETSKEPDVSLGSTWLSDFPQAWAETGGMGLAVRQAPLIIPLKATSTPVSIKQYPMSQEARLGIKPHIQRLLDQGILVPCQSPWNTPLLPVKKPGTNDYRPVQDLREVNKRVEDIHPTVPNPYNLLSGLPPSHQWYTVLDLKDAFFCLRLHPTSQPLFAFEWRDPEMGISGQLTWTRLPQGFKNSPTLFNEALHRDLAGFRIQHPDLILLQYVDDLLLAATSELDCQQGTRALLQTLGDLGYRASAKKAQICQKQVKYLGYLLKEGQRWLTEARKETVMGQPIPKTPRQLREFLGKAGFCRLFIPGFAEMAAPLYPLTKPGTLFNWGPDQQKAFQEIKQALLTAPALGLPDLTKPFELFVDEKQGYAKGVLTQKLGPWRRPVAYLSKKLDPVAAGWPPCLRMVAAIAVLTKDAGKLTMGQPLVILAPHAVEALVKQPPDRWLSNARMTHYQALLLDTDRVQFGPVVALNPATLLPLPEEGLQHDCLDILAEAHGTRSDLMDQPLPDADHTWYTDGSSFLQEGQRKAGAAVTTETEVIWARALPAGTSAQRAELIALTQALKMAEGKKLNVYTDSRYAFATAHIHGEIYRRRGWLTSEGKEIKNKDEILALLKALFLPKRLSIIHCPGHQKGNSAEARGNRMADQAAREVATRETPETSTLLAGKRTADGSEFEKRTADGSEFESPKKKAKVE

SEQ ID NO: 2364 - protein, 2090 aa, synthetic construct
MPAAKRVKLDGGDKKYSIGLDIGTNSVGWAVITDEYKVPSKKFKVLGNTDRHSIKKNLIGALLFDSGETAEATRLKRTARRRYTRRKNRICYLQEIFSNEMAKVDDSFFHRLEESFLVEEDKKHERHPIFGNIVDEVAYHEKYPTIYHLRKKLVDSTDKADLRLIYLALAHMIKFRGHFLIEGDLNPDNSDVDKLFIQLVQTYNQLFEENPINASGVDAKAILSARLSKSRRLENLIAQLPGEKKNGLFGNLIALSLGLTPNFKSNFDLAEDAKLQLSKDTYDDDLDNLLAQIGDQYADLFLAAKNLSDAILLSDILRVNTEITKAPLSASMIKRYDEHHQDLTLLKALVRQQLPEKYKEIFFDQSKNGYAGYIDGGASQEEFYKFIKPILEKMDGTEELLVKLNREDLLRKQRTFDNGSIPHQIHLGELHAILRRQEDFYPFLKDNREKIEKILTFRIPYYVGPLARGNSRFAWMTRKSEETITPWNFEEVVDKGASAQSFIERMTNFDKNLPNEKVLPKHSLLYEYFTVYNELTKVKYVTEGMRKPAFLSGEQKKAIVDLLFKTNRKVTVKQLKEDYFKKIECFDSVEISGVEDRFNASLGTYHDLLKIIKDKDFLDNEENEDILEDIVLTLTLFEDREMIEERLKTYAHLFDDKVMKQLKRRRYTGWGRLSRKLINGIRDKQSGKTILDFLKSDGFANRNFMQLIHDDSLTFKEDIQKAQVSGQGDSLHEHIANLAGSPAIKKGILQTVKVVDELVKVMGRHKPENIVIEMARENQTTQKGQKNSRERMKRIEEGIKELGSQILKEHPVENTQLQNEKLYLYYLQNGRDMYVDQELDINRLSDYDVDHIVPQSFLKDDSIDNKVLTRSDKARGKSDNVPSEEVVKKMKNYWRQLLNAKLITQRKFDNLTKAERGGLSELDKAGFIKRQLVETRQITKHVAQILDSRMNTKYDENDKLIREVKVITLKSKLVSDFRKDFQFYKVREINNYHHAHDAYLNAVVGTALIKKYPKLESEFVYGDYKVYDVRKMIAKSEQEIGKATAKYFFYSNIMNFFKTEITLANGEIRKRPLIETNGETGEIVWDKGRDFATVRKVLSMPQVNIVKKTEVQTGGFSKESILPKRNSDKLIARKKDWDPKKYGGFDSPTVAYSVLVVAKVEKGKSKKLKSVKELLGITIMERSSFEKNPIDFLEAKGYKEVKKDLIIKLPKYSLFELENGRKRMLASAGELQKGNELALPSKYVNFLYLASHYEKLKGSPEDNEQKQLFVEQHKHYLDEIIEQISEFSKRVILADANLDKVLSAYNKHRDKPIREQAENIIHLFTLTNLGAPAAFKYFDTTIDRKRYTSTKEVLDATLIHQSITGLYETRIDLSQLGGDGGPAPAPGGTLNIEDEYRLHETSKEPDVSLGSTWLSDFPQAWAETGGMGLAVRQAPLIIPLKATSTPVSIKQYPMSQEARLGIKPHIQRLLDQGILVPCQSPWNTPLLPVKKPGTNDYRPVQDLREVNKRVEDIHPTVPNPYNLLSGLPPSHQWYTVLDLKDAFFCLRLHPTSQPLFAFEWRDPEMGISGQLTWTRLPQGFKNSPTLFNEALHRDLAGFRIQHPDLILLQYVDDLLLAATSELDCQQGTRALLQTLGDLGYRASAKKAQICQKQVKYLGYLLKEGQRWLTEARKETVMGQPIPKTPRQLREFLGKAGFCRLFIPGFAEMAAPLYPLTKPGTLFNWGPDQQKAFQEIKQALLTAPALGLPDLTKPFELFVDEKQGYAKGVLTQKLGPWRRPVAYLSKKLDPVAAGWPPCLRMVAAIAVLTKDAGKLTMGQPLVILAPHAVEALVKQPPDRWLSNARMTHYQALLLDTDRVQFGPVVALNPATLLPLPEEGLQHDCLDILAEAHGTRSDLMDQPLPDADHTWYTDGSSFLQEGQRKAGAAVTTETEVIWARALPAGTSAQRAELIALTQALKMAEGKKLNVYTDSRYAFATAHIHGEIYRRRGWLTSEGKEIKNKDEILALLKALFLPKRLSIIHCPGHQKGNSAEARGNRMADQAAREVATRETPETSTLLAGKRTADGSEFEKRTADGSEFESPKKKAKVE

SEQ ID NO: 2365 - protein, 2094 aa, synthetic construct
MPAAKRVKLDGGDKKYSIGLDIGTNSVGWAVITDEYKVPSKKFKVLGNTDRHSIKKNLIGALLFDSGETAEATRLKRTARRRYTRRKNRICYLQEIFSNEMAKVDDSFFHRLEESFLVEEDKKHERHPIFGNIVDEVAYHEKYPTIYHLRKKLVDSTDKADLRLIYLALAHMIKFRGHFLIEGDLNPDNSDVDKLFIQLVQTYNQLFEENPINASGVDAKAILSARLSKSRRLENLIAQLPGEKKNGLFGNLIALSLGLTPNFKSNFDLAEDAKLQLSKDTYDDDLDNLLAQIGDQYADLFLAAKNLSDAILLSDILRVNTEITKAPLSASMIKRYDEHHQDLTLLKALVRQQLPEKYKEIFFDQSKNGYAGYIDGGASQEEFYKFIKPILEKMDGTEELLVKLNREDLLRKQRTFDNGSIPHQIHLGELHAILRRQEDFYPFLKDNREKIEKILTFRIPYYVGPLARGNSRFAWMTRKSEETITPWNFEEVVDKGASAQSFIERMTNFDKNLPNEKVLPKHSLLYEYFTVYNELTKVKYVTEGMRKPAFLSGEQKKAIVDLLFKTNRKVTVKQLKEDYFKKIECFDSVEISGVEDRFNASLGTYHDLLKIIKDKDFLDNEENEDILEDIVLTLTLFEDREMIEERLKTYAHLFDDKVMKQLKRRRYTGWGRLSRKLINGIRDKQSGKTILDFLKSDGFANRNFMQLIHDDSLTFKEDIQKAQVSGQGDSLHEHIANLAGSPAIKKGILQTVKVVDELVKVMGRHKPENIVIEMARENQTTQKGQKNSRERMKRIEEGIKELGSQILKEHPVENTQLQNEKLYLYYLQNGRDMYVDQELDINRLSDYDVDHIVPQSFLKDDSIDNKVLTRSDKARGKSDNVPSEEVVKKMKNYWRQLLNAKLITQRKFDNLTKAERGGLSELDKAGFIKRQLVETRQITKHVAQILDSRMNTKYDENDKLIREVKVITLKSKLVSDFRKDFQFYKVREINNYHHAHDAYLNAVVGTALIKKYPKLESEFVYGDYKVYDVRKMIAKSEQEIGKATAKYFFYSNIMNFFKTEITLANGEIRKRPLIETNGETGEIVWDKGRDFATVRKVLSMPQVNIVKKTEVQTGGFSKESILPKRNSDKLIARKKDWDPKKYGGFDSPTVAYSVLVVAKVEKGKSKKLKSVKELLGITIMERSSFEKNPIDFLEAKGYKEVKKDLIIKLPKYSLFELENGRKRMLASAGELQKGNELALPSKYVNFLYLASHYEKLKGSPEDNEQKQLFVEQHKHYLDEIIEQISEFSKRVILADANLDKVLSAYNKHRDKPIREQAENIIHLFTLTNLGAPAAFKYFDTTIDRKRYTSTKEVLDATLIHQSITGLYETRIDLSQLGGDGGGGSPAPGGGGGTLNIEDEYRLHETSKEPDVSLGSTWLSDFPQAWAETGGMGLAVRQAPLIIPLKATSTPVSIKQYPMSQEARLGIKPHIQRLLDQGILVPCQSPWNTPLLPVKKPGTNDYRPVQDLREVNKRVEDIHPTVPNPYNLLSGLPPSHQWYTVLDLKDAFFCLRLHPTSQPLFAFEWRDPEMGISGQLTWTRLPQGFKNSPTLFNEALHRDLAGFRIQHPDLILLQYVDDLLLAATSELDCQQGTRALLQTLGDLGYRASAKKAQICQKQVKYLGYLLKEGQRWLTEARKETVMGQPIPKTPRQLREFLGKAGFCRLFIPGFAEMAAPLYPLTKPGTLFNWGPDQQKAFQEIKQALLTAPALGLPDLTKPFELFVDEKQGYAKGVLTQKLGPWRRPVAYLSKKLDPVAAGWPPCLRMVAAIAVLTKDAGKLTMGQPLVILAPHAVEALVKQPPDRWLSNARMTHYQALLLDTDRVQFGPVVALNPATLLPLPEEGLQHDCLDILAEAHGTRSDLMDQPLPDADHTWYTDGSSFLQEGQRKAGAAVTTETEVIWARALPAGTSAQRAELIALTQALKMAEGKKLNVYTDSRYAFATAHIHGEIYRRRGWLTSEGKEIKNKDEILALLKALFLPKRLSIIHCPGHQKGNSAEARGNRMADQAAREVATRETPETSTLLAGKRTADGSEFEKRTADGSEFESPKKKAKVE

SEQ ID NO: 2366 - protein, 2091 aa, synthetic construct
MPAAKRVKLDGGDKKYSIGLDIGTNSVGWAVITDEYKVPSKKFKVLGNTDRHSIKKNLIGALLFDSGETAEATRLKRTARRRYTRRKNRICYLQEIFSNEMAKVDDSFFHRLEESFLVEEDKKHERHPIFGNIVDEVAYHEKYPTIYHLRKKLVDSTDKADLRLIYLALAHMIKFRGHFLIEGDLNPDNSDVDKLFIQLVQTYNQLFEENPINASGVDAKAILSARLSKSRRLENLIAQLPGEKKNGLFGNLIALSLGLTPNFKSNFDLAEDAKLQLSKDTYDDDLDNLLAQIGDQYADLFLAAKNLSDAILLSDILRVNTEITKAPLSASMIKRYDEHHQDLTLLKALVRQQLPEKYKEIFFDQSKNGYAGYIDGGASQEEFYKFIKPILEKMDGTEELLVKLNREDLLRKQRTFDNGSIPHQIHLGELHAILRRQEDFYPFLKDNREKIEKILTFRIPYYVGPLARGNSRFAWMTRKSEETITPWNFEEVVDKGASAQSFIERMTNFDKNLPNEKVLPKHSLLYEYFTVYNELTKVKYVTEGMRKPAFLSGEQKKAIVDLLFKTNRKVTVKQLKEDYFKKIECFDSVEISGVEDRFNASLGTYHDLLKIIKDKDFLDNEENEDILEDIVLTLTLFEDREMIEERLKTYAHLFDDKVMKQLKRRRYTGWGRLSRKLINGIRDKQSGKTILDFLKSDGFANRNFMQLIHDDSLTFKEDIQKAQVSGQGDSLHEHIANLAGSPAIKKGILQTVKVVDELVKVMGRHKPENIVIEMARENQTTQKGQKNSRERMKRIEEGIKELGSQILKEHPVENTQLQNEKLYLYYLQNGRDMYVDQELDINRLSDYDVDHIVPQSFLKDDSIDNKVLTRSDKARGKSDNVPSEEVVKKMKNYWRQLLNAKLITQRKFDNLTKAERGGLSELDKAGFIKRQLVETRQITKHVAQILDSRMNTKYDENDKLIREVKVITLKSKLVSDFRKDFQFYKVREINNYHHAHDAYLNAVVGTALIKKYPKLESEFVYGDYKVYDVRKMIAKSEQEIGKATAKYFFYSNIMNFFKTEITLANGEIRKRPLIETNGETGEIVWDKGRDFATVRKVLSMPQVNIVKKTEVQTGGFSKESILPKRNSDKLIARKKDWDPKKYGGFDSPTVAYSVLVVAKVEKGKSKKLKSVKELLGITIMERSSFEKNPIDFLEAKGYKEVKKDLIIKLPKYSLFELENGRKRMLASAGELQKGNELALPSKYVNFLYLASHYEKLKGSPEDNEQKQLFVEQHKHYLDEIIEQISEFSKRVILADANLDKVLSAYNKHRDKPIREQAENIIHLFTLTNLGAPAAFKYFDTTIDRKRYTSTKEVLDATLIHQSITGLYETRIDLSQLGGDGGGSSPAPGGTLNIEDEYRLHETSKEPDVSLGSTWLSDFPQAWAETGGMGLAVRQAPLIIPLKATSTPVSIKQYPMSQEARLGIKPHIQRLLDQGILVPCQSPWNTPLLPVKKPGTNDYRPVQDLREVNKRVEDIHPTVPNPYNLLSGLPPSHQWYTVLDLKDAFFCLRLHPTSQPLFAFEWRDPEMGISGQLTWTRLPQGFKNSPTLFNEALHRDLAGFRIQHPDLILLQYVDDLLLAATSELDCQQGTRALLQTLGDLGYRASAKKAQICQKQVKYLGYLLKEGQRWLTEARKETVMGQPIPKTPRQLREFLGKAGFCRLFIPGFAEMAAPLYPLTKPGTLFNWGPDQQKAFQEIKQALLTAPALGLPDLTKPFELFVDEKQGYAKGVLTQKLGPWRRPVAYLSKKLDPVAAGWPPCLRMVAAIAVLTKDAGKLTMGQPLVILAPHAVEALVKQPPDRWLSNARMTHYQALLLDTDRVQFGPVVALNPATLLPLPEEGLQHDCLDILAEAHGTRSDLMDQPLPDADHTWYTDGSSFLQEGQRKAGAAVTTETEVIWARALPAGTSAQRAELIALTQALKMAEGKKLNVYTDSRYAFATAHIHGEIYRRRGWLTSEGKEIKNKDEILALLKALFLPKRLSIIHCPGHQKGNSAEARGNRMADQAAREVATRETPETSTLLAGKRTADGSEFEKRTADGSEFESPKKKAKVE

SEQ ID NO: 2367 - protein, 2096 aa, synthetic construct
MPAAKRVKLDGGDKKYSIGLDIGTNSVGWAVITDEYKVPSKKFKVLGNTDRHSIKKNLIGALLFDSGETAEATRLKRTARRRYTRRKNRICYLQEIFSNEMAKVDDSFFHRLEESFLVEEDKKHERHPIFGNIVDEVAYHEKYPTIYHLRKKLVDSTDKADLRLIYLALAHMIKFRGHFLIEGDLNPDNSDVDKLFIQLVQTYNQLFEENPINASGVDAKAILSARLSKSRRLENLIAQLPGEKKNGLFGNLIALSLGLTPNFKSNFDLAEDAKLQLSKDTYDDDLDNLLAQIGDQYADLFLAAKNLSDAILLSDILRVNTEITKAPLSASMIKRYDEHHQDLTLLKALVRQQLPEKYKEIFFDQSKNGYAGYIDGGASQEEFYKFIKPILEKMDGTEELLVKLNREDLLRKQRTFDNGSIPHQIHLGELHAILRRQEDFYPFLKDNREKIEKILTFRIPYYVGPLARGNSRFAWMTRKSEETITPWNFEEVVDKGASAQSFIERMTNFDKNLPNEKVLPKHSLLYEYFTVYNELTKVKYVTEGMRKPAFLSGEQKKAIVDLLFKTNRKVTVKQLKEDYFKKIECFDSVEISGVEDRFNASLGTYHDLLKIIKDKDFLDNEENEDILEDIVLTLTLFEDREMIEERLKTYAHLFDDKVMKQLKRRRYTGWGRLSRKLINGIRDKQSGKTILDFLKSDGFANRNFMQLIHDDSLTFKEDIQKAQVSGQGDSLHEHIANLAGSPAIKKGILQTVKVVDELVKVMGRHKPENIVIEMARENQTTQKGQKNSRERMKRIEEGIKELGSQILKEHPVENTQLQNEKLYLYYLQNGRDMYVDQELDINRLSDYDVDHIVPQSFLKDDSIDNKVLTRSDKARGKSDNVPSEEVVKKMKNYWRQLLNAKLITQRKFDNLTKAERGGLSELDKAGFIKRQLVETRQITKHVAQILDSRMNTKYDENDKLIREVKVITLKSKLVSDFRKDFQFYKVREINNYHHAHDAYLNAVVGTALIKKYPKLESEFVYGDYKVYDVRKMIAKSEQEIGKATAKYFFYSNIMNFFKTEITLANGEIRKRPLIETNGETGEIVWDKGRDFATVRKVLSMPQVNIVKKTEVQTGGFSKESILPKRNSDKLIARKKDWDPKKYGGFDSPTVAYSVLVVAKVEKGKSKKLKSVKELLGITIMERSSFEKNPIDFLEAKGYKEVKKDLIIKLPKYSLFELENGRKRMLASAGELQKGNELALPSKYVNFLYLASHYEKLKGSPEDNEQKQLFVEQHKHYLDEIIEQISEFSKRVILADANLDKVLSAYNKHRDKPIREQAENIIHLFTLTNLGAPAAFKYFDTTIDRKRYTSTKEVLDATLIHQSITGLYETRIDLSQLGGDGGEAAAKGSSGGGGGTLNIEDEYRLHETSKEPDVSLGSTWLSDFPQAWAETGGMGLAVRQAPLIIPLKATSTPVSIKQYPMSQEARLGIKPHIQRLLDQGILVPCQSPWNTPLLPVKKPGTNDYRPVQDLREVNKRVEDIHPTVPNPYNLLSGLPPSHQWYTVLDLKDAFFCLRLHPTSQPLFAFEWRDPEMGISGQLTWTRLPQGFKNSPTLFNEALHRDLAGFRIQHPDLILLQYVDDLLLAATSELDCQQGTRALLQTLGDLGYRASAKKAQICQKQVKYLGYLLKEGQRWLTEARKETVMGQPIPKTPRQLREFLGKAGFCRLFIPGFAEMAAPLYPLTKPGTLFNWGPDQQKAFQEIKQALLTAPALGLPDLTKPFELFVDEKQGYAKGVLTQKLGPWRRPVAYLSKKLDPVAAGWPPCLRMVAAIAVLTKDAGKLTMGQPLVILAPHAVEALVKQPPDRWLSNARMTHYQALLLDTDRVQFGPVVALNPATLLPLPEEGLQHDCLDILAEAHGTRSDLMDQPLPDADHTWYTDGSSFLQEGQRKAGAAVTTETEVIWARALPAGTSAQRAELIALTQALKMAEGKKLNVYTDSRYAFATAHIHGEIYRRRGWLTSEGKEIKNKDEILALLKALFLPKRLSIIHCPGHQKGNSAEARGNRMADQAAREVATRETPETSTLLAGKRTADGSEFEKRTADGSEFESPKKKAKVE

SEQ ID NO: 2368 - protein, 2096 aa, synthetic construct
MPAAKRVKLDGGDKKYSIGLDIGTNSVGWAVITDEYKVPSKKFKVLGNTDRHSIKKNLIGALLFDSGETAEATRLKRTARRRYTRRKNRICYLQEIFSNEMAKVDDSFFHRLEESFLVEEDKKHERHPIFGNIVDEVAYHEKYPTIYHLRKKLVDSTDKADLRLIYLALAHMIKFRGHFLIEGDLNPDNSDVDKLFIQLVQTYNQLFEENPINASGVDAKAILSARLSKSRRLENLIAQLPGEKKNGLFGNLIALSLGLTPNFKSNFDLAEDAKLQLSKDTYDDDLDNLLAQIGDQYADLFLAAKNLSDAILLSDILRVNTEITKAPLSASMIKRYDEHHQDLTLLKALVRQQLPEKYKEIFFDQSKNGYAGYIDGGASQEEFYKFIKPILEKMDGTEELLVKLNREDLLRKQRTFDNGSIPHQIHLGELHAILRRQEDFYPFLKDNREKIEKILTFRIPYYVGPLARGNSRFAWMTRKSEETITPWNFEEVVDKGASAQSFIERMTNFDKNLPNEKVLPKHSLLYEYFTVYNELTKVKYVTEGMRKPAFLSGEQKKAIVDLLFKTNRKVTVKQLKEDYFKKIECFDSVEISGVEDRFNASLGTYHDLLKIIKDKDFLDNEENEDILEDIVLTLTLFEDREMIEERLKTYAHLFDDKVMKQLKRRRYTGWGRLSRKLINGIRDKQSGKTILDFLKSDGFANRNFMQLIHDDSLTFKEDIQKAQVSGQGDSLHEHIANLAGSPAIKKGILQTVKVVDELVKVMGRHKPENIVIEMARENQTTQKGQKNSRERMKRIEEGIKELGSQILKEHPVENTQLQNEKLYLYYLQNGRDMYVDQELDINRLSDYDVDHIVPQSFLKDDSIDNKVLTRSDKARGKSDNVPSEEVVKKMKNYWRQLLNAKLITQRKFDNLTKAERGGLSELDKAGFIKRQLVETRQITKHVAQILDSRMNTKYDENDKLIREVKVITLKSKLVSDFRKDFQFYKVREINNYHHAHDAYLNAVVGTALIKKYPKLESEFVYGDYKVYDVRKMIAKSEQEIGKATAKYFFYSNIMNFFKTEITLANGEIRKRPLIETNGETGEIVWDKGRDFATVRKVLSMPQVNIVKKTEVQTGGFSKESILPKRNSDKLIARKKDWDPKKYGGFDSPTVAYSVLVVAKVEKGKSKKLKSVKELLGITIMERSSFEKNPIDFLEAKGYKEVKKDLIIKLPKYSLFELENGRKRMLASAGELQKGNELALPSKYVNFLYLASHYEKLKGSPEDNEQKQLFVEQHKHYLDEIIEQISEFSKRVILADANLDKVLSAYNKHRDKPIREQAENIIHLFTLTNLGAPAAFKYFDTTIDRKRYTSTKEVLDATLIHQSITGLYETRIDLSQLGGDGGEAAAKGSSGGSGGTLNIEDEYRLHETSKEPDVSLGSTWLSDFPQAWAETGGMGLAVRQAPLIIPLKATSTPVSIKQYPMSQEARLGIKPHIQRLLDQGILVPCQSPWNTPLLPVKKPGTNDYRPVQDLREVNKRVEDIHPTVPNPYNLLSGLPPSHQWYTVLDLKDAFFCLRLHPTSQPLFAFEWRDPEMGISGQLTWTRLPQGFKNSPTLFNEALHRDLAGFRIQHPDLILLQYVDDLLLAATSELDCQQGTRALLQTLGDLGYRASAKKAQICQKQVKYLGYLLKEGQRWLTEARKETVMGQPIPKTPRQLREFLGKAGFCRLFIPGFAEMAAPLYPLTKPGTLFNWGPDQQKAFQEIKQALLTAPALGLPDLTKPFELFVDEKQGYAKGVLTQKLGPWRRPVAYLSKKLDPVAAGWPPCLRMVAAIAVLTKDAGKLTMGQPLVILAPHAVEALVKQPPDRWLSNARMTHYQALLLDTDRVQFGPVVALNPATLLPLPEEGLQHDCLDILAEAHGTRSDLMDQPLPDADHTWYTDGSSFLQEGQRKAGAAVTTETEVIWARALPAGTSAQRAELIALTQALKMAEGKKLNVYTDSRYAFATAHIHGEIYRRRGWLTSEGKEIKNKDEILALLKALFLPKRLSIIHCPGHQKGNSAEARGNRMADQAAREVATRETPETSTLLAGKRTADGSEFEKRTADGSEFESPKKKAKVE

SEQ ID NO: 2369 - protein, 2095 aa, synthetic construct
MPAAKRVKLDGGDKKYSIGLDIGTNSVGWAVITDEYKVPSKKFKVLGNTDRHSIKKNLIGALLFDSGETAEATRLKRTARRRYTRRKNRICYLQEIFSNEMAKVDDSFFHRLEESFLVEEDKKHERHPIFGNIVDEVAYHEKYPTIYHLRKKLVDSTDKADLRLIYLALAHMIKFRGHFLIEGDLNPDNSDVDKLFIQLVQTYNQLFEENPINASGVDAKAILSARLSKSRRLENLIAQLPGEKKNGLFGNLIALSLGLTPNFKSNFDLAEDAKLQLSKDTYDDDLDNLLAQIGDQYADLFLAAKNLSDAILLSDILRVNTEITKAPLSASMIKRYDEHHQDLTLLKALVRQQLPEKYKEIFFDQSKNGYAGYIDGGASQEEFYKFIKPILEKMDGTEELLVKLNREDLLRKQRTFDNGSIPHQIHLGELHAILRRQEDFYPFLKDNREKIEKILTFRIPYYVGPLARGNSRFAWMTRKSEETITPWNFEEVVDKGASAQSFIERMTNFDKNLPNEKVLPKHSLLYEYFTVYNELTKVKYVTEGMRKPAFLSGEQKKAIVDLLFKTNRKVTVKQLKEDYFKKIECFDSVEISGVEDRFNASLGTYHDLLKIIKDKDFLDNEENEDILEDIVLTLTLFEDREMIEERLKTYAHLFDDKVMKQLKRRRYTGWGRLSRKLINGIRDKQSGKTILDFLKSDGFANRNFMQLIHDDSLTFKEDIQKAQVSGQGDSLHEHIANLAGSPAIKKGILQTVKVVDELVKVMGRHKPENIVIEMARENQTTQKGQKNSRERMKRIEEGIKELGSQILKEHPVENTQLQNEKLYLYYLQNGRDMYVDQELDINRLSDYDVDHIVPQSFLKDDSIDNKVLTRSDKARGKSDNVPSEEVVKKMKNYWRQLLNAKLITQRKFDNLTKAERGGLSELDKAGFIKRQLVETRQITKHVAQILDSRMNTKYDENDKLIREVKVITLKSKLVSDFRKDFQFYKVREINNYHHAHDAYLNAVVGTALIKKYPKLESEFVYGDYKVYDVRKMIAKSEQEIGKATAKYFFYSNIMNFFKTEITLANGEIRKRPLIETNGETGEIVWDKGRDFATVRKVLSMPQVNIVKKTEVQTGGFSKESILPKRNSDKLIARKKDWDPKKYGGFDSPTVAYSVLVVAKVEKGKSKKLKSVKELLGITIMERSSFEKNPIDFLEAKGYKEVKKDLIIKLPKYSLFELENGRKRMLASAGELQKGNELALPSKYVNFLYLASHYEKLKGSPEDNEQKQLFVEQHKHYLDEIIEQISEFSKRVILADANLDKVLSAYNKHRDKPIREQAENIIHLFTLTNLGAPAAFKYFDTTIDRKRYTSTKEVLDATLIHQSITGLYETRIDLSQLGGDGGGGGGSGGGGSGGTLNIEDEYRLHETSKEPDVSLGSTWLSDFPQAWAETGGMGLAVRQAPLIIPLKATSTPVSIKQYPMSQEARLGIKPHIQRLLDQGILVPCQSPWNTPLLPVKKPGTNDYRPVQDLREVNKRVEDIHPTVPNPYNLLSGLPPSHQWYTVLDLKDAFFCLRLHPTSQPLFAFEWRDPEMGISGQLTWTRLPQGFKNSPTLFNEALHRDLAGFRIQHPDLILLQYVDDLLLAATSELDCQQGTRALLQTLGDLGYRASAKKAQICQKQVKYLGYLLKEGQRWLTEARKETVMGQPIPKTPRQLREFLGKAGFCRLFIPGFAEMAAPLYPLTKPGTLFNWGPDQQKAFQEIKQALLTAPALGLPDLTKPFELFVDEKQGYAKGVLTQKLGPWRRPVAYLSKKLDPVAAGWPPCLRMVAAIAVLTKDAGKLTMGQPLVILAPHAVEALVKQPPDRWLSNARMTHYQALLLDTDRVQFGPVVALNPATLLPLPEEGLQHDCLDILAEAHGTRSDLMDQPLPDADHTWYTDGSSFLQEGQRKAGAAVTTETEVIWARALPAGTSAQRAELIALTQALKMAEGKKLNVYTDSRYAFATAHIHGEIYRRRGWLTSEGKEIKNKDEILALLKALFLPKRLSIIHCPGHQKGNSAEARGNRMADQAAREVATRETPETSTLLAGKRTADGSEFEKRTADGSEFESPKKKAKVE

SEQ ID NO: 2370 - protein, 2096 aa, synthetic construct
MPAAKRVKLDGGDKKYSIGLDIGTNSVGWAVITDEYKVPSKKFKVLGNTDRHSIKKNLIGALLFDSGETAEATRLKRTARRRYTRRKNRICYLQEIFSNEMAKVDDSFFHRLEESFLVEEDKKHERHPIFGNIVDEVAYHEKYPTIYHLRKKLVDSTDKADLRLIYLALAHMIKFRGHFLIEGDLNPDNSDVDKLFIQLVQTYNQLFEENPINASGVDAKAILSARLSKSRRLENLIAQLPGEKKNGLFGNLIALSLGLTPNFKSNFDLAEDAKLQLSKDTYDDDLDNLLAQIGDQYADLFLAAKNLSDAILLSDILRVNTEITKAPLSASMIKRYDEHHQDLTLLKALVRQQLPEKYKEIFFDQSKNGYAGYIDGGASQEEFYKFIKPILEKMDGTEELLVKLNREDLLRKQRTFDNGSIPHQIHLGELHAILRRQEDFYPFLKDNREKIEKILTFRIPYYVGPLARGNSRFAWMTRKSEETITPWNFEEVVDKGASAQSFIERMTNFDKNLPNEKVLPKHSLLYEYFTVYNELTKVKYVTEGMRKPAFLSGEQKKAIVDLLFKTNRKVTVKQLKEDYFKKIECFDSVEISGVEDRFNASLGTYHDLLKIIKDKDFLDNEENEDILEDIVLTLTLFEDREMIEERLKTYAHLFDDKVMKQLKRRRYTGWGRLSRKLINGIRDKQSGKTILDFLKSDGFANRNFMQLIHDDSLTFKEDIQKAQVSGQGDSLHEHIANLAGSPAIKKGILQTVKVVDELVKVMGRHKPENIVIEMARENQTTQKGQKNSRERMKRIEEGIKELGSQILKEHPVENTQLQNEKLYLYYLQNGRDMYVDQELDINRLSDYDVDHIVPQSFLKDDSIDNKVLTRSDKARGKSDNVPSEEVVKKMKNYWRQLLNAKLITQRKFDNLTKAERGGLSELDKAGFIKRQLVETRQITKHVAQILDSRMNTKYDENDKLIREVKVITLKSKLVSDFRKDFQFYKVREINNYHHAHDAYLNAVVGTALIKKYPKLESEFVYGDYKVYDVRKMIAKSEQEIGKATAKYFFYSNIMNFFKTEITLANGEIRKRPLIETNGETGEIVWDKGRDFATVRKVLSMPQVNIVKKTEVQTGGFSKESILPKRNSDKLIARKKDWDPKKYGGFDSPTVAYSVLVVAKVEKGKSKKLKSVKELLGITIMERSSFEKNPIDFLEAKGYKEVKKDLIIKLPKYSLFELENGRKRMLASAGELQKGNELALPSKYVNFLYLASHYEKLKGSPEDNEQKQLFVEQHKHYLDEIIEQISEFSKRVILADANLDKVLSAYNKHRDKPIREQAENIIHLFTLTNLGAPAAFKYFDTTIDRKRYTSTKEVLDATLIHQSITGLYETRIDLSQLGGDGGEAAAKGGSGSSGGTLNIEDEYRLHETSKEPDVSLGSTWLSDFPQAWAETGGMGLAVRQAPLIIPLKATSTPVSIKQYPMSQEARLGIKPHIQRLLDQGILVPCQSPWNTPLLPVKKPGTNDYRPVQDLREVNKRVEDIHPTVPNPYNLLSGLPPSHQWYTVLDLKDAFFCLRLHPTSQPLFAFEWRDPEMGISGQLTWTRLPQGFKNSPTLFNEALHRDLAGFRIQHPDLILLQYVDDLLLAATSELDCQQGTRALLQTLGDLGYRASAKKAQICQKQVKYLGYLLKEGQRWLTEARKETVMGQPIPKTPRQLREFLGKAGFCRLFIPGFAEMAAPLYPLTKPGTLFNWGPDQQKAFQEIKQALLTAPALGLPDLTKPFELFVDEKQGYAKGVLTQKLGPWRRPVAYLSKKLDPVAAGWPPCLRMVAAIAVLTKDAGKLTMGQPLVILAPHAVEALVKQPPDRWLSNARMTHYQALLLDTDRVQFGPVVALNPATLLPLPEEGLQHDCLDILAEAHGTRSDLMDQPLPDADHTWYTDGSSFLQEGQRKAGAAVTTETEVIWARALPAGTSAQRAELIALTQALKMAEGKKLNVYTDSRYAFATAHIHGEIYRRRGWLTSEGKEIKNKDEILALLKALFLPKRLSIIHCPGHQKGNSAEARGNRMADQAAREVATRETPETSTLLAGKRTADGSEFEKRTADGSEFESPKKKAKVE

SEQ ID NO: 2371 - protein, 2094 aa, synthetic construct
MPAAKRVKLDGGDKKYSIGLDIGTNSVGWAVITDEYKVPSKKFKVLGNTDRHSIKKNLIGALLFDSGETAEATRLKRTARRRYTRRKNRICYLQEIFSNEMAKVDDSFFHRLEESFLVEEDKKHERHPIFGNIVDEVAYHEKYPTIYHLRKKLVDSTDKADLRLIYLALAHMIKFRGHFLIEGDLNPDNSDVDKLFIQLVQTYNQLFEENPINASGVDAKAILSARLSKSRRLENLIAQLPGEKKNGLFGNLIALSLGLTPNFKSNFDLAEDAKLQLSKDTYDDDLDNLLAQIGDQYADLFLAAKNLSDAILLSDILRVNTEITKAPLSASMIKRYDEHHQDLTLLKALVRQQLPEKYKEIFFDQSKNGYAGYIDGGASQEEFYKFIKPILEKMDGTEELLVKLNREDLLRKQRTFDNGSIPHQIHLGELHAILRRQEDFYPFLKDNREKIEKILTFRIPYYVGPLARGNSRFAWMTRKSEETITPWNFEEVVDKGASAQSFIERMTNFDKNLPNEKVLPKHSLLYEYFTVYNELTKVKYVTEGMRKPAFLSGEQKKAIVDLLFKTNRKVTVKQLKEDYFKKIECFDSVEISGVEDRFNASLGTYHDLLKIIKDKDFLDNEENEDILEDIVLTLTLFEDREMIEERLKTYAHLFDDKVMKQLKRRRYTGWGRLSRKLINGIRDKQSGKTILDFLKSDGFANRNFMQLIHDDSLTFKEDIQKAQVSGQGDSLHEHIANLAGSPAIKKGILQTVKVVDELVKVMGRHKPENIVIEMARENQTTQKGQKNSRERMKRIEEGIKELGSQILKEHPVENTQLQNEKLYLYYLQNGRDMYVDQELDINRLSDYDVDHIVPQSFLKDDSIDNKVLTRSDKARGKSDNVPSEEVVKKMKNYWRQLLNAKLITQRKFDNLTKAERGGLSELDKAGFIKRQLVETRQITKHVAQILDSRMNTKYDENDKLIREVKVITLKSKLVSDFRKDFQFYKVREINNYHHAHDAYLNAVVGTALIKKYPKLESEFVYGDYKVYDVRKMIAKSEQEIGKATAKYFFYSNIMNFFKTEITLANGEIRKRPLIETNGETGEIVWDKGRDFATVRKVLSMPQVNIVKKTEVQTGGFSKESILPKRNSDKLIARKKDWDPKKYGGFDSPTVAYSVLVVAKVEKGKSKKLKSVKELLGITIMERSSFEKNPIDFLEAKGYKEVKKDLIIKLPKYSLFELENGRKRMLASAGELQKGNELALPSKYVNFLYLASHYEKLKGSPEDNEQKQLFVEQHKHYLDEIIEQISEFSKRVILADANLDKVLSAYNKHRDKPIREQAENIIHLFTLTNLGAPAAFKYFDTTIDRKRYTSTKEVLDATLIHQSITGLYETRIDLSQLGGDGGGGSGGGGSSGGTLNIEDEYRLHETSKEPDVSLGSTWLSDFPQAWAETGGMGLAVRQAPLIIPLKATSTPVSIKQYPMSQEARLGIKPHIQRLLDQGILVPCQSPWNTPLLPVKKPGTNDYRPVQDLREVNKRVEDIHPTVPNPYNLLSGLPPSHQWYTVLDLKDAFFCLRLHPTSQPLFAFEWRDPEMGISGQLTWTRLPQGFKNSPTLFNEALHRDLAGFRIQHPDLILLQYVDDLLLAATSELDCQQGTRALLQTLGDLGYRASAKKAQICQKQVKYLGYLLKEGQRWLTEARKETVMGQPIPKTPRQLREFLGKAGFCRLFIPGFAEMAAPLYPLTKPGTLFNWGPDQQKAFQEIKQALLTAPALGLPDLTKPFELFVDEKQGYAKGVLTQKLGPWRRPVAYLSKKLDPVAAGWPPCLRMVAAIAVLTKDAGKLTMGQPLVILAPHAVEALVKQPPDRWLSNARMTHYQALLLDTDRVQFGPVVALNPATLLPLPEEGLQHDCLDILAEAHGTRSDLMDQPLPDADHTWYTDGSSFLQEGQRKAGAAVTTETEVIWARALPAGTSAQRAELIALTQALKMAEGKKLNVYTDSRYAFATAHIHGEIYRRRGWLTSEGKEIKNKDEILALLKALFLPKRLSIIHCPGHQKGNSAEARGNRMADQAAREVATRETPETSTLLAGKRTADGSEFEKRTADGSEFESPKKKAKVE

SEQ ID NO: 2372 - protein, 2096 aa, synthetic construct
MPAAKRVKLDGGDKKYSIGLDIGTNSVGWAVITDEYKVPSKKFKVLGNTDRHSIKKNLIGALLFDSGETAEATRLKRTARRRYTRRKNRICYLQEIFSNEMAKVDDSFFHRLEESFLVEEDKKHERHPIFGNIVDEVAYHEKYPTIYHLRKKLVDSTDKADLRLIYLALAHMIKFRGHFLIEGDLNPDNSDVDKLFIQLVQTYNQLFEENPINASGVDAKAILSARLSKSRRLENLIAQLPGEKKNGLFGNLIALSLGLTPNFKSNFDLAEDAKLQLSKDTYDDDLDNLLAQIGDQYADLFLAAKNLSDAILLSDILRVNTEITKAPLSASMIKRYDEHHQDLTLLKALVRQQLPEKYKEIFFDQSKNGYAGYIDGGASQEEFYKFIKPILEKMDGTEELLVKLNREDLLRKQRTFDNGSIPHQIHLGELHAILRRQEDFYPFLKDNREKIEKILTFRIPYYVGPLARGNSRFAWMTRKSEETITPWNFEEVVDKGASAQSFIERMTNFDKNLPNEKVLPKHSLLYEYFTVYNELTKVKYVTEGMRKPAFLSGEQKKAIVDLLFKTNRKVTVKQLKEDYFKKIECFDSVEISGVEDRFNASLGTYHDLLKIIKDKDFLDNEENEDILEDIVLTLTLFEDREMIEERLKTYAHLFDDKVMKQLKRRRYTGWGRLSRKLINGIRDKQSGKTILDFLKSDGFANRNFMQLIHDDSLTFKEDIQKAQVSGQGDSLHEHIANLAGSPAIKKGILQTVKVVDELVKVMGRHKPENIVIEMARENQTTQKGQKNSRERMKRIEEGIKELGSQILKEHPVENTQLQNEKLYLYYLQNGRDMYVDQELDINRLSDYDVDHIVPQSFLKDDSIDNKVLTRSDKARGKSDNVPSEEVVKKMKNYWRQLLNAKLITQRKFDNLTKAERGGLSELDKAGFIKRQLVETRQITKHVAQILDSRMNTKYDENDKLIREVKVITLKSKLVSDFRKDFQFYKVREINNYHHAHDAYLNAVVGTALIKKYPKLESEFVYGDYKVYDVRKMIAKSEQEIGKATAKYFFYSNIMNFFKTEITLANGEIRKRPLIETNGETGEIVWDKGRDFATVRKVLSMPQVNIVKKTEVQTGGFSKESILPKRNSDKLIARKKDWDPKKYGGFDSPTVAYSVLVVAKVEKGKSKKLKSVKELLGITIMERSSFEKNPIDFLEAKGYKEVKKDLIIKLPKYSLFELENGRKRMLASAGELQKGNELALPSKYVNFLYLASHYEKLKGSPEDNEQKQLFVEQHKHYLDEIIEQISEFSKRVILADANLDKVLSAYNKHRDKPIREQAENIIHLFTLTNLGAPAAFKYFDTTIDRKRYTSTKEVLDATLIHQSITGLYETRIDLSQLGGDGGEAAAKGGSPAPGGTLNIEDEYRLHETSKEPDVSLGSTWLSDFPQAWAETGGMGLAVRQAPLIIPLKATSTPVSIKQYPMSQEARLGIKPHIQRLLDQGILVPCQSPWNTPLLPVKKPGTNDYRPVQDLREVNKRVEDIHPTVPNPYNLLSGLPPSHQWYTVLDLKDAFFCLRLHPTSQPLFAFEWRDPEMGISGQLTWTRLPQGFKNSPTLFNEALHRDLAGFRIQHPDLILLQYVDDLLLAATSELDCQQGTRALLQTLGDLGYRASAKKAQICQKQVKYLGYLLKEGQRWLTEARKETVMGQPIPKTPRQLREFLGKAGFCRLFIPGFAEMAAPLYPLTKPGTLFNWGPDQQKAFQEIKQALLTAPALGLPDLTKPFELFVDEKQGYAKGVLTQKLGPWRRPVAYLSKKLDPVAAGWPPCLRMVAAIAVLTKDAGKLTMGQPLVILAPHAVEALVKQPPDRWLSNARMTHYQALLLDTDRVQFGPVVALNPATLLPLPEEGLQHDCLDILAEAHGTRSDLMDQPLPDADHTWYTDGSSFLQEGQRKAGAAVTTETEVIWARALPAGTSAQRAELIALTQALKMAEGKKLNVYTDSRYAFATAHIHGEIYRRRGWLTSEGKEIKNKDEILALLKALFLPKRLSIIHCPGHQKGNSAEARGNRMADQAAREVATRETPETSTLLAGKRTADGSEFEKRTADGSEFESPKKKAKVE

SEQ ID NO: 2373 - protein, 2100 aa, synthetic construct
MPAAKRVKLDGGDKKYSIGLDIGTNSVGWAVITDEYKVPSKKFKVLGNTDRHSIKKNLIGALLFDSGETAEATRLKRTARRRYTRRKNRICYLQEIFSNEMAKVDDSFFHRLEESFLVEEDKKHERHPIFGNIVDEVAYHEKYPTIYHLRKKLVDSTDKADLRLIYLALAHMIKFRGHFLIEGDLNPDNSDVDKLFIQLVQTYNQLFEENPINASGVDAKAILSARLSKSRRLENLIAQLPGEKKNGLFGNLIALSLGLTPNFKSNFDLAEDAKLQLSKDTYDDDLDNLLAQIGDQYADLFLAAKNLSDAILLSDILRVNTEITKAPLSASMIKRYDEHHQDLTLLKALVRQQLPEKYKEIFFDQSKNGYAGYIDGGASQEEFYKFIKPILEKMDGTEELLVKLNREDLLRKQRTFDNGSIPHQIHLGELHAILRRQEDFYPFLKDNREKIEKILTFRIPYYVGPLARGNSRFAWMTRKSEETITPWNFEEVVDKGASAQSFIERMTNFDKNLPNEKVLPKHSLLYEYFTVYNELTKVKYVTEGMRKPAFLSGEQKKAIVDLLFKTNRKVTVKQLKEDYFKKIECFDSVEISGVEDRFNASLGTYHDLLKIIKDKDFLDNEENEDILEDIVLTLTLFEDREMIEERLKTYAHLFDDKVMKQLKRRRYTGWGRLSRKLINGIRDKQSGKTILDFLKSDGFANRNFMQLIHDDSLTFKEDIQKAQVSGQGDSLHEHIANLAGSPAIKKGILQTVKVVDELVKVMGRHKPENIVIEMARENQTTQKGQKNSRERMKRIEEGIKELGSQILKEHPVENTQLQNEKLYLYYLQNGRDMYVDQELDINRLSDYDVDHIVPQSFLKDDSIDNKVLTRSDKARGKSDNVPSEEVVKKMKNYWRQLLNAKLITQRKFDNLTKAERGGLSELDKAGFIKRQLVETRQITKHVAQILDSRMNTKYDENDKLIREVKVITLKSKLVSDFRKDFQFYKVREINNYHHAHDAYLNAVVGTALIKKYPKLESEFVYGDYKVYDVRKMIAKSEQEIGKATAKYFFYSNIMNFFKTEITLANGEIRKRPLIETNGETGEIVWDKGRDFATVRKVLSMPQVNIVKKTEVQTGGFSKESILPKRNSDKLIARKKDWDPKKYGGFDSPTVAYSVLVVAKVEKGKSKKLKSVKELLGITIMERSSFEKNPIDFLEAKGYKEVKKDLIIKLPKYSLFELENGRKRMLASAGELQKGNELALPSKYVNFLYLASHYEKLKGSPEDNEQKQLFVEQHKHYLDEIIEQISEFSKRVILADANLDKVLSAYNKHRDKPIREQAENIIHLFTLTNLGAPAAFKYFDTTIDRKRYTSTKEVLDATLIHQSITGLYETRIDLSQLGGDGGEAAAKEAAAKEAAAKGGTLNIEDEYRLHETSKEPDVSLGSTWLSDFPQAWAETGGMGLAVRQAPLIIPLKATSTPVSIKQYPMSQEARLGIKPHIQRLLDQGILVPCQSPWNTPLLPVKKPGTNDYRPVQDLREVNKRVEDIHPTVPNPYNLLSGLPPSHQWYTVLDLKDAFFCLRLHPTSQPLFAFEWRDPEMGISGQLTWTRLPQGFKNSPTLFNEALHRDLAGFRIQHPDLILLQYVDDLLLAATSELDCQQGTRALLQTLGDLGYRASAKKAQICQKQVKYLGYLLKEGQRWLTEARKETVMGQPIPKTPRQLREFLGKAGFCRLFIPGFAEMAAPLYPLTKPGTLFNWGPDQQKAFQEIKQALLTAPALGLPDLTKPFELFVDEKQGYAKGVLTQKLGPWRRPVAYLSKKLDPVAAGWPPCLRMVAAIAVLTKDAGKLTMGQPLVILAPHAVEALVKQPPDRWLSNARMTHYQALLLDTDRVQFGPVVALNPATLLPLPEEGLQHDCLDILAEAHGTRSDLMDQPLPDADHTWYTDGSSFLQEGQRKAGAAVTTETEVIWARALPAGTSAQRAELIALTQALKMAEGKKLNVYTDSRYAFATAHIHGEIYRRRGWLTSEGKEIKNKDEILALLKALFLPKRLSIIHCPGHQKGNSAEARGNRMADQAAREVATRETPETSTLLAGKRTADGSEFEKRTADGSEFESPKKKAKVE

SEQ ID NO: 2374 - protein, 2100 aa, synthetic construct
MPAAKRVKLDGGDKKYSIGLDIGTNSVGWAVITDEYKVPSKKFKVLGNTDRHSIKKNLIGALLFDSGETAEATRLKRTARRRYTRRKNRICYLQEIFSNEMAKVDDSFFHRLEESFLVEEDKKHERHPIFGNIVDEVAYHEKYPTIYHLRKKLVDSTDKADLRLIYLALAHMIKFRGHFLIEGDLNPDNSDVDKLFIQLVQTYNQLFEENPINASGVDAKAILSARLSKSRRLENLIAQLPGEKKNGLFGNLIALSLGLTPNFKSNFDLAEDAKLQLSKDTYDDDLDNLLAQIGDQYADLFLAAKNLSDAILLSDILRVNTEITKAPLSASMIKRYDEHHQDLTLLKALVRQQLPEKYKEIFFDQSKNGYAGYIDGGASQEEFYKFIKPILEKMDGTEELLVKLNREDLLRKQRTFDNGSIPHQIHLGELHAILRRQEDFYPFLKDNREKIEKILTFRIPYYVGPLARGNSRFAWMTRKSEETITPWNFEEVVDKGASAQSFIERMTNFDKNLPNEKVLPKHSLLYEYFTVYNELTKVKYVTEGMRKPAFLSGEQKKAIVDLLFKTNRKVTVKQLKEDYFKKIECFDSVEISGVEDRFNASLGTYHDLLKIIKDKDFLDNEENEDILEDIVLTLTLFEDREMIEERLKTYAHLFDDKVMKQLKRRRYTGWGRLSRKLINGIRDKQSGKTILDFLKSDGFANRNFMQLIHDDSLTFKEDIQKAQVSGQGDSLHEHIANLAGSPAIKKGILQTVKVVDELVKVMGRHKPENIVIEMARENQTTQKGQKNSRERMKRIEEGIKELGSQILKEHPVENTQLQNEKLYLYYLQNGRDMYVDQELDINRLSDYDVDHIVPQSFLKDDSIDNKVLTRSDKARGKSDNVPSEEVVKKMKNYWRQLLNAKLITQRKFDNLTKAERGGLSELDKAGFIKRQLVETRQITKHVAQILDSRMNTKYDENDKLIREVKVITLKSKLVSDFRKDFQFYKVREINNYHHAHDAYLNAVVGTALIKKYPKLESEFVYGDYKVYDVRKMIAKSEQEIGKATAKYFFYSNIMNFFKTEITLANGEIRKRPLIETNGETGEIVWDKGRDFATVRKVLSMPQVNIVKKTEVQTGGFSKESILPKRNSDKLIARKKDWDPKKYGGFDSPTVAYSVLVVAKVEKGKSKKLKSVKELLGITIMERSSFEKNPIDFLEAKGYKEVKKDLIIKLPKYSLFELENGRKRMLASAGELQKGNELALPSKYVNFLYLASHYEKLKGSPEDNEQKQLFVEQHKHYLDEIIEQISEFSKRVILADANLDKVLSAYNKHRDKPIREQAENIIHLFTLTNLGAPAAFKYFDTTIDRKRYTSTKEVLDATLIHQSITGLYETRIDLSQLGGDGGGGGGSEAAAKGGGGSGGTLNIEDEYRLHETSKEPDVSLGSTWLSDFPQAWAETGGMGLAVRQAPLIIPLKATSTPVSIKQYPMSQEARLGIKPHIQRLLDQGILVPCQSPWNTPLLPVKKPGTNDYRPVQDLREVNKRVEDIHPTVPNPYNLLSGLPPSHQWYTVLDLKDAFFCLRLHPTSQPLFAFEWRDPEMGISGQLTWTRLPQGFKNSPTLFNEALHRDLAGFRIQHPDLILLQYVDDLLLAATSELDCQQGTRALLQTLGDLGYRASAKKAQICQKQVKYLGYLLKEGQRWLTEARKETVMGQPIPKTPRQLREFLGKAGFCRLFIPGFAEMAAPLYPLTKPGTLFNWGPDQQKAFQEIKQALLTAPALGLPDLTKPFELFVDEKQGYAKGVLTQKLGPWRRPVAYLSKKLDPVAAGWPPCLRMVAAIAVLTKDAGKLTMGQPLVILAPHAVEALVKQPPDRWLSNARMTHYQALLLDTDRVQFGPVVALNPATLLPLPEEGLQHDCLDILAEAHGTRSDLMDQPLPDADHTWYTDGSSFLQEGQRKAGAAVTTETEVIWARALPAGTSAQRAELIALTQALKMAEGKKLNVYTDSRYAFATAHIHGEIYRRRGWLTSEGKEIKNKDEILALLKALFLPKRLSIIHCPGHQKGNSAEARGNRMADQAAREVATRETPETSTLLAGKRTADGSEFEKRTADGSEFESPKKKAKVE

SEQ ID NO: 2375 - protein, 2088 aa, synthetic construct
MPAAKRVKLDGGDKKYSIGLDIGTNSVGWAVITDEYKVPSKKFKVLGNTDRHSIKKNLIGALLFDSGETAEATRLKRTARRRYTRRKNRICYLQEIFSNEMAKVDDSFFHRLEESFLVEEDKKHERHPIFGNIVDEVAYHEKYPTIYHLRKKLVDSTDKADLRLIYLALAHMIKFRGHFLIEGDLNPDNSDVDKLFIQLVQTYNQLFEENPINASGVDAKAILSARLSKSRRLENLIAQLPGEKKNGLFGNLIALSLGLTPNFKSNFDLAEDAKLQLSKDTYDDDLDNLLAQIGDQYADLFLAAKNLSDAILLSDILRVNTEITKAPLSASMIKRYDEHHQDLTLLKALVRQQLPEKYKEIFFDQSKNGYAGYIDGGASQEEFYKFIKPILEKMDGTEELLVKLNREDLLRKQRTFDNGSIPHQIHLGELHAILRRQEDFYPFLKDNREKIEKILTFRIPYYVGPLARGNSRFAWMTRKSEETITPWNFEEVVDKGASAQSFIERMTNFDKNLPNEKVLPKHSLLYEYFTVYNELTKVKYVTEGMRKPAFLSGEQKKAIVDLLFKTNRKVTVKQLKEDYFKKIECFDSVEISGVEDRFNASLGTYHDLLKIIKDKDFLDNEENEDILEDIVLTLTLFEDREMIEERLKTYAHLFDDKVMKQLKRRRYTGWGRLSRKLINGIRDKQSGKTILDFLKSDGFANRNFMQLIHDDSLTFKEDIQKAQVSGQGDSLHEHIANLAGSPAIKKGILQTVKVVDELVKVMGRHKPENIVIEMARENQTTQKGQKNSRERMKRIEEGIKELGSQILKEHPVENTQLQNEKLYLYYLQNGRDMYVDQELDINRLSDYDVDHIVPQSFLKDDSIDNKVLTRSDKARGKSDNVPSEEVVKKMKNYWRQLLNAKLITQRKFDNLTKAERGGLSELDKAGFIKRQLVETRQITKHVAQILDSRMNTKYDENDKLIREVKVITLKSKLVSDFRKDFQFYKVREINNYHHAHDAYLNAVVGTALIKKYPKLESEFVYGDYKVYDVRKMIAKSEQEIGKATAKYFFYSNIMNFFKTEITLANGEIRKRPLIETNGETGEIVWDKGRDFATVRKVLSMPQVNIVKKTEVQTGGFSKESILPKRNSDKLIARKKDWDPKKYGGFDSPTVAYSVLVVAKVEKGKSKKLKSVKELLGITIMERSSFEKNPIDFLEAKGYKEVKKDLIIKLPKYSLFELENGRKRMLASAGELQKGNELALPSKYVNFLYLASHYEKLKGSPEDNEQKQLFVEQHKHYLDEIIEQISEFSKRVILADANLDKVLSAYNKHRDKPIREQAENIIHLFTLTNLGAPAAFKYFDTTIDRKRYTSTKEVLDATLIHQSITGLYETRIDLSQLGGDGGGGGGGTLNIEDEYRLHETSKEPDVSLGSTWLSDFPQAWAETGGMGLAVRQAPLIIPLKATSTPVSIKQYPMSQEARLGIKPHIQRLLDQGILVPCQSPWNTPLLPVKKPGTNDYRPVQDLREVNKRVEDIHPTVPNPYNLLSGLPPSHQWYTVLDLKDAFFCLRLHPTSQPLFAFEWRDPEMGISGQLTWTRLPQGFKNSPTLFNEALHRDLAGFRIQHPDLILLQYVDDLLLAATSELDCQQGTRALLQTLGDLGYRASAKKAQICQKQVKYLGYLLKEGQRWLTEARKETVMGQPIPKTPRQLREFLGKAGFCRLFIPGFAEMAAPLYPLTKPGTLFNWGPDQQKAFQEIKQALLTAPALGLPDLTKPFELFVDEKQGYAKGVLTQKLGPWRRPVAYLSKKLDPVAAGWPPCLRMVAAIAVLTKDAGKLTMGQPLVILAPHAVEALVKQPPDRWLSNARMTHYQALLLDTDRVQFGPVVALNPATLLPLPEEGLQHDCLDILAEAHGTRSDLMDQPLPDADHTWYTDGSSFLQEGQRKAGAAVTTETEVIWARALPAGTSAQRAELIALTQALKMAEGKKLNVYTDSRYAFATAHIHGEIYRRRGWLTSEGKEIKNKDEILALLKALFLPKRLSIIHCPGHQKGNSAEARGNRMADQAAREVATRETPETSTLLAGKRTADGSEFEKRTADGSEFESPKKKAKVE

SEQ ID NO: 2376 - protein, 2118 aa, synthetic construct
MPAAKRVKLDGGDKKYSIGLDIGTNSVGWAVITDEYKVPSKKFKVLGNTDRHSIKKNLIGALLFDSGETAEATRLKRTARRRYTRRKNRICYLQEIFSNEMAKVDDSFFHRLEESFLVEEDKKHERHPIFGNIVDEVAYHEKYPTIYHLRKKLVDSTDKADLRLIYLALAHMIKFRGHFLIEGDLNPDNSDVDKLFIQLVQTYNQLFEENPINASGVDAKAILSARLSKSRRLENLIAQLPGEKKNGLFGNLIALSLGLTPNFKSNFDLAEDAKLQLSKDTYDDDLDNLLAQIGDQYADLFLAAKNLSDAILLSDILRVNTEITKAPLSASMIKRYDEHHQDLTLLKALVRQQLPEKYKEIFFDQSKNGYAGYIDGGASQEEFYKFIKPILEKMDGTEELLVKLNREDLLRKQRTFDNGSIPHQIHLGELHAILRRQEDFYPFLKDNREKIEKILTFRIPYYVGPLARGNSRFAWMTRKSEETITPWNFEEVVDKGASAQSFIERMTNFDKNLPNEKVLPKHSLLYEYFTVYNELTKVKYVTEGMRKPAFLSGEQKKAIVDLLFKTNRKVTVKQLKEDYFKKIECFDSVEISGVEDRFNASLGTYHDLLKIIKDKDFLDNEENEDILEDIVLTLTLFEDREMIEERLKTYAHLFDDKVMKQLKRRRYTGWGRLSRKLINGIRDKQSGKTILDFLKSDGFANRNFMQLIHDDSLTFKEDIQKAQVSGQGDSLHEHIANLAGSPAIKKGILQTVKVVDELVKVMGRHKPENIVIEMARENQTTQKGQKNSRERMKRIEEGIKELGSQILKEHPVENTQLQNEKLYLYYLQNGRDMYVDQELDINRLSDYDVDHIVPQSFLKDDSIDNKVLTRSDKARGKSDNVPSEEVVKKMKNYWRQLLNAKLITQRKFDNLTKAERGGLSELDKAGFIKRQLVETRQITKHVAQILDSRMNTKYDENDKLIREVKVITLKSKLVSDFRKDFQFYKVREINNYHHAHDAYLNAVVGTALIKKYPKLESEFVYGDYKVYDVRKMIAKSEQEIGKATAKYFFYSNIMNFFKTEITLANGEIRKRPLIETNGETGEIVWDKGRDFATVRKVLSMPQVNIVKKTEVQTGGFSKESILPKRNSDKLIARKKDWDPKKYGGFDSPTVAYSVLVVAKVEKGKSKKLKSVKELLGITIMERSSFEKNPIDFLEAKGYKEVKKDLIIKLPKYSLFELENGRKRMLASAGELQKGNELALPSKYVNFLYLASHYEKLKGSPEDNEQKQLFVEQHKHYLDEIIEQISEFSKRVILADANLDKVLSAYNKHRDKPIREQAENIIHLFTLTNLGAPAAFKYFDTTIDRKRYTSTKEVLDATLIHQSITGLYETRIDLSQLGGDGGSGGSSGGSSGSETPGTSESATPESSGGSSGGSSGGTLNIEDEYRLHETSKEPDVSLGSTWLSDFPQAWAETGGMGLAVRQAPLIIPLKATSTPVSIKQYPMSQEARLGIKPHIQRLLDQGILVPCQSPWNTPLLPVKKPGTNDYRPVQDLREVNKRVEDIHPTVPNPYNLLSGLPPSHQWYTVLDLKDAFFCLRLHPTSQPLFAFEWRDPEMGISGQLTWTRLPQGFKNSPTLFNEALHRDLAGFRIQHPDLILLQYVDDLLLAATSELDCQQGTRALLQTLGDLGYRASAKKAQICQKQVKYLGYLLKEGQRWLTEARKETVMGQPIPKTPRQLREFLGKAGFCRLFIPGFAEMAAPLYPLTKPGTLFNWGPDQQKAFQEIKQALLTAPALGLPDLTKPFELFVDEKQGYAKGVLTQKLGPWRRPVAYLSKKLDPVAAGWPPCLRMVAAIAVLTKDAGKLTMGQPLVILAPHAVEALVKQPPDRWLSNARMTHYQALLLDTDRVQFGPVVALNPATLLPLPEEGLQHDCLDILAEAHGTRSDLMDQPLPDADHTWYTDGSSFLQEGQRKAGAAVTTETEVIWARALPAGTSAQRAELIALTQALKMAEGKKLNVYTDSRYAFATAHIHGEIYRRRGWLTSEGKEIKNKDEILALLKALFLPKRLSIIHCPGHQKGNSAEARGNRMADQAAREVATRETPETSTLLAGKRTADGSEFEKRTADGSEFESPKKKAKVE

SEQ ID NO: 2377 - protein, 2096 aa, synthetic construct
MPAAKRVKLDGGDKKYSIGLDIGTNSVGWAVITDEYKVPSKKFKVLGNTDRHSIKKNLIGALLFDSGETAEATRLKRTARRRYTRRKNRICYLQEIFSNEMAKVDDSFFHRLEESFLVEEDKKHERHPIFGNIVDEVAYHEKYPTIYHLRKKLVDSTDKADLRLIYLALAHMIKFRGHFLIEGDLNPDNSDVDKLFIQLVQTYNQLFEENPINASGVDAKAILSARLSKSRRLENLIAQLPGEKKNGLFGNLIALSLGLTPNFKSNFDLAEDAKLQLSKDTYDDDLDNLLAQIGDQYADLFLAAKNLSDAILLSDILRVNTEITKAPLSASMIKRYDEHHQDLTLLKALVRQQLPEKYKEIFFDQSKNGYAGYIDGGASQEEFYKFIKPILEKMDGTEELLVKLNREDLLRKQRTFDNGSIPHQIHLGELHAILRRQEDFYPFLKDNREKIEKILTFRIPYYVGPLARGNSRFAWMTRKSEETITPWNFEEVVDKGASAQSFIERMTNFDKNLPNEKVLPKHSLLYEYFTVYNELTKVKYVTEGMRKPAFLSGEQKKAIVDLLFKTNRKVTVKQLKEDYFKKIECFDSVEISGVEDRFNASLGTYHDLLKIIKDKDFLDNEENEDILEDIVLTLTLFEDREMIEERLKTYAHLFDDKVMKQLKRRRYTGWGRLSRKLINGIRDKQSGKTILDFLKSDGFANRNFMQLIHDDSLTFKEDIQKAQVSGQGDSLHEHIANLAGSPAIKKGILQTVKVVDELVKVMGRHKPENIVIEMARENQTTQKGQKNSRERMKRIEEGIKELGSQILKEHPVENTQLQNEKLYLYYLQNGRDMYVDQELDINRLSDYDVDHIVPQSFLKDDSIDNKVLTRSDKARGKSDNVPSEEVVKKMKNYWRQLLNAKLITQRKFDNLTKAERGGLSELDKAGFIKRQLVETRQITKHVAQILDSRMNTKYDENDKLIREVKVITLKSKLVSDFRKDFQFYKVREINNYHHAHDAYLNAVVGTALIKKYPKLESEFVYGDYKVYDVRKMIAKSEQEIGKATAKYFFYSNIMNFFKTEITLANGEIRKRPLIETNGETGEIVWDKGRDFATVRKVLSMPQVNIVKKTEVQTGGFSKESILPKRNSDKLIARKKDWDPKKYGGFDSPTVAYSVLVVAKVEKGKSKKLKSVKELLGITIMERSSFEKNPIDFLEAKGYKEVKKDLIIKLPKYSLFELENGRKRMLASAGELQKGNELALPSKYVNFLYLASHYEKLKGSPEDNEQKQLFVEQHKHYLDEIIEQISEFSKRVILADANLDKVLSAYNKHRDKPIREQAENIIHLFTLTNLGAPAAFKYFDTTIDRKRYTSTKEVLDATLIHQSITGLYETRIDLSQLGGDGGPAPGGGEAAAKGGTLNIEDEYRLHETSKEPDVSLGSTWLSDFPQAWAETGGMGLAVRQAPLIIPLKATSTPVSIKQYPMSQEARLGIKPHIQRLLDQGILVPCQSPWNTPLLPVKKPGTNDYRPVQDLREVNKRVEDIHPTVPNPYNLLSGLPPSHQWYTVLDLKDAFFCLRLHPTSQPLFAFEWRDPEMGISGQLTWTRLPQGFKNSPTLFNEALHRDLAGFRIQHPDLILLQYVDDLLLAATSELDCQQGTRALLQTLGDLGYRASAKKAQICQKQVKYLGYLLKEGQRWLTEARKETVMGQPIPKTPRQLREFLGKAGFCRLFIPGFAEMAAPLYPLTKPGTLFNWGPDQQKAFQEIKQALLTAPALGLPDLTKPFELFVDEKQGYAKGVLTQKLGPWRRPVAYLSKKLDPVAAGWPPCLRMVAAIAVLTKDAGKLTMGQPLVILAPHAVEALVKQPPDRWLSNARMTHYQALLLDTDRVQFGPVVALNPATLLPLPEEGLQHDCLDILAEAHGTRSDLMDQPLPDADHTWYTDGSSFLQEGQRKAGAAVTTETEVIWARALPAGTSAQRAELIALTQALKMAEGKKLNVYTDSRYAFATAHIHGEIYRRRGWLTSEGKEIKNKDEILALLKALFLPKRLSIIHCPGHQKGNSAEARGNRMADQAAREVATRETPETSTLLAGKRTADGSEFEKRTADGSEFESPKKKAKVE

SEQ ID NO: 2378 - protein, 2090 aa, synthetic construct
MPAAKRVKLDGGDKKYSIGLDIGTNSVGWAVITDEYKVPSKKFKVLGNTDRHSIKKNLIGALLFDSGETAEATRLKRTARRRYTRRKNRICYLQEIFSNEMAKVDDSFFHRLEESFLVEEDKKHERHPIFGNIVDEVAYHEKYPTIYHLRKKLVDSTDKADLRLIYLALAHMIKFRGHFLIEGDLNPDNSDVDKLFIQLVQTYNQLFEENPINASGVDAKAILSARLSKSRRLENLIAQLPGEKKNGLFGNLIALSLGLTPNFKSNFDLAEDAKLQLSKDTYDDDLDNLLAQIGDQYADLFLAAKNLSDAILLSDILRVNTEITKAPLSASMIKRYDEHHQDLTLLKALVRQQLPEKYKEIFFDQSKNGYAGYIDGGASQEEFYKFIKPILEKMDGTEELLVKLNREDLLRKQRTFDNGSIPHQIHLGELHAILRRQEDFYPFLKDNREKIEKILTFRIPYYVGPLARGNSRFAWMTRKSEETITPWNFEEVVDKGASAQSFIERMTNFDKNLPNEKVLPKHSLLYEYFTVYNELTKVKYVTEGMRKPAFLSGEQKKAIVDLLFKTNRKVTVKQLKEDYFKKIECFDSVEISGVEDRFNASLGTYHDLLKIIKDKDFLDNEENEDILEDIVLTLTLFEDREMIEERLKTYAHLFDDKVMKQLKRRRYTGWGRLSRKLINGIRDKQSGKTILDFLKSDGFANRNFMQLIHDDSLTFKEDIQKAQVSGQGDSLHEHIANLAGSPAIKKGILQTVKVVDELVKVMGRHKPENIVIEMARENQTTQKGQKNSRERMKRIEEGIKELGSQILKEHPVENTQLQNEKLYLYYLQNGRDMYVDQELDINRLSDYDVDHIVPQSFLKDDSIDNKVLTRSDKARGKSDNVPSEEVVKKMKNYWRQLLNAKLITQRKFDNLTKAERGGLSELDKAGFIKRQLVETRQITKHVAQILDSRMNTKYDENDKLIREVKVITLKSKLVSDFRKDFQFYKVREINNYHHAHDAYLNAVVGTALIKKYPKLESEFVYGDYKVYDVRKMIAKSEQEIGKATAKYFFYSNIMNFFKTEITLANGEIRKRPLIETNGETGEIVWDKGRDFATVRKVLSMPQVNIVKKTEVQTGGFSKESILPKRNSDKLIARKKDWDPKKYGGFDSPTVAYSVLVVAKVEKGKSKKLKSVKELLGITIMERSSFEKNPIDFLEAKGYKEVKKDLIIKLPKYSLFELENGRKRMLASAGELQKGNELALPSKYVNFLYLASHYEKLKGSPEDNEQKQLFVEQHKHYLDEIIEQISEFSKRVILADANLDKVLSAYNKHRDKPIREQAENIIHLFTLTNLGAPAAFKYFDTTIDRKRYTSTKEVLDATLIHQSITGLYETRIDLSQLGGDGGGGGGGGGTLNIEDEYRLHETSKEPDVSLGSTWLSDFPQAWAETGGMGLAVRQAPLIIPLKATSTPVSIKQYPMSQEARLGIKPHIQRLLDQGILVPCQSPWNTPLLPVKKPGTNDYRPVQDLREVNKRVEDIHPTVPNPYNLLSGLPPSHQWYTVLDLKDAFFCLRLHPTSQPLFAFEWRDPEMGISGQLTWTRLPQGFKNSPTLFNEALHRDLAGFRIQHPDLILLQYVDDLLLAATSELDCQQGTRALLQTLGDLGYRASAKKAQICQKQVKYLGYLLKEGQRWLTEARKETVMGQPIPKTPRQLREFLGKAGFCRLFIPGFAEMAAPLYPLTKPGTLFNWGPDQQKAFQEIKQALLTAPALGLPDLTKPFELFVDEKQGYAKGVLTQKLGPWRRPVAYLSKKLDPVAAGWPPCLRMVAAIAVLTKDAGKLTMGQPLVILAPHAVEALVKQPPDRWLSNARMTHYQALLLDTDRVQFGPVVALNPATLLPLPEEGLQHDCLDILAEAHGTRSDLMDQPLPDADHTWYTDGSSFLQEGQRKAGAAVTTETEVIWARALPAGTSAQRAELIALTQALKMAEGKKLNVYTDSRYAFATAHIHGEIYRRRGWLTSEGKEIKNKDEILALLKALFLPKRLSIIHCPGHQKGNSAEARGNRMADQAAREVATRETPETSTLLAGKRTADGSEFEKRTADGSEFESPKKKAKVE

SEQ ID NO: 2379 - protein, 2094 aa, synthetic construct
MPAAKRVKLDGGDKKYSIGLDIGTNSVGWAVITDEYKVPSKKFKVLGNTDRHSIKKNLIGALLFDSGETAEATRLKRTARRRYTRRKNRICYLQEIFSNEMAKVDDSFFHRLEESFLVEEDKKHERHPIFGNIVDEVAYHEKYPTIYHLRKKLVDSTDKADLRLIYLALAHMIKFRGHFLIEGDLNPDNSDVDKLFIQLVQTYNQLFEENPINASGVDAKAILSARLSKSRRLENLIAQLPGEKKNGLFGNLIALSLGLTPNFKSNFDLAEDAKLQLSKDTYDDDLDNLLAQIGDQYADLFLAAKNLSDAILLSDILRVNTEITKAPLSASMIKRYDEHHQDLTLLKALVRQQLPEKYKEIFFDQSKNGYAGYIDGGASQEEFYKFIKPILEKMDGTEELLVKLNREDLLRKQRTFDNGSIPHQIHLGELHAILRRQEDFYPFLKDNREKIEKILTFRIPYYVGPLARGNSRFAWMTRKSEETITPWNFEEVVDKGASAQSFIERMTNFDKNLPNEKVLPKHSLLYEYFTVYNELTKVKYVTEGMRKPAFLSGEQKKAIVDLLFKTNRKVTVKQLKEDYFKKIECFDSVEISGVEDRFNASLGTYHDLLKIIKDKDFLDNEENEDILEDIVLTLTLFEDREMIEERLKTYAHLFDDKVMKQLKRRRYTGWGRLSRKLINGIRDKQSGKTILDFLKSDGFANRNFMQLIHDDSLTFKEDIQKAQVSGQGDSLHEHIANLAGSPAIKKGILQTVKVVDELVKVMGRHKPENIVIEMARENQTTQKGQKNSRERMKRIEEGIKELGSQILKEHPVENTQLQNEKLYLYYLQNGRDMYVDQELDINRLSDYDVDHIVPQSFLKDDSIDNKVLTRSDKARGKSDNVPSEEVVKKMKNYWRQLLNAKLITQRKFDNLTKAERGGLSELDKAGFIKRQLVETRQITKHVAQILDSRMNTKYDENDKLIREVKVITLKSKLVSDFRKDFQFYKVREINNYHHAHDAYLNAVVGTALIKKYPKLESEFVYGDYKVYDVRKMIAKSEQEIGKATAKYFFYSNIMNFFKTEITLANGEIRKRPLIETNGETGEIVWDKGRDFATVRKVLSMPQVNIVKKTEVQTGGFSKESILPKRNSDKLIARKKDWDPKKYGGFDSPTVAYSVLVVAKVEKGKSKKLKSVKELLGITIMERSSFEKNPIDFLEAKGYKEVKKDLIIKLPKYSLFELENGRKRMLASAGELQKGNELALPSKYVNFLYLASHYEKLKGSPEDNEQKQLFVEQHKHYLDEIIEQISEFSKRVILADANLDKVLSAYNKHRDKPIREQAENIIHLFTLTNLGAPAAFKYFDTTIDRKRYTSTKEVLDATLIHQSITGLYETRIDLSQLGGDGGGSSGGSGGGGGTLNIEDEYRLHETSKEPDVSLGSTWLSDFPQAWAETGGMGLAVRQAPLIIPLKATSTPVSIKQYPMSQEARLGIKPHIQRLLDQGILVPCQSPWNTPLLPVKKPGTNDYRPVQDLREVNKRVEDIHPTVPNPYNLLSGLPPSHQWYTVLDLKDAFFCLRLHPTSQPLFAFEWRDPEMGISGQLTWTRLPQGFKNSPTLFNEALHRDLAGFRIQHPDLILLQYVDDLLLAATSELDCQQGTRALLQTLGDLGYRASAKKAQICQKQVKYLGYLLKEGQRWLTEARKETVMGQPIPKTPRQLREFLGKAGFCRLFIPGFAEMAAPLYPLTKPGTLFNWGPDQQKAFQEIKQALLTAPALGLPDLTKPFELFVDEKQGYAKGVLTQKLGPWRRPVAYLSKKLDPVAAGWPPCLRMVAAIAVLTKDAGKLTMGQPLVILAPHAVEALVKQPPDRWLSNARMTHYQALLLDTDRVQFGPVVALNPATLLPLPEEGLQHDCLDILAEAHGTRSDLMDQPLPDADHTWYTDGSSFLQEGQRKAGAAVTTETEVIWARALPAGTSAQRAELIALTQALKMAEGKKLNVYTDSRYAFATAHIHGEIYRRRGWLTSEGKEIKNKDEILALLKALFLPKRLSIIHCPGHQKGNSAEARGNRMADQAAREVATRETPETSTLLAGKRTADGSEFEKRTADGSEFESPKKKAKVE

SEQ ID NO: 2380 - protein, 2094 aa, synthetic construct
MPAAKRVKLDGGDKKYSIGLDIGTNSVGWAVITDEYKVPSKKFKVLGNTDRHSIKKNLIGALLFDSGETAEATRLKRTARRRYTRRKNRICYLQEIFSNEMAKVDDSFFHRLEESFLVEEDKKHERHPIFGNIVDEVAYHEKYPTIYHLRKKLVDSTDKADLRLIYLALAHMIKFRGHFLIEGDLNPDNSDVDKLFIQLVQTYNQLFEENPINASGVDAKAILSARLSKSRRLENLIAQLPGEKKNGLFGNLIALSLGLTPNFKSNFDLAEDAKLQLSKDTYDDDLDNLLAQIGDQYADLFLAAKNLSDAILLSDILRVNTEITKAPLSASMIKRYDEHHQDLTLLKALVRQQLPEKYKEIFFDQSKNGYAGYIDGGASQEEFYKFIKPILEKMDGTEELLVKLNREDLLRKQRTFDNGSIPHQIHLGELHAILRRQEDFYPFLKDNREKIEKILTFRIPYYVGPLARGNSRFAWMTRKSEETITPWNFEEVVDKGASAQSFIERMTNFDKNLPNEKVLPKHSLLYEYFTVYNELTKVKYVTEGMRKPAFLSGEQKKAIVDLLFKTNRKVTVKQLKEDYFKKIECFDSVEISGVEDRFNASLGTYHDLLKIIKDKDFLDNEENEDILEDIVLTLTLFEDREMIEERLKTYAHLFDDKVMKQLKRRRYTGWGRLSRKLINGIRDKQSGKTILDFLKSDGFANRNFMQLIHDDSLTFKEDIQKAQVSGQGDSLHEHIANLAGSPAIKKGILQTVKVVDELVKVMGRHKPENIVIEMARENQTTQKGQKNSRERMKRIEEGIKELGSQILKEHPVENTQLQNEKLYLYYLQNGRDMYVDQELDINRLSDYDVDHIVPQSFLKDDSIDNKVLTRSDKARGKSDNVPSEEVVKKMKNYWRQLLNAKLITQRKFDNLTKAERGGLSELDKAGFIKRQLVETRQITKHVAQILDSRMNTKYDENDKLIREVKVITLKSKLVSDFRKDFQFYKVREINNYHHAHDAYLNAVVGTALIKKYPKLESEFVYGDYKVYDVRKMIAKSEQEIGKATAKYFFYSNIMNFFKTEITLANGEIRKRPLIETNGETGEIVWDKGRDFATVRKVLSMPQVNIVKKTEVQTGGFSKESILPKRNSDKLIARKKDWDPKKYGGFDSPTVAYSVLVVAKVEKGKSKKLKSVKELLGITIMERSSFEKNPIDFLEAKGYKEVKKDLIIKLPKYSLFELENGRKRMLASAGELQKGNELALPSKYVNFLYLASHYEKLKGSPEDNEQKQLFVEQHKHYLDEIIEQISEFSKRVILADANLDKVLSAYNKHRDKPIREQAENIIHLFTLTNLGAPAAFKYFDTTIDRKRYTSTKEVLDATLIHQSITGLYETRIDLSQLGGDGGPAPGSSGGSGGTLNIEDEYRLHETSKEPDVSLGSTWLSDFPQAWAETGGMGLAVRQAPLIIPLKATSTPVSIKQYPMSQEARLGIKPHIQRLLDQGILVPCQSPWNTPLLPVKKPGTNDYRPVQDLREVNKRVEDIHPTVPNPYNLLSGLPPSHQWYTVLDLKDAFFCLRLHPTSQPLFAFEWRDPEMGISGQLTWTRLPQGFKNSPTLFNEALHRDLAGFRIQHPDLILLQYVDDLLLAATSELDCQQGTRALLQTLGDLGYRASAKKAQICQKQVKYLGYLLKEGQRWLTEARKETVMGQPIPKTPRQLREFLGKAGFCRLFIPGFAEMAAPLYPLTKPGTLFNWGPDQQKAFQEIKQALLTAPALGLPDLTKPFELFVDEKQGYAKGVLTQKLGPWRRPVAYLSKKLDPVAAGWPPCLRMVAAIAVLTKDAGKLTMGQPLVILAPHAVEALVKQPPDRWLSNARMTHYQALLLDTDRVQFGPVVALNPATLLPLPEEGLQHDCLDILAEAHGTRSDLMDQPLPDADHTWYTDGSSFLQEGQRKAGAAVTTETEVIWARALPAGTSAQRAELIALTQALKMAEGKKLNVYTDSRYAFATAHIHGEIYRRRGWLTSEGKEIKNKDEILALLKALFLPKRLSIIHCPGHQKGNSAEARGNRMADQAAREVATRETPETSTLLAGKRTADGSEFEKRTADGSEFESPKKKAKVE

SEQ ID NO: 2381 - protein, 2090 aa, synthetic construct
MPAAKRVKLDGGDKKYSIGLDIGTNSVGWAVITDEYKVPSKKFKVLGNTDRHSIKKNLIGALLFDSGETAEATRLKRTARRRYTRRKNRICYLQEIFSNEMAKVDDSFFHRLEESFLVEEDKKHERHPIFGNIVDEVAYHEKYPTIYHLRKKLVDSTDKADLRLIYLALAHMIKFRGHFLIEGDLNPDNSDVDKLFIQLVQTYNQLFEENPINASGVDAKAILSARLSKSRRLENLIAQLPGEKKNGLFGNLIALSLGLTPNFKSNFDLAEDAKLQLSKDTYDDDLDNLLAQIGDQYADLFLAAKNLSDAILLSDILRVNTEITKAPLSASMIKRYDEHHQDLTLLKALVRQQLPEKYKEIFFDQSKNGYAGYIDGGASQEEFYKFIKPILEKMDGTEELLVKLNREDLLRKQRTFDNGSIPHQIHLGELHAILRRQEDFYPFLKDNREKIEKILTFRIPYYVGPLARGNSRFAWMTRKSEETITPWNFEEVVDKGASAQSFIERMTNFDKNLPNEKVLPKHSLLYEYFTVYNELTKVKYVTEGMRKPAFLSGEQKKAIVDLLFKTNRKVTVKQLKEDYFKKIECFDSVEISGVEDRFNASLGTYHDLLKIIKDKDFLDNEENEDILEDIVLTLTLFEDREMIEERLKTYAHLFDDKVMKQLKRRRYTGWGRLSRKLINGIRDKQSGKTILDFLKSDGFANRNFMQLIHDDSLTFKEDIQKAQVSGQGDSLHEHIANLAGSPAIKKGILQTVKVVDELVKVMGRHKPENIVIEMARENQTTQKGQKNSRERMKRIEEGIKELGSQILKEHPVENTQLQNEKLYLYYLQNGRDMYVDQELDINRLSDYDVDHIVPQSFLKDDSIDNKVLTRSDKARGKSDNVPSEEVVKKMKNYWRQLLNAKLITQRKFDNLTKAERGGLSELDKAGFIKRQLVETRQITKHVAQILDSRMNTKYDENDKLIREVKVITLKSKLVSDFRKDFQFYKVREINNYHHAHDAYLNAVVGTALIKKYPKLESEFVYGDYKVYDVRKMIAKSEQEIGKATAKYFFYSNIMNFFKTEITLANGEIRKRPLIETNGETGEIVWDKGRDFATVRKVLSMPQVNIVKKTEVQTGGFSKESILPKRNSDKLIARKKDWDPKKYGGFDSPTVAYSVLVVAKVEKGKSKKLKSVKELLGITIMERSSFEKNPIDFLEAKGYKEVKKDLIIKLPKYSLFELENGRKRMLASAGELQKGNELALPSKYVNFLYLASHYEKLKGSPEDNEQKQLFVEQHKHYLDEIIEQISEFSKRVILADANLDKVLSAYNKHRDKPIREQAENIIHLFTLTNLGAPAAFKYFDTTIDRKRYTSTKEVLDATLIHQSITGLYETRIDLSQLGGDGGGGGGSGGTLNIEDEYRLHETSKEPDVSLGSTWLSDFPQAWAETGGMGLAVRQAPLIIPLKATSTPVSIKQYPMSQEARLGIKPHIQRLLDQGILVPCQSPWNTPLLPVKKPGTNDYRPVQDLREVNKRVEDIHPTVPNPYNLLSGLPPSHQWYTVLDLKDAFFCLRLHPTSQPLFAFEWRDPEMGISGQLTWTRLPQGFKNSPTLFNEALHRDLAGFRIQHPDLILLQYVDDLLLAATSELDCQQGTRALLQTLGDLGYRASAKKAQICQKQVKYLGYLLKEGQRWLTEARKETVMGQPIPKTPRQLREFLGKAGFCRLFIPGFAEMAAPLYPLTKPGTLFNWGPDQQKAFQEIKQALLTAPALGLPDLTKPFELFVDEKQGYAKGVLTQKLGPWRRPVAYLSKKLDPVAAGWPPCLRMVAAIAVLTKDAGKLTMGQPLVILAPHAVEALVKQPPDRWLSNARMTHYQALLLDTDRVQFGPVVALNPATLLPLPEEGLQHDCLDILAEAHGTRSDLMDQPLPDADHTWYTDGSSFLQEGQRKAGAAVTTETEVIWARALPAGTSAQRAELIALTQALKMAEGKKLNVYTDSRYAFATAHIHGEIYRRRGWLTSEGKEIKNKDEILALLKALFLPKRLSIIHCPGHQKGNSAEARGNRMADQAAREVATRETPETSTLLAGKRTADGSEFEKRTADGSEFESPKKKAKVE

SEQ ID NO: 2382 - protein, 2093 aa, synthetic construct
MPAAKRVKLDGGDKKYSIGLDIGTNSVGWAVITDEYKVPSKKFKVLGNTDRHSIKKNLIGALLFDSGETAEATRLKRTARRRYTRRKNRICYLQEIFSNEMAKVDDSFFHRLEESFLVEEDKKHERHPIFGNIVDEVAYHEKYPTIYHLRKKLVDSTDKADLRLIYLALAHMIKFRGHFLIEGDLNPDNSDVDKLFIQLVQTYNQLFEENPINASGVDAKAILSARLSKSRRLENLIAQLPGEKKNGLFGNLIALSLGLTPNFKSNFDLAEDAKLQLSKDTYDDDLDNLLAQIGDQYADLFLAAKNLSDAILLSDILRVNTEITKAPLSASMIKRYDEHHQDLTLLKALVRQQLPEKYKEIFFDQSKNGYAGYIDGGASQEEFYKFIKPILEKMDGTEELLVKLNREDLLRKQRTFDNGSIPHQIHLGELHAILRRQEDFYPFLKDNREKIEKILTFRIPYYVGPLARGNSRFAWMTRKSEETITPWNFEEVVDKGASAQSFIERMTNFDKNLPNEKVLPKHSLLYEYFTVYNELTKVKYVTEGMRKPAFLSGEQKKAIVDLLFKTNRKVTVKQLKEDYFKKIECFDSVEISGVEDRFNASLGTYHDLLKIIKDKDFLDNEENEDILEDIVLTLTLFEDREMIEERLKTYAHLFDDKVMKQLKRRRYTGWGRLSRKLINGIRDKQSGKTILDFLKSDGFANRNFMQLIHDDSLTFKEDIQKAQVSGQGDSLHEHIANLAGSPAIKKGILQTVKVVDELVKVMGRHKPENIVIEMARENQTTQKGQKNSRERMKRIEEGIKELGSQILKEHPVENTQLQNEKLYLYYLQNGRDMYVDQELDINRLSDYDVDHIVPQSFLKDDSIDNKVLTRSDKARGKSDNVPSEEVVKKMKNYWRQLLNAKLITQRKFDNLTKAERGGLSELDKAGFIKRQLVETRQITKHVAQILDSRMNTKYDENDKLIREVKVITLKSKLVSDFRKDFQFYKVREINNYHHAHDAYLNAVVGTALIKKYPKLESEFVYGDYKVYDVRKMIAKSEQEIGKATAKYFFYSNIMNFFKTEITLANGEIRKRPLIETNGETGEIVWDKGRDFATVRKVLSMPQVNIVKKTEVQTGGFSKESILPKRNSDKLIARKKDWDPKKYGGFDSPTVAYSVLVVAKVEKGKSKKLKSVKELLGITIMERSSFEKNPIDFLEAKGYKEVKKDLIIKLPKYSLFELENGRKRMLASAGELQKGNELALPSKYVNFLYLASHYEKLKGSPEDNEQKQLFVEQHKHYLDEIIEQISEFSKRVILADANLDKVLSAYNKHRDKPIREQAENIIHLFTLTNLGAPAAFKYFDTTIDRKRYTSTKEVLDATLIHQSITGLYETRIDLSQLGGDGGGSSEAAAKGGTLNIEDEYRLHETSKEPDVSLGSTWLSDFPQAWAETGGMGLAVRQAPLIIPLKATSTPVSIKQYPMSQEARLGIKPHIQRLLDQGILVPCQSPWNTPLLPVKKPGTNDYRPVQDLREVNKRVEDIHPTVPNPYNLLSGLPPSHQWYTVLDLKDAFFCLRLHPTSQPLFAFEWRDPEMGISGQLTWTRLPQGFKNSPTLFNEALHRDLAGFRIQHPDLILLQYVDDLLLAATSELDCQQGTRALLQTLGDLGYRASAKKAQICQKQVKYLGYLLKEGQRWLTEARKETVMGQPIPKTPRQLREFLGKAGFCRLFIPGFAEMAAPLYPLTKPGTLFNWGPDQQKAFQEIKQALLTAPALGLPDLTKPFELFVDEKQGYAKGVLTQKLGPWRRPVAYLSKKLDPVAAGWPPCLRMVAAIAVLTKDAGKLTMGQPLVILAPHAVEALVKQPPDRWLSNARMTHYQALLLDTDRVQFGPVVALNPATLLPLPEEGLQHDCLDILAEAHGTRSDLMDQPLPDADHTWYTDGSSFLQEGQRKAGAAVTTETEVIWARALPAGTSAQRAELIALTQALKMAEGKKLNVYTDSRYAFATAHIHGEIYRRRGWLTSEGKEIKNKDEILALLKALFLPKRLSIIHCPGHQKGNSAEARGNRMADQAAREVATRETPETSTLLAGKRTADGSEFEKRTADGSEFESPKKKAKVE

SEQ ID NO: 2383 - protein, 2091 aa, synthetic construct
MPAAKRVKLDGGDKKYSIGLDIGTNSVGWAVITDEYKVPSKKFKVLGNTDRHSIKKNLIGALLFDSGETAEATRLKRTARRRYTRRKNRICYLQEIFSNEMAKVDDSFFHRLEESFLVEEDKKHERHPIFGNIVDEVAYHEKYPTIYHLRKKLVDSTDKADLRLIYLALAHMIKFRGHFLIEGDLNPDNSDVDKLFIQLVQTYNQLFEENPINASGVDAKAILSARLSKSRRLENLIAQLPGEKKNGLFGNLIALSLGLTPNFKSNFDLAEDAKLQLSKDTYDDDLDNLLAQIGDQYADLFLAAKNLSDAILLSDILRVNTEITKAPLSASMIKRYDEHHQDLTLLKALVRQQLPEKYKEIFFDQSKNGYAGYIDGGASQEEFYKFIKPILEKMDGTEELLVKLNREDLLRKQRTFDNGSIPHQIHLGELHAILRRQEDFYPFLKDNREKIEKILTFRIPYYVGPLARGNSRFAWMTRKSEETITPWNFEEVVDKGASAQSFIERMTNFDKNLPNEKVLPKHSLLYEYFTVYNELTKVKYVTEGMRKPAFLSGEQKKAIVDLLFKTNRKVTVKQLKEDYFKKIECFDSVEISGVEDRFNASLGTYHDLLKIIKDKDFLDNEENEDILEDIVLTLTLFEDREMIEERLKTYAHLFDDKVMKQLKRRRYTGWGRLSRKLINGIRDKQSGKTILDFLKSDGFANRNFMQLIHDDSLTFKEDIQKAQVSGQGDSLHEHIANLAGSPAIKKGILQTVKVVDELVKVMGRHKPENIVIEMARENQTTQKGQKNSRERMKRIEEGIKELGSQILKEHPVENTQLQNEKLYLYYLQNGRDMYVDQELDINRLSDYDVDHIVPQSFLKDDSIDNKVLTRSDKARGKSDNVPSEEVVKKMKNYWRQLLNAKLITQRKFDNLTKAERGGLSELDKAGFIKRQLVETRQITKHVAQILDSRMNTKYDENDKLIREVKVITLKSKLVSDFRKDFQFYKVREINNYHHAHDAYLNAVVGTALIKKYPKLESEFVYGDYKVYDVRKMIAKSEQEIGKATAKYFFYSNIMNFFKTEITLANGEIRKRPLIETNGETGEIVWDKGRDFATVRKVLSMPQVNIVKKTEVQTGGFSKESILPKRNSDKLIARKKDWDPKKYGGFDSPTVAYSVLVVAKVEKGKSKKLKSVKELLGITIMERSSFEKNPIDFLEAKGYKEVKKDLIIKLPKYSLFELENGRKRMLASAGELQKGNELALPSKYVNFLYLASHYEKLKGSPEDNEQKQLFVEQHKHYLDEIIEQISEFSKRVILADANLDKVLSAYNKHRDKPIREQAENIIHLFTLTNLGAPAAFKYFDTTIDRKRYTSTKEVLDATLIHQSITGLYETRIDLSQLGGDGGGGGGSSGGTLNIEDEYRLHETSKEPDVSLGSTWLSDFPQAWAETGGMGLAVRQAPLIIPLKATSTPVSIKQYPMSQEARLGIKPHIQRLLDQGILVPCQSPWNTPLLPVKKPGTNDYRPVQDLREVNKRVEDIHPTVPNPYNLLSGLPPSHQWYTVLDLKDAFFCLRLHPTSQPLFAFEWRDPEMGISGQLTWTRLPQGFKNSPTLFNEALHRDLAGFRIQHPDLILLQYVDDLLLAATSELDCQQGTRALLQTLGDLGYRASAKKAQICQKQVKYLGYLLKEGQRWLTEARKETVMGQPIPKTPRQLREFLGKAGFCRLFIPGFAEMAAPLYPLTKPGTLFNWGPDQQKAFQEIKQALLTAPALGLPDLTKPFELFVDEKQGYAKGVLTQKLGPWRRPVAYLSKKLDPVAAGWPPCLRMVAAIAVLTKDAGKLTMGQPLVILAPHAVEALVKQPPDRWLSNARMTHYQALLLDTDRVQFGPVVALNPATLLPLPEEGLQHDCLDILAEAHGTRSDLMDQPLPDADHTWYTDGSSFLQEGQRKAGAAVTTETEVIWARALPAGTSAQRAELIALTQALKMAEGKKLNVYTDSRYAFATAHIHGEIYRRRGWLTSEGKEIKNKDEILALLKALFLPKRLSIIHCPGHQKGNSAEARGNRMADQAAREVATRETPETSTLLAGKRTADGSEFEKRTADGSEFESPKKKAKVE

SEQ ID NO: 2384 - protein, 2096 aa, synthetic construct
MPAAKRVKLDGGDKKYSIGLDIGTNSVGWAVITDEYKVPSKKFKVLGNTDRHSIKKNLIGALLFDSGETAEATRLKRTARRRYTRRKNRICYLQEIFSNEMAKVDDSFFHRLEESFLVEEDKKHERHPIFGNIVDEVAYHEKYPTIYHLRKKLVDSTDKADLRLIYLALAHMIKFRGHFLIEGDLNPDNSDVDKLFIQLVQTYNQLFEENPINASGVDAKAILSARLSKSRRLENLIAQLPGEKKNGLFGNLIALSLGLTPNFKSNFDLAEDAKLQLSKDTYDDDLDNLLAQIGDQYADLFLAAKNLSDAILLSDILRVNTEITKAPLSASMIKRYDEHHQDLTLLKALVRQQLPEKYKEIFFDQSKNGYAGYIDGGASQEEFYKFIKPILEKMDGTEELLVKLNREDLLRKQRTFDNGSIPHQIHLGELHAILRRQEDFYPFLKDNREKIEKILTFRIPYYVGPLARGNSRFAWMTRKSEETITPWNFEEVVDKGASAQSFIERMTNFDKNLPNEKVLPKHSLLYEYFTVYNELTKVKYVTEGMRKPAFLSGEQKKAIVDLLFKTNRKVTVKQLKEDYFKKIECFDSVEISGVEDRFNASLGTYHDLLKIIKDKDFLDNEENEDILEDIVLTLTLFEDREMIEERLKTYAHLFDDKVMKQLKRRRYTGWGRLSRKLINGIRDKQSGKTILDFLKSDGFANRNFMQLIHDDSLTFKEDIQKAQVSGQGDSLHEHIANLAGSPAIKKGILQTVKVVDELVKVMGRHKPENIVIEMARENQTTQKGQKNSRERMKRIEEGIKELGSQILKEHPVENTQLQNEKLYLYYLQNGRDMYVDQELDINRLSDYDVDHIVPQSFLKDDSIDNKVLTRSDKARGKSDNVPSEEVVKKMKNYWRQLLNAKLITQRKFDNLTKAERGGLSELDKAGFIKRQLVETRQITKHVAQILDSRMNTKYDENDKLIREVKVITLKSKLVSDFRKDFQFYKVREINNYHHAHDAYLNAVVGTALIKKYPKLESEFVYGDYKVYDVRKMIAKSEQEIGKATAKYFFYSNIMNFFKTEITLANGEIRKRPLIETNGETGEIVWDKGRDFATVRKVLSMPQVNIVKKTEVQTGGFSKESILPKRNSDKLIARKKDWDPKKYGGFDSPTVAYSVLVVAKVEKGKSKKLKSVKELLGITIMERSSFEKNPIDFLEAKGYKEVKKDLIIKLPKYSLFELENGRKRMLASAGELQKGNELALPSKYVNFLYLASHYEKLKGSPEDNEQKQLFVEQHKHYLDEIIEQISEFSKRVILADANLDKVLSAYNKHRDKPIREQAENIIHLFTLTNLGAPAAFKYFDTTIDRKRYTSTKEVLDATLIHQSITGLYETRIDLSQLGGDGGGSSEAAAKGGGGGTLNIEDEYRLHETSKEPDVSLGSTWLSDFPQAWAETGGMGLAVRQAPLIIPLKATSTPVSIKQYPMSQEARLGIKPHIQRLLDQGILVPCQSPWNTPLLPVKKPGTNDYRPVQDLREVNKRVEDIHPTVPNPYNLLSGLPPSHQWYTVLDLKDAFFCLRLHPTSQPLFAFEWRDPEMGISGQLTWTRLPQGFKNSPTLFNEALHRDLAGFRIQHPDLILLQYVDDLLLAATSELDCQQGTRALLQTLGDLGYRASAKKAQICQKQVKYLGYLLKEGQRWLTEARKETVMGQPIPKTPRQLREFLGKAGFCRLFIPGFAEMAAPLYPLTKPGTLFNWGPDQQKAFQEIKQALLTAPALGLPDLTKPFELFVDEKQGYAKGVLTQKLGPWRRPVAYLSKKLDPVAAGWPPCLRMVAAIAVLTKDAGKLTMGQPLVILAPHAVEALVKQPPDRWLSNARMTHYQALLLDTDRVQFGPVVALNPATLLPLPEEGLQHDCLDILAEAHGTRSDLMDQPLPDADHTWYTDGSSFLQEGQRKAGAAVTTETEVIWARALPAGTSAQRAELIALTQALKMAEGKKLNVYTDSRYAFATAHIHGEIYRRRGWLTSEGKEIKNKDEILALLKALFLPKRLSIIHCPGHQKGNSAEARGNRMADQAAREVATRETPETSTLLAGKRTADGSEFEKRTADGSEFESPKKKAKVE

SEQ ID NO: 2385 - protein, 2096 aa, synthetic construct
MPAAKRVKLDGGDKKYSIGLDIGTNSVGWAVITDEYKVPSKKFKVLGNTDRHSIKKNLIGALLFDSGETAEATRLKRTARRRYTRRKNRICYLQEIFSNEMAKVDDSFFHRLEESFLVEEDKKHERHPIFGNIVDEVAYHEKYPTIYHLRKKLVDSTDKADLRLIYLALAHMIKFRGHFLIEGDLNPDNSDVDKLFIQLVQTYNQLFEENPINASGVDAKAILSARLSKSRRLENLIAQLPGEKKNGLFGNLIALSLGLTPNFKSNFDLAEDAKLQLSKDTYDDDLDNLLAQIGDQYADLFLAAKNLSDAILLSDILRVNTEITKAPLSASMIKRYDEHHQDLTLLKALVRQQLPEKYKEIFFDQSKNGYAGYIDGGASQEEFYKFIKPILEKMDGTEELLVKLNREDLLRKQRTFDNGSIPHQIHLGELHAILRRQEDFYPFLKDNREKIEKILTFRIPYYVGPLARGNSRFAWMTRKSEETITPWNFEEVVDKGASAQSFIERMTNFDKNLPNEKVLPKHSLLYEYFTVYNELTKVKYVTEGMRKPAFLSGEQKKAIVDLLFKTNRKVTVKQLKEDYFKKIECFDSVEISGVEDRFNASLGTYHDLLKIIKDKDFLDNEENEDILEDIVLTLTLFEDREMIEERLKTYAHLFDDKVMKQLKRRRYTGWGRLSRKLINGIRDKQSGKTILDFLKSDGFANRNFMQLIHDDSLTFKEDIQKAQVSGQGDSLHEHIANLAGSPAIKKGILQTVKVVDELVKVMGRHKPENIVIEMARENQTTQKGQKNSRERMKRIEEGIKELGSQILKEHPVENTQLQNEKLYLYYLQNGRDMYVDQELDINRLSDYDVDHIVPQSFLKDDSIDNKVLTRSDKARGKSDNVPSEEVVKKMKNYWRQLLNAKLITQRKFDNLTKAERGGLSELDKAGFIKRQLVETRQITKHVAQILDSRMNTKYDENDKLIREVKVITLKSKLVSDFRKDFQFYKVREINNYHHAHDAYLNAVVGTALIKKYPKLESEFVYGDYKVYDVRKMIAKSEQEIGKATAKYFFYSNIMNFFKTEITLANGEIRKRPLIETNGETGEIVWDKGRDFATVRKVLSMPQVNIVKKTEVQTGGFSKESILPKRNSDKLIARKKDWDPKKYGGFDSPTVAYSVLVVAKVEKGKSKKLKSVKELLGITIMERSSFEKNPIDFLEAKGYKEVKKDLIIKLPKYSLFELENGRKRMLASAGELQKGNELALPSKYVNFLYLASHYEKLKGSPEDNEQKQLFVEQHKHYLDEIIEQISEFSKRVILADANLDKVLSAYNKHRDKPIREQAENIIHLFTLTNLGAPAAFKYFDTTIDRKRYTSTKEVLDATLIHQSITGLYETRIDLSQLGGDGGGGGEAAAKPAPGGTLNIEDEYRLHETSKEPDVSLGSTWLSDFPQAWAETGGMGLAVRQAPLIIPLKATSTPVSIKQYPMSQEARLGIKPHIQRLLDQGILVPCQSPWNTPLLPVKKPGTNDYRPVQDLREVNKRVEDIHPTVPNPYNLLSGLPPSHQWYTVLDLKDAFFCLRLHPTSQPLFAFEWRDPEMGISGQLTWTRLPQGFKNSPTLFNEALHRDLAGFRIQHPDLILLQYVDDLLLAATSELDCQQGTRALLQTLGDLGYRASAKKAQICQKQVKYLGYLLKEGQRWLTEARKETVMGQPIPKTPRQLREFLGKAGFCRLFIPGFAEMAAPLYPLTKPGTLFNWGPDQQKAFQEIKQALLTAPALGLPDLTKPFELFVDEKQGYAKGVLTQKLGPWRRPVAYLSKKLDPVAAGWPPCLRMVAAIAVLTKDAGKLTMGQPLVILAPHAVEALVKQPPDRWLSNARMTHYQALLLDTDRVQFGPVVALNPATLLPLPEEGLQHDCLDILAEAHGTRSDLMDQPLPDADHTWYTDGSSFLQEGQRKAGAAVTTETEVIWARALPAGTSAQRAELIALTQALKMAEGKKLNVYTDSRYAFATAHIHGEIYRRRGWLTSEGKEIKNKDEILALLKALFLPKRLSIIHCPGHQKGNSAEARGNRMADQAAREVATRETPETSTLLAGKRTADGSEFEKRTADGSEFESPKKKAKVE

SEQ ID NO: 2386 - protein, 2096 aa, synthetic construct
MPAAKRVKLDGGDKKYSIGLDIGTNSVGWAVITDEYKVPSKKFKVLGNTDRHSIKKNLIGALLFDSGETAEATRLKRTARRRYTRRKNRICYLQEIFSNEMAKVDDSFFHRLEESFLVEEDKKHERHPIFGNIVDEVAYHEKYPTIYHLRKKLVDSTDKADLRLIYLALAHMIKFRGHFLIEGDLNPDNSDVDKLFIQLVQTYNQLFEENPINASGVDAKAILSARLSKSRRLENLIAQLPGEKKNGLFGNLIALSLGLTPNFKSNFDLAEDAKLQLSKDTYDDDLDNLLAQIGDQYADLFLAAKNLSDAILLSDILRVNTEITKAPLSASMIKRYDEHHQDLTLLKALVRQQLPEKYKEIFFDQSKNGYAGYIDGGASQEEFYKFIKPILEKMDGTEELLVKLNREDLLRKQRTFDNGSIPHQIHLGELHAILRRQEDFYPFLKDNREKIEKILTFRIPYYVGPLARGNSRFAWMTRKSEETITPWNFEEVVDKGASAQSFIERMTNFDKNLPNEKVLPKHSLLYEYFTVYNELTKVKYVTEGMRKPAFLSGEQKKAIVDLLFKTNRKVTVKQLKEDYFKKIECFDSVEISGVEDRFNASLGTYHDLLKIIKDKDFLDNEENEDILEDIVLTLTLFEDREMIEERLKTYAHLFDDKVMKQLKRRRYTGWGRLSRKLINGIRDKQSGKTILDFLKSDGFANRNFMQLIHDDSLTFKEDIQKAQVSGQGDSLHEHIANLAGSPAIKKGILQTVKVVDELVKVMGRHKPENIVIEMARENQTTQKGQKNSRERMKRIEEGIKELGSQILKEHPVENTQLQNEKLYLYYLQNGRDMYVDQELDINRLSDYDVDHIVPQSFLKDDSIDNKVLTRSDKARGKSDNVPSEEVVKKMKNYWRQLLNAKLITQRKFDNLTKAERGGLSELDKAGFIKRQLVETRQITKHVAQILDSRMNTKYDENDKLIREVKVITLKSKLVSDFRKDFQFYKVREINNYHHAHDAYLNAVVGTALIKKYPKLESEFVYGDYKVYDVRKMIAKSEQEIGKATAKYFFYSNIMNFFKTEITLANGEIRKRPLIETNGETGEIVWDKGRDFATVRKVLSMPQVNIVKKTEVQTGGFSKESILPKRNSDKLIARKKDWDPKKYGGFDSPTVAYSVLVVAKVEKGKSKKLKSVKELLGITIMERSSFEKNPIDFLEAKGYKEVKKDLIIKLPKYSLFELENGRKRMLASAGELQKGNELALPSKYVNFLYLASHYEKLKGSPEDNEQKQLFVEQHKHYLDEIIEQISEFSKRVILADANLDKVLSAYNKHRDKPIREQAENIIHLFTLTNLGAPAAFKYFDTTIDRKRYTSTKEVLDATLIHQSITGLYETRIDLSQLGGDGGGSSGGSEAAAKGGTLNIEDEYRLHETSKEPDVSLGSTWLSDFPQAWAETGGMGLAVRQAPLIIPLKATSTPVSIKQYPMSQEARLGIKPHIQRLLDQGILVPCQSPWNTPLLPVKKPGTNDYRPVQDLREVNKRVEDIHPTVPNPYNLLSGLPPSHQWYTVLDLKDAFFCLRLHPTSQPLFAFEWRDPEMGISGQLTWTRLPQGFKNSPTLFNEALHRDLAGFRIQHPDLILLQYVDDLLLAATSELDCQQGTRALLQTLGDLGYRASAKKAQICQKQVKYLGYLLKEGQRWLTEARKETVMGQPIPKTPRQLREFLGKAGFCRLFIPGFAEMAAPLYPLTKPGTLFNWGPDQQKAFQEIKQALLTAPALGLPDLTKPFELFVDEKQGYAKGVLTQKLGPWRRPVAYLSKKLDPVAAGWPPCLRMVAAIAVLTKDAGKLTMGQPLVILAPHAVEALVKQPPDRWLSNARMTHYQALLLDTDRVQFGPVVALNPATLLPLPEEGLQHDCLDILAEAHGTRSDLMDQPLPDADHTWYTDGSSFLQEGQRKAGAAVTTETEVIWARALPAGTSAQRAELIALTQALKMAEGKKLNVYTDSRYAFATAHIHGEIYRRRGWLTSEGKEIKNKDEILALLKALFLPKRLSIIHCPGHQKGNSAEARGNRMADQAAREVATRETPETSTLLAGKRTADGSEFEKRTADGSEFESPKKKAKVE

SEQ ID NO: 2387 - protein, 2094 aa, synthetic construct
MPAAKRVKLDGGDKKYSIGLDIGTNSVGWAVITDEYKVPSKKFKVLGNTDRHSIKKNLIGALLFDSGETAEATRLKRTARRRYTRRKNRICYLQEIFSNEMAKVDDSFFHRLEESFLVEEDKKHERHPIFGNIVDEVAYHEKYPTIYHLRKKLVDSTDKADLRLIYLALAHMIKFRGHFLIEGDLNPDNSDVDKLFIQLVQTYNQLFEENPINASGVDAKAILSARLSKSRRLENLIAQLPGEKKNGLFGNLIALSLGLTPNFKSNFDLAEDAKLQLSKDTYDDDLDNLLAQIGDQYADLFLAAKNLSDAILLSDILRVNTEITKAPLSASMIKRYDEHHQDLTLLKALVRQQLPEKYKEIFFDQSKNGYAGYIDGGASQEEFYKFIKPILEKMDGTEELLVKLNREDLLRKQRTFDNGSIPHQIHLGELHAILRRQEDFYPFLKDNREKIEKILTFRIPYYVGPLARGNSRFAWMTRKSEETITPWNFEEVVDKGASAQSFIERMTNFDKNLPNEKVLPKHSLLYEYFTVYNELTKVKYVTEGMRKPAFLSGEQKKAIVDLLFKTNRKVTVKQLKEDYFKKIECFDSVEISGVEDRFNASLGTYHDLLKIIKDKDFLDNEENEDILEDIVLTLTLFEDREMIEERLKTYAHLFDDKVMKQLKRRRYTGWGRLSRKLINGIRDKQSGKTILDFLKSDGFANRNFMQLIHDDSLTFKEDIQKAQVSGQGDSLHEHIANLAGSPAIKKGILQTVKVVDELVKVMGRHKPENIVIEMARENQTTQKGQKNSRERMKRIEEGIKELGSQILKEHPVENTQLQNEKLYLYYLQNGRDMYVDQELDINRLSDYDVDHIVPQSFLKDDSIDNKVLTRSDKARGKSDNVPSEEVVKKMKNYWRQLLNAKLITQRKFDNLTKAERGGLSELDKAGFIKRQLVETRQITKHVAQILDSRMNTKYDENDKLIREVKVITLKSKLVSDFRKDFQFYKVREINNYHHAHDAYLNAVVGTALIKKYPKLESEFVYGDYKVYDVRKMIAKSEQEIGKATAKYFFYSNIMNFFKTEITLANGEIRKRPLIETNGETGEIVWDKGRDFATVRKVLSMPQVNIVKKTEVQTGGFSKESILPKRNSDKLIARKKDWDPKKYGGFDSPTVAYSVLVVAKVEKGKSKKLKSVKELLGITIMERSSFEKNPIDFLEAKGYKEVKKDLIIKLPKYSLFELENGRKRMLASAGELQKGNELALPSKYVNFLYLASHYEKLKGSPEDNEQKQLFVEQHKHYLDEIIEQISEFSKRVILADANLDKVLSAYNKHRDKPIREQAENIIHLFTLTNLGAPAAFKYFDTTIDRKRYTSTKEVLDATLIHQSITGLYETRIDLSQLGGDGGGGSPAPGSSGGTLNIEDEYRLHETSKEPDVSLGSTWLSDFPQAWAETGGMGLAVRQAPLIIPLKATSTPVSIKQYPMSQEARLGIKPHIQRLLDQGILVPCQSPWNTPLLPVKKPGTNDYRPVQDLREVNKRVEDIHPTVPNPYNLLSGLPPSHQWYTVLDLKDAFFCLRLHPTSQPLFAFEWRDPEMGISGQLTWTRLPQGFKNSPTLFNEALHRDLAGFRIQHPDLILLQYVDDLLLAATSELDCQQGTRALLQTLGDLGYRASAKKAQICQKQVKYLGYLLKEGQRWLTEARKETVMGQPIPKTPRQLREFLGKAGFCRLFIPGFAEMAAPLYPLTKPGTLFNWGPDQQKAFQEIKQALLTAPALGLPDLTKPFELFVDEKQGYAKGVLTQKLGPWRRPVAYLSKKLDPVAAGWPPCLRMVAAIAVLTKDAGKLTMGQPLVILAPHAVEALVKQPPDRWLSNARMTHYQALLLDTDRVQFGPVVALNPATLLPLPEEGLQHDCLDILAEAHGTRSDLMDQPLPDADHTWYTDGSSFLQEGQRKAGAAVTTETEVIWARALPAGTSAQRAELIALTQALKMAEGKKLNVYTDSRYAFATAHIHGEIYRRRGWLTSEGKEIKNKDEILALLKALFLPKRLSIIHCPGHQKGNSAEARGNRMADQAAREVATRETPETSTLLAGKRTADGSEFEKRTADGSEFESPKKKAKVE

SEQ ID NO: 2388 - protein, 2101 aa, synthetic construct
MPAAKRVKLDGGDKKYSIGLDIGTNSVGWAVITDEYKVPSKKFKVLGNTDRHSIKKNLIGALLFDSGETAEATRLKRTARRRYTRRKNRICYLQEIFSNEMAKVDDSFFHRLEESFLVEEDKKHERHPIFGNIVDEVAYHEKYPTIYHLRKKLVDSTDKADLRLIYLALAHMIKFRGHFLIEGDLNPDNSDVDKLFIQLVQTYNQLFEENPINASGVDAKAILSARLSKSRRLENLIAQLPGEKKNGLFGNLIALSLGLTPNFKSNFDLAEDAKLQLSKDTYDDDLDNLLAQIGDQYADLFLAAKNLSDAILLSDILRVNTEITKAPLSASMIKRYDEHHQDLTLLKALVRQQLPEKYKEIFFDQSKNGYAGYIDGGASQEEFYKFIKPILEKMDGTEELLVKLNREDLLRKQRTFDNGSIPHQIHLGELHAILRRQEDFYPFLKDNREKIEKILTFRIPYYVGPLARGNSRFAWMTRKSEETITPWNFEEVVDKGASAQSFIERMTNFDKNLPNEKVLPKHSLLYEYFTVYNELTKVKYVTEGMRKPAFLSGEQKKAIVDLLFKTNRKVTVKQLKEDYFKKIECFDSVEISGVEDRFNASLGTYHDLLKIIKDKDFLDNEENEDILEDIVLTLTLFEDREMIEERLKTYAHLFDDKVMKQLKRRRYTGWGRLSRKLINGIRDKQSGKTILDFLKSDGFANRNFMQLIHDDSLTFKEDIQKAQVSGQGDSLHEHIANLAGSPAIKKGILQTVKVVDELVKVMGRHKPENIVIEMARENQTTQKGQKNSRERMKRIEEGIKELGSQILKEHPVENTQLQNEKLYLYYLQNGRDMYVDQELDINRLSDYDVDHIVPQSFLKDDSIDNKVLTRSDKARGKSDNVPSEEVVKKMKNYWRQLLNAKLITQRKFDNLTKAERGGLSELDKAGFIKRQLVETRQITKHVAQILDSRMNTKYDENDKLIREVKVITLKSKLVSDFRKDFQFYKVREINNYHHAHDAYLNAVVGTALIKKYPKLESEFVYGDYKVYDVRKMIAKSEQEIGKATAKYFFYSNIMNFFKTEITLANGEIRKRPLIETNGETGEIVWDKGRDFATVRKVLSMPQVNIVKKTEVQTGGFSKESILPKRNSDKLIARKKDWDPKKYGGFDSPTVAYSVLVVAKVEKGKSKKLKSVKELLGITIMERSSFEKNPIDFLEAKGYKEVKKDLIIKLPKYSLFELENGRKRMLASAGELQKGNELALPSKYVNFLYLASHYEKLKGSPEDNEQKQLFVEQHKHYLDEIIEQISEFSKRVILADANLDKVLSAYNKHRDKPIREQAENIIHLFTLTNLGAPAAFKYFDTTIDRKRYTSTKEVLDATLIHQSITGLYETRIDLSQLGGDGGSGSETPGTSESATPESGGTLNIEDEYRLHETSKEPDVSLGSTWLSDFPQAWAETGGMGLAVRQAPLIIPLKATSTPVSIKQYPMSQEARLGIKPHIQRLLDQGILVPCQSPWNTPLLPVKKPGTNDYRPVQDLREVNKRVEDIHPTVPNPYNLLSGLPPSHQWYTVLDLKDAFFCLRLHPTSQPLFAFEWRDPEMGISGQLTWTRLPQGFKNSPTLFNEALHRDLAGFRIQHPDLILLQYVDDLLLAATSELDCQQGTRALLQTLGDLGYRASAKKAQICQKQVKYLGYLLKEGQRWLTEARKETVMGQPIPKTPRQLREFLGKAGFCRLFIPGFAEMAAPLYPLTKPGTLFNWGPDQQKAFQEIKQALLTAPALGLPDLTKPFELFVDEKQGYAKGVLTQKLGPWRRPVAYLSKKLDPVAAGWPPCLRMVAAIAVLTKDAGKLTMGQPLVILAPHAVEALVKQPPDRWLSNARMTHYQALLLDTDRVQFGPVVALNPATLLPLPEEGLQHDCLDILAEAHGTRSDLMDQPLPDADHTWYTDGSSFLQEGQRKAGAAVTTETEVIWARALPAGTSAQRAELIALTQALKMAEGKKLNVYTDSRYAFATAHIHGEIYRRRGWLTSEGKEIKNKDEILALLKALFLPKRLSIIHCPGHQKGNSAEARGNRMADQAAREVATRETPETSTLLAGKRTADGSEFEKRTADGSEFESPKKKAKVE

SEQ ID NO: 2389 - protein, 2091 aa, synthetic construct
MPAAKRVKLDGGDKKYSIGLDIGTNSVGWAVITDEYKVPSKKFKVLGNTDRHSIKKNLIGALLFDSGETAEATRLKRTARRRYTRRKNRICYLQEIFSNEMAKVDDSFFHRLEESFLVEEDKKHERHPIFGNIVDEVAYHEKYPTIYHLRKKLVDSTDKADLRLIYLALAHMIKFRGHFLIEGDLNPDNSDVDKLFIQLVQTYNQLFEENPINASGVDAKAILSARLSKSRRLENLIAQLPGEKKNGLFGNLIALSLGLTPNFKSNFDLAEDAKLQLSKDTYDDDLDNLLAQIGDQYADLFLAAKNLSDAILLSDILRVNTEITKAPLSASMIKRYDEHHQDLTLLKALVRQQLPEKYKEIFFDQSKNGYAGYIDGGASQEEFYKFIKPILEKMDGTEELLVKLNREDLLRKQRTFDNGSIPHQIHLGELHAILRRQEDFYPFLKDNREKIEKILTFRIPYYVGPLARGNSRFAWMTRKSEETITPWNFEEVVDKGASAQSFIERMTNFDKNLPNEKVLPKHSLLYEYFTVYNELTKVKYVTEGMRKPAFLSGEQKKAIVDLLFKTNRKVTVKQLKEDYFKKIECFDSVEISGVEDRFNASLGTYHDLLKIIKDKDFLDNEENEDILEDIVLTLTLFEDREMIEERLKTYAHLFDDKVMKQLKRRRYTGWGRLSRKLINGIRDKQSGKTILDFLKSDGFANRNFMQLIHDDSLTFKEDIQKAQVSGQGDSLHEHIANLAGSPAIKKGILQTVKVVDELVKVMGRHKPENIVIEMARENQTTQKGQKNSRERMKRIEEGIKELGSQILKEHPVENTQLQNEKLYLYYLQNGRDMYVDQELDINRLSDYDVDHIVPQSFLKDDSIDNKVLTRSDKARGKSDNVPSEEVVKKMKNYWRQLLNAKLITQRKFDNLTKAERGGLSELDKAGFIKRQLVETRQITKHVAQILDSRMNTKYDENDKLIREVKVITLKSKLVSDFRKDFQFYKVREINNYHHAHDAYLNAVVGTALIKKYPKLESEFVYGDYKVYDVRKMIAKSEQEIGKATAKYFFYSNIMNFFKTEITLANGEIRKRPLIETNGETGEIVWDKGRDFATVRKVLSMPQVNIVKKTEVQTGGFSKESILPKRNSDKLIARKKDWDPKKYGGFDSPTVAYSVLVVAKVEKGKSKKLKSVKELLGITIMERSSFEKNPIDFLEAKGYKEVKKDLIIKLPKYSLFELENGRKRMLASAGELQKGNELALPSKYVNFLYLASHYEKLKGSPEDNEQKQLFVEQHKHYLDEIIEQISEFSKRVILADANLDKVLSAYNKHRDKPIREQAENIIHLFTLTNLGAPAAFKYFDTTIDRKRYTSTKEVLDATLIHQSITGLYETRIDLSQLGGDGGGGSPAPGGTLNIEDEYRLHETSKEPDVSLGSTWLSDFPQAWAETGGMGLAVRQAPLIIPLKATSTPVSIKQYPMSQEARLGIKPHIQRLLDQGILVPCQSPWNTPLLPVKKPGTNDYRPVQDLREVNKRVEDIHPTVPNPYNLLSGLPPSHQWYTVLDLKDAFFCLRLHPTSQPLFAFEWRDPEMGISGQLTWTRLPQGFKNSPTLFNEALHRDLAGFRIQHPDLILLQYVDDLLLAATSELDCQQGTRALLQTLGDLGYRASAKKAQICQKQVKYLGYLLKEGQRWLTEARKETVMGQPIPKTPRQLREFLGKAGFCRLFIPGFAEMAAPLYPLTKPGTLFNWGPDQQKAFQEIKQALLTAPALGLPDLTKPFELFVDEKQGYAKGVLTQKLGPWRRPVAYLSKKLDPVAAGWPPCLRMVAAIAVLTKDAGKLTMGQPLVILAPHAVEALVKQPPDRWLSNARMTHYQALLLDTDRVQFGPVVALNPATLLPLPEEGLQHDCLDILAEAHGTRSDLMDQPLPDADHTWYTDGSSFLQEGQRKAGAAVTTETEVIWARALPAGTSAQRAELIALTQALKMAEGKKLNVYTDSRYAFATAHIHGEIYRRRGWLTSEGKEIKNKDEILALLKALFLPKRLSIIHCPGHQKGNSAEARGNRMADQAAREVATRETPETSTLLAGKRTADGSEFEKRTADGSEFESPKKKAKVE

SEQ ID NO: 2390 - protein, 2096 aa, synthetic construct
MPAAKRVKLDGGDKKYSIGLDIGTNSVGWAVITDEYKVPSKKFKVLGNTDRHSIKKNLIGALLFDSGETAEATRLKRTARRRYTRRKNRICYLQEIFSNEMAKVDDSFFHRLEESFLVEEDKKHERHPIFGNIVDEVAYHEKYPTIYHLRKKLVDSTDKADLRLIYLALAHMIKFRGHFLIEGDLNPDNSDVDKLFIQLVQTYNQLFEENPINASGVDAKAILSARLSKSRRLENLIAQLPGEKKNGLFGNLIALSLGLTPNFKSNFDLAEDAKLQLSKDTYDDDLDNLLAQIGDQYADLFLAAKNLSDAILLSDILRVNTEITKAPLSASMIKRYDEHHQDLTLLKALVRQQLPEKYKEIFFDQSKNGYAGYIDGGASQEEFYKFIKPILEKMDGTEELLVKLNREDLLRKQRTFDNGSIPHQIHLGELHAILRRQEDFYPFLKDNREKIEKILTFRIPYYVGPLARGNSRFAWMTRKSEETITPWNFEEVVDKGASAQSFIERMTNFDKNLPNEKVLPKHSLLYEYFTVYNELTKVKYVTEGMRKPAFLSGEQKKAIVDLLFKTNRKVTVKQLKEDYFKKIECFDSVEISGVEDRFNASLGTYHDLLKIIKDKDFLDNEENEDILEDIVLTLTLFEDREMIEERLKTYAHLFDDKVMKQLKRRRYTGWGRLSRKLINGIRDKQSGKTILDFLKSDGFANRNFMQLIHDDSLTFKEDIQKAQVSGQGDSLHEHIANLAGSPAIKKGILQTVKVVDELVKVMGRHKPENIVIEMARENQTTQKGQKNSRERMKRIEEGIKELGSQILKEHPVENTQLQNEKLYLYYLQNGRDMYVDQELDINRLSDYDVDHIVPQSFLKDDSIDNKVLTRSDKARGKSDNVPSEEVVKKMKNYWRQLLNAKLITQRKFDNLTKAERGGLSELDKAGFIKRQLVETRQITKHVAQILDSRMNTKYDENDKLIREVKVITLKSKLVSDFRKDFQFYKVREINNYHHAHDAYLNAVVGTALIKKYPKLESEFVYGDYKVYDVRKMIAKSEQEIGKATAKYFFYSNIMNFFKTEITLANGEIRKRPLIETNGETGEIVWDKGRDFATVRKVLSMPQVNIVKKTEVQTGGFSKESILPKRNSDKLIARKKDWDPKKYGGFDSPTVAYSVLVVAKVEKGKSKKLKSVKELLGITIMERSSFEKNPIDFLEAKGYKEVKKDLIIKLPKYSLFELENGRKRMLASAGELQKGNELALPSKYVNFLYLASHYEKLKGSPEDNEQKQLFVEQHKHYLDEIIEQISEFSKRVILADANLDKVLSAYNKHRDKPIREQAENIIHLFTLTNLGAPAAFKYFDTTIDRKRYTSTKEVLDATLIHQSITGLYETRIDLSQLGGDGGGSSGGGEAAAKGGTLNIEDEYRLHETSKEPDVSLGSTWLSDFPQAWAETGGMGLAVRQAPLIIPLKATSTPVSIKQYPMSQEARLGIKPHIQRLLDQGILVPCQSPWNTPLLPVKKPGTNDYRPVQDLREVNKRVEDIHPTVPNPYNLLSGLPPSHQWYTVLDLKDAFFCLRLHPTSQPLFAFEWRDPEMGISGQLTWTRLPQGFKNSPTLFNEALHRDLAGFRIQHPDLILLQYVDDLLLAATSELDCQQGTRALLQTLGDLGYRASAKKAQICQKQVKYLGYLLKEGQRWLTEARKETVMGQPIPKTPRQLREFLGKAGFCRLFIPGFAEMAAPLYPLTKPGTLFNWGPDQQKAFQEIKQALLTAPALGLPDLTKPFELFVDEKQGYAKGVLTQKLGPWRRPVAYLSKKLDPVAAGWPPCLRMVAAIAVLTKDAGKLTMGQPLVILAPHAVEALVKQPPDRWLSNARMTHYQALLLDTDRVQFGPVVALNPATLLPLPEEGLQHDCLDILAEAHGTRSDLMDQPLPDADHTWYTDGSSFLQEGQRKAGAAVTTETEVIWARALPAGTSAQRAELIALTQALKMAEGKKLNVYTDSRYAFATAHIHGEIYRRRGWLTSEGKEIKNKDEILALLKALFLPKRLSIIHCPGHQKGNSAEARGNRMADQAAREVATRETPETSTLLAGKRTADGSEFEKRTADGSEFESPKKKAKVE

SEQ ID NO: 2391 - protein, 2096 aa, synthetic construct
MPAAKRVKLDGGDKKYSIGLDIGTNSVGWAVITDEYKVPSKKFKVLGNTDRHSIKKNLIGALLFDSGETAEATRLKRTARRRYTRRKNRICYLQEIFSNEMAKVDDSFFHRLEESFLVEEDKKHERHPIFGNIVDEVAYHEKYPTIYHLRKKLVDSTDKADLRLIYLALAHMIKFRGHFLIEGDLNPDNSDVDKLFIQLVQTYNQLFEENPINASGVDAKAILSARLSKSRRLENLIAQLPGEKKNGLFGNLIALSLGLTPNFKSNFDLAEDAKLQLSKDTYDDDLDNLLAQIGDQYADLFLAAKNLSDAILLSDILRVNTEITKAPLSASMIKRYDEHHQDLTLLKALVRQQLPEKYKEIFFDQSKNGYAGYIDGGASQEEFYKFIKPILEKMDGTEELLVKLNREDLLRKQRTFDNGSIPHQIHLGELHAILRRQEDFYPFLKDNREKIEKILTFRIPYYVGPLARGNSRFAWMTRKSEETITPWNFEEVVDKGASAQSFIERMTNFDKNLPNEKVLPKHSLLYEYFTVYNELTKVKYVTEGMRKPAFLSGEQKKAIVDLLFKTNRKVTVKQLKEDYFKKIECFDSVEISGVEDRFNASLGTYHDLLKIIKDKDFLDNEENEDILEDIVLTLTLFEDREMIEERLKTYAHLFDDKVMKQLKRRRYTGWGRLSRKLINGIRDKQSGKTILDFLKSDGFANRNFMQLIHDDSLTFKEDIQKAQVSGQGDSLHEHIANLAGSPAIKKGILQTVKVVDELVKVMGRHKPENIVIEMARENQTTQKGQKNSRERMKRIEEGIKELGSQILKEHPVENTQLQNEKLYLYYLQNGRDMYVDQELDINRLSDYDVDHIVPQSFLKDDSIDNKVLTRSDKARGKSDNVPSEEVVKKMKNYWRQLLNAKLITQRKFDNLTKAERGGLSELDKAGFIKRQLVETRQITKHVAQILDSRMNTKYDENDKLIREVKVITLKSKLVSDFRKDFQFYKVREINNYHHAHDAYLNAVVGTALIKKYPKLESEFVYGDYKVYDVRKMIAKSEQEIGKATAKYFFYSNIMNFFKTEITLANGEIRKRPLIETNGETGEIVWDKGRDFATVRKVLSMPQVNIVKKTEVQTGGFSKESILPKRNSDKLIARKKDWDPKKYGGFDSPTVAYSVLVVAKVEKGKSKKLKSVKELLGITIMERSSFEKNPIDFLEAKGYKEVKKDLIIKLPKYSLFELENGRKRMLASAGELQKGNELALPSKYVNFLYLASHYEKLKGSPEDNEQKQLFVEQHKHYLDEIIEQISEFSKRVILADANLDKVLSAYNKHRDKPIREQAENIIHLFTLTNLGAPAAFKYFDTTIDRKRYTSTKEVLDATLIHQSITGLYETRIDLSQLGGDGGEAAAKGGGPAPGGTLNIEDEYRLHETSKEPDVSLGSTWLSDFPQAWAETGGMGLAVRQAPLIIPLKATSTPVSIKQYPMSQEARLGIKPHIQRLLDQGILVPCQSPWNTPLLPVKKPGTNDYRPVQDLREVNKRVEDIHPTVPNPYNLLSGLPPSHQWYTVLDLKDAFFCLRLHPTSQPLFAFEWRDPEMGISGQLTWTRLPQGFKNSPTLFNEALHRDLAGFRIQHPDLILLQYVDDLLLAATSELDCQQGTRALLQTLGDLGYRASAKKAQICQKQVKYLGYLLKEGQRWLTEARKETVMGQPIPKTPRQLREFLGKAGFCRLFIPGFAEMAAPLYPLTKPGTLFNWGPDQQKAFQEIKQALLTAPALGLPDLTKPFELFVDEKQGYAKGVLTQKLGPWRRPVAYLSKKLDPVAAGWPPCLRMVAAIAVLTKDAGKLTMGQPLVILAPHAVEALVKQPPDRWLSNARMTHYQALLLDTDRVQFGPVVALNPATLLPLPEEGLQHDCLDILAEAHGTRSDLMDQPLPDADHTWYTDGSSFLQEGQRKAGAAVTTETEVIWARALPAGTSAQRAELIALTQALKMAEGKKLNVYTDSRYAFATAHIHGEIYRRRGWLTSEGKEIKNKDEILALLKALFLPKRLSIIHCPGHQKGNSAEARGNRMADQAAREVATRETPETSTLLAGKRTADGSEFEKRTADGSEFESPKKKAKVE

SEQ ID NO: 2392 - protein, 2096 aa, synthetic construct
MPAAKRVKLDGGDKKYSIGLDIGTNSVGWAVITDEYKVPSKKFKVLGNTDRHSIKKNLIGALLFDSGETAEATRLKRTARRRYTRRKNRICYLQEIFSNEMAKVDDSFFHRLEESFLVEEDKKHERHPIFGNIVDEVAYHEKYPTIYHLRKKLVDSTDKADLRLIYLALAHMIKFRGHFLIEGDLNPDNSDVDKLFIQLVQTYNQLFEENPINASGVDAKAILSARLSKSRRLENLIAQLPGEKKNGLFGNLIALSLGLTPNFKSNFDLAEDAKLQLSKDTYDDDLDNLLAQIGDQYADLFLAAKNLSDAILLSDILRVNTEITKAPLSASMIKRYDEHHQDLTLLKALVRQQLPEKYKEIFFDQSKNGYAGYIDGGASQEEFYKFIKPILEKMDGTEELLVKLNREDLLRKQRTFDNGSIPHQIHLGELHAILRRQEDFYPFLKDNREKIEKILTFRIPYYVGPLARGNSRFAWMTRKSEETITPWNFEEVVDKGASAQSFIERMTNFDKNLPNEKVLPKHSLLYEYFTVYNELTKVKYVTEGMRKPAFLSGEQKKAIVDLLFKTNRKVTVKQLKEDYFKKIECFDSVEISGVEDRFNASLGTYHDLLKIIKDKDFLDNEENEDILEDIVLTLTLFEDREMIEERLKTYAHLFDDKVMKQLKRRRYTGWGRLSRKLINGIRDKQSGKTILDFLKSDGFANRNFMQLIHDDSLTFKEDIQKAQVSGQGDSLHEHIANLAGSPAIKKGILQTVKVVDELVKVMGRHKPENIVIEMARENQTTQKGQKNSRERMKRIEEGIKELGSQILKEHPVENTQLQNEKLYLYYLQNGRDMYVDQELDINRLSDYDVDHIVPQSFLKDDSIDNKVLTRSDKARGKSDNVPSEEVVKKMKNYWRQLLNAKLITQRKFDNLTKAERGGLSELDKAGFIKRQLVETRQITKHVAQILDSRMNTKYDENDKLIREVKVITLKSKLVSDFRKDFQFYKVREINNYHHAHDAYLNAVVGTALIKKYPKLESEFVYGDYKVYDVRKMIAKSEQEIGKATAKYFFYSNIMNFFKTEITLANGEIRKRPLIETNGETGEIVWDKGRDFATVRKVLSMPQVNIVKKTEVQTGGFSKESILPKRNSDKLIARKKDWDPKKYGGFDSPTVAYSVLVVAKVEKGKSKKLKSVKELLGITIMERSSFEKNPIDFLEAKGYKEVKKDLIIKLPKYSLFELENGRKRMLASAGELQKGNELALPSKYVNFLYLASHYEKLKGSPEDNEQKQLFVEQHKHYLDEIIEQISEFSKRVILADANLDKVLSAYNKHRDKPIREQAENIIHLFTLTNLGAPAAFKYFDTTIDRKRYTSTKEVLDATLIHQSITGLYETRIDLSQLGGDGGGGGPAPEAAAKGGTLNIEDEYRLHETSKEPDVSLGSTWLSDFPQAWAETGGMGLAVRQAPLIIPLKATSTPVSIKQYPMSQEARLGIKPHIQRLLDQGILVPCQSPWNTPLLPVKKPGTNDYRPVQDLREVNKRVEDIHPTVPNPYNLLSGLPPSHQWYTVLDLKDAFFCLRLHPTSQPLFAFEWRDPEMGISGQLTWTRLPQGFKNSPTLFNEALHRDLAGFRIQHPDLILLQYVDDLLLAATSELDCQQGTRALLQTLGDLGYRASAKKAQICQKQVKYLGYLLKEGQRWLTEARKETVMGQPIPKTPRQLREFLGKAGFCRLFIPGFAEMAAPLYPLTKPGTLFNWGPDQQKAFQEIKQALLTAPALGLPDLTKPFELFVDEKQGYAKGVLTQKLGPWRRPVAYLSKKLDPVAAGWPPCLRMVAAIAVLTKDAGKLTMGQPLVILAPHAVEALVKQPPDRWLSNARMTHYQALLLDTDRVQFGPVVALNPATLLPLPEEGLQHDCLDILAEAHGTRSDLMDQPLPDADHTWYTDGSSFLQEGQRKAGAAVTTETEVIWARALPAGTSAQRAELIALTQALKMAEGKKLNVYTDSRYAFATAHIHGEIYRRRGWLTSEGKEIKNKDEILALLKALFLPKRLSIIHCPGHQKGNSAEARGNRMADQAAREVATRETPETSTLLAGKRTADGSEFEKRTADGSEFESPKKKAKVE

SEQ ID NO: 2393 - protein, 2094 aa, synthetic construct
MPAAKRVKLDGGDKKYSIGLDIGTNSVGWAVITDEYKVPSKKFKVLGNTDRHSIKKNLIGALLFDSGETAEATRLKRTARRRYTRRKNRICYLQEIFSNEMAKVDDSFFHRLEESFLVEEDKKHERHPIFGNIVDEVAYHEKYPTIYHLRKKLVDSTDKADLRLIYLALAHMIKFRGHFLIEGDLNPDNSDVDKLFIQLVQTYNQLFEENPINASGVDAKAILSARLSKSRRLENLIAQLPGEKKNGLFGNLIALSLGLTPNFKSNFDLAEDAKLQLSKDTYDDDLDNLLAQIGDQYADLFLAAKNLSDAILLSDILRVNTEITKAPLSASMIKRYDEHHQDLTLLKALVRQQLPEKYKEIFFDQSKNGYAGYIDGGASQEEFYKFIKPILEKMDGTEELLVKLNREDLLRKQRTFDNGSIPHQIHLGELHAILRRQEDFYPFLKDNREKIEKILTFRIPYYVGPLARGNSRFAWMTRKSEETITPWNFEEVVDKGASAQSFIERMTNFDKNLPNEKVLPKHSLLYEYFTVYNELTKVKYVTEGMRKPAFLSGEQKKAIVDLLFKTNRKVTVKQLKEDYFKKIECFDSVEISGVEDRFNASLGTYHDLLKIIKDKDFLDNEENEDILEDIVLTLTLFEDREMIEERLKTYAHLFDDKVMKQLKRRRYTGWGRLSRKLINGIRDKQSGKTILDFLKSDGFANRNFMQLIHDDSLTFKEDIQKAQVSGQGDSLHEHIANLAGSPAIKKGILQTVKVVDELVKVMGRHKPENIVIEMARENQTTQKGQKNSRERMKRIEEGIKELGSQILKEHPVENTQLQNEKLYLYYLQNGRDMYVDQELDINRLSDYDVDHIVPQSFLKDDSIDNKVLTRSDKARGKSDNVPSEEVVKKMKNYWRQLLNAKLITQRKFDNLTKAERGGLSELDKAGFIKRQLVETRQITKHVAQILDSRMNTKYDENDKLIREVKVITLKSKLVSDFRKDFQFYKVREINNYHHAHDAYLNAVVGTALIKKYPKLESEFVYGDYKVYDVRKMIAKSEQEIGKATAKYFFYSNIMNFFKTEITLANGEIRKRPLIETNGETGEIVWDKGRDFATVRKVLSMPQVNIVKKTEVQTGGFSKESILPKRNSDKLIARKKDWDPKKYGGFDSPTVAYSVLVVAKVEKGKSKKLKSVKELLGITIMERSSFEKNPIDFLEAKGYKEVKKDLIIKLPKYSLFELENGRKRMLASAGELQKGNELALPSKYVNFLYLASHYEKLKGSPEDNEQKQLFVEQHKHYLDEIIEQISEFSKRVILADANLDKVLSAYNKHRDKPIREQAENIIHLFTLTNLGAPAAFKYFDTTIDRKRYTSTKEVLDATLIHQSITGLYETRIDLSQLGGDGGGSSGSSGSSGGTLNIEDEYRLHETSKEPDVSLGSTWLSDFPQAWAETGGMGLAVRQAPLIIPLKATSTPVSIKQYPMSQEARLGIKPHIQRLLDQGILVPCQSPWNTPLLPVKKPGTNDYRPVQDLREVNKRVEDIHPTVPNPYNLLSGLPPSHQWYTVLDLKDAFFCLRLHPTSQPLFAFEWRDPEMGISGQLTWTRLPQGFKNSPTLFNEALHRDLAGFRIQHPDLILLQYVDDLLLAATSELDCQQGTRALLQTLGDLGYRASAKKAQICQKQVKYLGYLLKEGQRWLTEARKETVMGQPIPKTPRQLREFLGKAGFCRLFIPGFAEMAAPLYPLTKPGTLFNWGPDQQKAFQEIKQALLTAPALGLPDLTKPFELFVDEKQGYAKGVLTQKLGPWRRPVAYLSKKLDPVAAGWPPCLRMVAAIAVLTKDAGKLTMGQPLVILAPHAVEALVKQPPDRWLSNARMTHYQALLLDTDRVQFGPVVALNPATLLPLPEEGLQHDCLDILAEAHGTRSDLMDQPLPDADHTWYTDGSSFLQEGQRKAGAAVTTETEVIWARALPAGTSAQRAELIALTQALKMAEGKKLNVYTDSRYAFATAHIHGEIYRRRGWLTSEGKEIKNKDEILALLKALFLPKRLSIIHCPGHQKGNSAEARGNRMADQAAREVATRETPETSTLLAGKRTADGSEFEKRTADGSEFESPKKKAKVE

SEQ ID NO: 2394 - protein, 2092 aa, synthetic construct
MPAAKRVKLDGGDKKYSIGLDIGTNSVGWAVITDEYKVPSKKFKVLGNTDRHSIKKNLIGALLFDSGETAEATRLKRTARRRYTRRKNRICYLQEIFSNEMAKVDDSFFHRLEESFLVEEDKKHERHPIFGNIVDEVAYHEKYPTIYHLRKKLVDSTDKADLRLIYLALAHMIKFRGHFLIEGDLNPDNSDVDKLFIQLVQTYNQLFEENPINASGVDAKAILSARLSKSRRLENLIAQLPGEKKNGLFGNLIALSLGLTPNFKSNFDLAEDAKLQLSKDTYDDDLDNLLAQIGDQYADLFLAAKNLSDAILLSDILRVNTEITKAPLSASMIKRYDEHHQDLTLLKALVRQQLPEKYKEIFFDQSKNGYAGYIDGGASQEEFYKFIKPILEKMDGTEELLVKLNREDLLRKQRTFDNGSIPHQIHLGELHAILRRQEDFYPFLKDNREKIEKILTFRIPYYVGPLARGNSRFAWMTRKSEETITPWNFEEVVDKGASAQSFIERMTNFDKNLPNEKVLPKHSLLYEYFTVYNELTKVKYVTEGMRKPAFLSGEQKKAIVDLLFKTNRKVTVKQLKEDYFKKIECFDSVEISGVEDRFNASLGTYHDLLKIIKDKDFLDNEENEDILEDIVLTLTLFEDREMIEERLKTYAHLFDDKVMKQLKRRRYTGWGRLSRKLINGIRDKQSGKTILDFLKSDGFANRNFMQLIHDDSLTFKEDIQKAQVSGQGDSLHEHIANLAGSPAIKKGILQTVKVVDELVKVMGRHKPENIVIEMARENQTTQKGQKNSRERMKRIEEGIKELGSQILKEHPVENTQLQNEKLYLYYLQNGRDMYVDQELDINRLSDYDVDHIVPQSFLKDDSIDNKVLTRSDKARGKSDNVPSEEVVKKMKNYWRQLLNAKLITQRKFDNLTKAERGGLSELDKAGFIKRQLVETRQITKHVAQILDSRMNTKYDENDKLIREVKVITLKSKLVSDFRKDFQFYKVREINNYHHAHDAYLNAVVGTALIKKYPKLESEFVYGDYKVYDVRKMIAKSEQEIGKATAKYFFYSNIMNFFKTEITLANGEIRKRPLIETNGETGEIVWDKGRDFATVRKVLSMPQVNIVKKTEVQTGGFSKESILPKRNSDKLIARKKDWDPKKYGGFDSPTVAYSVLVVAKVEKGKSKKLKSVKELLGITIMERSSFEKNPIDFLEAKGYKEVKKDLIIKLPKYSLFELENGRKRMLASAGELQKGNELALPSKYVNFLYLASHYEKLKGSPEDNEQKQLFVEQHKHYLDEIIEQISEFSKRVILADANLDKVLSAYNKHRDKPIREQAENIIHLFTLTNLGAPAAFKYFDTTIDRKRYTSTKEVLDATLIHQSITGLYETRIDLSQLGGDGGPAPAPAPGGTLNIEDEYRLHETSKEPDVSLGSTWLSDFPQAWAETGGMGLAVRQAPLIIPLKATSTPVSIKQYPMSQEARLGIKPHIQRLLDQGILVPCQSPWNTPLLPVKKPGTNDYRPVQDLREVNKRVEDIHPTVPNPYNLLSGLPPSHQWYTVLDLKDAFFCLRLHPTSQPLFAFEWRDPEMGISGQLTWTRLPQGFKNSPTLFNEALHRDLAGFRIQHPDLILLQYVDDLLLAATSELDCQQGTRALLQTLGDLGYRASAKKAQICQKQVKYLGYLLKEGQRWLTEARKETVMGQPIPKTPRQLREFLGKAGFCRLFIPGFAEMAAPLYPLTKPGTLFNWGPDQQKAFQEIKQALLTAPALGLPDLTKPFELFVDEKQGYAKGVLTQKLGPWRRPVAYLSKKLDPVAAGWPPCLRMVAAIAVLTKDAGKLTMGQPLVILAPHAVEALVKQPPDRWLSNARMTHYQALLLDTDRVQFGPVVALNPATLLPLPEEGLQHDCLDILAEAHGTRSDLMDQPLPDADHTWYTDGSSFLQEGQRKAGAAVTTETEVIWARALPAGTSAQRAELIALTQALKMAEGKKLNVYTDSRYAFATAHIHGEIYRRRGWLTSEGKEIKNKDEILALLKALFLPKRLSIIHCPGHQKGNSAEARGNRMADQAAREVATRETPETSTLLAGKRTADGSEFEKRTADGSEFESPKKKAKVE

SEQ ID NO: 2395 - protein, 2091 aa, synthetic construct
MPAAKRVKLDGGDKKYSIGLDIGTNSVGWAVITDEYKVPSKKFKVLGNTDRHSIKKNLIGALLFDSGETAEATRLKRTARRRYTRRKNRICYLQEIFSNEMAKVDDSFFHRLEESFLVEEDKKHERHPIFGNIVDEVAYHEKYPTIYHLRKKLVDSTDKADLRLIYLALAHMIKFRGHFLIEGDLNPDNSDVDKLFIQLVQTYNQLFEENPINASGVDAKAILSARLSKSRRLENLIAQLPGEKKNGLFGNLIALSLGLTPNFKSNFDLAEDAKLQLSKDTYDDDLDNLLAQIGDQYADLFLAAKNLSDAILLSDILRVNTEITKAPLSASMIKRYDEHHQDLTLLKALVRQQLPEKYKEIFFDQSKNGYAGYIDGGASQEEFYKFIKPILEKMDGTEELLVKLNREDLLRKQRTFDNGSIPHQIHLGELHAILRRQEDFYPFLKDNREKIEKILTFRIPYYVGPLARGNSRFAWMTRKSEETITPWNFEEVVDKGASAQSFIERMTNFDKNLPNEKVLPKHSLLYEYFTVYNELTKVKYVTEGMRKPAFLSGEQKKAIVDLLFKTNRKVTVKQLKEDYFKKIECFDSVEISGVEDRFNASLGTYHDLLKIIKDKDFLDNEENEDILEDIVLTLTLFEDREMIEERLKTYAHLFDDKVMKQLKRRRYTGWGRLSRKLINGIRDKQSGKTILDFLKSDGFANRNFMQLIHDDSLTFKEDIQKAQVSGQGDSLHEHIANLAGSPAIKKGILQTVKVVDELVKVMGRHKPENIVIEMARENQTTQKGQKNSRERMKRIEEGIKELGSQILKEHPVENTQLQNEKLYLYYLQNGRDMYVDQELDINRLSDYDVDHIVPQSFLKDDSIDNKVLTRSDKARGKSDNVPSEEVVKKMKNYWRQLLNAKLITQRKFDNLTKAERGGLSELDKAGFIKRQLVETRQITKHVAQILDSRMNTKYDENDKLIREVKVITLKSKLVSDFRKDFQFYKVREINNYHHAHDAYLNAVVGTALIKKYPKLESEFVYGDYKVYDVRKMIAKSEQEIGKATAKYFFYSNIMNFFKTEITLANGEIRKRPLIETNGETGEIVWDKGRDFATVRKVLSMPQVNIVKKTEVQTGGFSKESILPKRNSDKLIARKKDWDPKKYGGFDSPTVAYSVLVVAKVEKGKSKKLKSVKELLGITIMERSSFEKNPIDFLEAKGYKEVKKDLIIKLPKYSLFELENGRKRMLASAGELQKGNELALPSKYVNFLYLASHYEKLKGSPEDNEQKQLFVEQHKHYLDEIIEQISEFSKRVILADANLDKVLSAYNKHRDKPIREQAENIIHLFTLTNLGAPAAFKYFDTTIDRKRYTSTKEVLDATLIHQSITGLYETRIDLSQLGGDGGPAPGGGGGTLNIEDEYRLHETSKEPDVSLGSTWLSDFPQAWAETGGMGLAVRQAPLIIPLKATSTPVSIKQYPMSQEARLGIKPHIQRLLDQGILVPCQSPWNTPLLPVKKPGTNDYRPVQDLREVNKRVEDIHPTVPNPYNLLSGLPPSHQWYTVLDLKDAFFCLRLHPTSQPLFAFEWRDPEMGISGQLTWTRLPQGFKNSPTLFNEALHRDLAGFRIQHPDLILLQYVDDLLLAATSELDCQQGTRALLQTLGDLGYRASAKKAQICQKQVKYLGYLLKEGQRWLTEARKETVMGQPIPKTPRQLREFLGKAGFCRLFIPGFAEMAAPLYPLTKPGTLFNWGPDQQKAFQEIKQALLTAPALGLPDLTKPFELFVDEKQGYAKGVLTQKLGPWRRPVAYLSKKLDPVAAGWPPCLRMVAAIAVLTKDAGKLTMGQPLVILAPHAVEALVKQPPDRWLSNARMTHYQALLLDTDRVQFGPVVALNPATLLPLPEEGLQHDCLDILAEAHGTRSDLMDQPLPDADHTWYTDGSSFLQEGQRKAGAAVTTETEVIWARALPAGTSAQRAELIALTQALKMAEGKKLNVYTDSRYAFATAHIHGEIYRRRGWLTSEGKEIKNKDEILALLKALFLPKRLSIIHCPGHQKGNSAEARGNRMADQAAREVATRETPETSTLLAGKRTADGSEFEKRTADGSEFESPKKKAKVE

SEQ ID NO: 2396 - protein, 2097 aa, synthetic construct
MPAAKRVKLDGGDKKYSIGLDIGTNSVGWAVITDEYKVPSKKFKVLGNTDRHSIKKNLIGALLFDSGETAEATRLKRTARRRYTRRKNRICYLQEIFSNEMAKVDDSFFHRLEESFLVEEDKKHERHPIFGNIVDEVAYHEKYPTIYHLRKKLVDSTDKADLRLIYLALAHMIKFRGHFLIEGDLNPDNSDVDKLFIQLVQTYNQLFEENPINASGVDAKAILSARLSKSRRLENLIAQLPGEKKNGLFGNLIALSLGLTPNFKSNFDLAEDAKLQLSKDTYDDDLDNLLAQIGDQYADLFLAAKNLSDAILLSDILRVNTEITKAPLSASMIKRYDEHHQDLTLLKALVRQQLPEKYKEIFFDQSKNGYAGYIDGGASQEEFYKFIKPILEKMDGTEELLVKLNREDLLRKQRTFDNGSIPHQIHLGELHAILRRQEDFYPFLKDNREKIEKILTFRIPYYVGPLARGNSRFAWMTRKSEETITPWNFEEVVDKGASAQSFIERMTNFDKNLPNEKVLPKHSLLYEYFTVYNELTKVKYVTEGMRKPAFLSGEQKKAIVDLLFKTNRKVTVKQLKEDYFKKIECFDSVEISGVEDRFNASLGTYHDLLKIIKDKDFLDNEENEDILEDIVLTLTLFEDREMIEERLKTYAHLFDDKVMKQLKRRRYTGWGRLSRKLINGIRDKQSGKTILDFLKSDGFANRNFMQLIHDDSLTFKEDIQKAQVSGQGDSLHEHIANLAGSPAIKKGILQTVKVVDELVKVMGRHKPENIVIEMARENQTTQKGQKNSRERMKRIEEGIKELGSQILKEHPVENTQLQNEKLYLYYLQNGRDMYVDQELDINRLSDYDVDHIVPQSFLKDDSIDNKVLTRSDKARGKSDNVPSEEVVKKMKNYWRQLLNAKLITQRKFDNLTKAERGGLSELDKAGFIKRQLVETRQITKHVAQILDSRMNTKYDENDKLIREVKVITLKSKLVSDFRKDFQFYKVREINNYHHAHDAYLNAVVGTALIKKYPKLESEFVYGDYKVYDVRKMIAKSEQEIGKATAKYFFYSNIMNFFKTEITLANGEIRKRPLIETNGETGEIVWDKGRDFATVRKVLSMPQVNIVKKTEVQTGGFSKESILPKRNSDKLIARKKDWDPKKYGGFDSPTVAYSVLVVAKVEKGKSKKLKSVKELLGITIMERSSFEKNPIDFLEAKGYKEVKKDLIIKLPKYSLFELENGRKRMLASAGELQKGNELALPSKYVNFLYLASHYEKLKGSPEDNEQKQLFVEQHKHYLDEIIEQISEFSKRVILADANLDKVLSAYNKHRDKPIREQAENIIHLFTLTNLGAPAAFKYFDTTIDRKRYTSTKEVLDATLIHQSITGLYETRIDLSQLGGDGGGSSGSSGSSGSSGGTLNIEDEYRLHETSKEPDVSLGSTWLSDFPQAWAETGGMGLAVRQAPLIIPLKATSTPVSIKQYPMSQEARLGIKPHIQRLLDQGILVPCQSPWNTPLLPVKKPGTNDYRPVQDLREVNKRVEDIHPTVPNPYNLLSGLPPSHQWYTVLDLKDAFFCLRLHPTSQPLFAFEWRDPEMGISGQLTWTRLPQGFKNSPTLFNEALHRDLAGFRIQHPDLILLQYVDDLLLAATSELDCQQGTRALLQTLGDLGYRASAKKAQICQKQVKYLGYLLKEGQRWLTEARKETVMGQPIPKTPRQLREFLGKAGFCRLFIPGFAEMAAPLYPLTKPGTLFNWGPDQQKAFQEIKQALLTAPALGLPDLTKPFELFVDEKQGYAKGVLTQKLGPWRRPVAYLSKKLDPVAAGWPPCLRMVAAIAVLTKDAGKLTMGQPLVILAPHAVEALVKQPPDRWLSNARMTHYQALLLDTDRVQFGPVVALNPATLLPLPEEGLQHDCLDILAEAHGTRSDLMDQPLPDADHTWYTDGSSFLQEGQRKAGAAVTTETEVIWARALPAGTSAQRAELIALTQALKMAEGKKLNVYTDSRYAFATAHIHGEIYRRRGWLTSEGKEIKNKDEILALLKALFLPKRLSIIHCPGHQKGNSAEARGNRMADQAAREVATRETPETSTLLAGKRTADGSEFEKRTADGSEFESPKKKAKVE

SEQ ID NO: 2397 - protein, 2091 aa, synthetic construct
MPAAKRVKLDGGDKKYSIGLDIGTNSVGWAVITDEYKVPSKKFKVLGNTDRHSIKKNLIGALLFDSGETAEATRLKRTARRRYTRRKNRICYLQEIFSNEMAKVDDSFFHRLEESFLVEEDKKHERHPIFGNIVDEVAYHEKYPTIYHLRKKLVDSTDKADLRLIYLALAHMIKFRGHFLIEGDLNPDNSDVDKLFIQLVQTYNQLFEENPINASGVDAKAILSARLSKSRRLENLIAQLPGEKKNGLFGNLIALSLGLTPNFKSNFDLAEDAKLQLSKDTYDDDLDNLLAQIGDQYADLFLAAKNLSDAILLSDILRVNTEITKAPLSASMIKRYDEHHQDLTLLKALVRQQLPEKYKEIFFDQSKNGYAGYIDGGASQEEFYKFIKPILEKMDGTEELLVKLNREDLLRKQRTFDNGSIPHQIHLGELHAILRRQEDFYPFLKDNREKIEKILTFRIPYYVGPLARGNSRFAWMTRKSEETITPWNFEEVVDKGASAQSFIERMTNFDKNLPNEKVLPKHSLLYEYFTVYNELTKVKYVTEGMRKPAFLSGEQKKAIVDLLFKTNRKVTVKQLKEDYFKKIECFDSVEISGVEDRFNASLGTYHDLLKIIKDKDFLDNEENEDILEDIVLTLTLFEDREMIEERLKTYAHLFDDKVMKQLKRRRYTGWGRLSRKLINGIRDKQSGKTILDFLKSDGFANRNFMQLIHDDSLTFKEDIQKAQVSGQGDSLHEHIANLAGSPAIKKGILQTVKVVDELVKVMGRHKPENIVIEMARENQTTQKGQKNSRERMKRIEEGIKELGSQILKEHPVENTQLQNEKLYLYYLQNGRDMYVDQELDINRLSDYDVDHIVPQSFLKDDSIDNKVLTRSDKARGKSDNVPSEEVVKKMKNYWRQLLNAKLITQRKFDNLTKAERGGLSELDKAGFIKRQLVETRQITKHVAQILDSRMNTKYDENDKLIREVKVITLKSKLVSDFRKDFQFYKVREINNYHHAHDAYLNAVVGTALIKKYPKLESEFVYGDYKVYDVRKMIAKSEQEIGKATAKYFFYSNIMNFFKTEITLANGEIRKRPLIETNGETGEIVWDKGRDFATVRKVLSMPQVNIVKKTEVQTGGFSKESILPKRNSDKLIARKKDWDPKKYGGFDSPTVAYSVLVVAKVEKGKSKKLKSVKELLGITIMERSSFEKNPIDFLEAKGYKEVKKDLIIKLPKYSLFELENGRKRMLASAGELQKGNELALPSKYVNFLYLASHYEKLKGSPEDNEQKQLFVEQHKHYLDEIIEQISEFSKRVILADANLDKVLSAYNKHRDKPIREQAENIIHLFTLTNLGAPAAFKYFDTTIDRKRYTSTKEVLDATLIHQSITGLYETRIDLSQLGGDGGGGGGGSGGTLNIEDEYRLHETSKEPDVSLGSTWLSDFPQAWAETGGMGLAVRQAPLIIPLKATSTPVSIKQYPMSQEARLGIKPHIQRLLDQGILVPCQSPWNTPLLPVKKPGTNDYRPVQDLREVNKRVEDIHPTVPNPYNLLSGLPPSHQWYTVLDLKDAFFCLRLHPTSQPLFAFEWRDPEMGISGQLTWTRLPQGFKNSPTLFNEALHRDLAGFRIQHPDLILLQYVDDLLLAATSELDCQQGTRALLQTLGDLGYRASAKKAQICQKQVKYLGYLLKEGQRWLTEARKETVMGQPIPKTPRQLREFLGKAGFCRLFIPGFAEMAAPLYPLTKPGTLFNWGPDQQKAFQEIKQALLTAPALGLPDLTKPFELFVDEKQGYAKGVLTQKLGPWRRPVAYLSKKLDPVAAGWPPCLRMVAAIAVLTKDAGKLTMGQPLVILAPHAVEALVKQPPDRWLSNARMTHYQALLLDTDRVQFGPVVALNPATLLPLPEEGLQHDCLDILAEAHGTRSDLMDQPLPDADHTWYTDGSSFLQEGQRKAGAAVTTETEVIWARALPAGTSAQRAELIALTQALKMAEGKKLNVYTDSRYAFATAHIHGEIYRRRGWLTSEGKEIKNKDEILALLKALFLPKRLSIIHCPGHQKGNSAEARGNRMADQAAREVATRETPETSTLLAGKRTADGSEFEKRTADGSEFESPKKKAKVE

SEQ ID NO: 2398 - protein, 2091 aa, synthetic construct
MPAAKRVKLDGGDKKYSIGLDIGTNSVGWAVITDEYKVPSKKFKVLGNTDRHSIKKNLIGALLFDSGETAEATRLKRTARRRYTRRKNRICYLQEIFSNEMAKVDDSFFHRLEESFLVEEDKKHERHPIFGNIVDEVAYHEKYPTIYHLRKKLVDSTDKADLRLIYLALAHMIKFRGHFLIEGDLNPDNSDVDKLFIQLVQTYNQLFEENPINASGVDAKAILSARLSKSRRLENLIAQLPGEKKNGLFGNLIALSLGLTPNFKSNFDLAEDAKLQLSKDTYDDDLDNLLAQIGDQYADLFLAAKNLSDAILLSDILRVNTEITKAPLSASMIKRYDEHHQDLTLLKALVRQQLPEKYKEIFFDQSKNGYAGYIDGGASQEEFYKFIKPILEKMDGTEELLVKLNREDLLRKQRTFDNGSIPHQIHLGELHAILRRQEDFYPFLKDNREKIEKILTFRIPYYVGPLARGNSRFAWMTRKSEETITPWNFEEVVDKGASAQSFIERMTNFDKNLPNEKVLPKHSLLYEYFTVYNELTKVKYVTEGMRKPAFLSGEQKKAIVDLLFKTNRKVTVKQLKEDYFKKIECFDSVEISGVEDRFNASLGTYHDLLKIIKDKDFLDNEENEDILEDIVLTLTLFEDREMIEERLKTYAHLFDDKVMKQLKRRRYTGWGRLSRKLINGIRDKQSGKTILDFLKSDGFANRNFMQLIHDDSLTFKEDIQKAQVSGQGDSLHEHIANLAGSPAIKKGILQTVKVVDELVKVMGRHKPENIVIEMARENQTTQKGQKNSRERMKRIEEGIKELGSQILKEHPVENTQLQNEKLYLYYLQNGRDMYVDQELDINRLSDYDVDHIVPQSFLKDDSIDNKVLTRSDKARGKSDNVPSEEVVKKMKNYWRQLLNAKLITQRKFDNLTKAERGGLSELDKAGFIKRQLVETRQITKHVAQILDSRMNTKYDENDKLIREVKVITLKSKLVSDFRKDFQFYKVREINNYHHAHDAYLNAVVGTALIKKYPKLESEFVYGDYKVYDVRKMIAKSEQEIGKATAKYFFYSNIMNFFKTEITLANGEIRKRPLIETNGETGEIVWDKGRDFATVRKVLSMPQVNIVKKTEVQTGGFSKESILPKRNSDKLIARKKDWDPKKYGGFDSPTVAYSVLVVAKVEKGKSKKLKSVKELLGITIMERSSFEKNPIDFLEAKGYKEVKKDLIIKLPKYSLFELENGRKRMLASAGELQKGNELALPSKYVNFLYLASHYEKLKGSPEDNEQKQLFVEQHKHYLDEIIEQISEFSKRVILADANLDKVLSAYNKHRDKPIREQAENIIHLFTLTNLGAPAAFKYFDTTIDRKRYTSTKEVLDATLIHQSITGLYETRIDLSQLGGDGGGGSGGSGGTLNIEDEYRLHETSKEPDVSLGSTWLSDFPQAWAETGGMGLAVRQAPLIIPLKATSTPVSIKQYPMSQEARLGIKPHIQRLLDQGILVPCQSPWNTPLLPVKKPGTNDYRPVQDLREVNKRVEDIHPTVPNPYNLLSGLPPSHQWYTVLDLKDAFFCLRLHPTSQPLFAFEWRDPEMGISGQLTWTRLPQGFKNSPTLFNEALHRDLAGFRIQHPDLILLQYVDDLLLAATSELDCQQGTRALLQTLGDLGYRASAKKAQICQKQVKYLGYLLKEGQRWLTEARKETVMGQPIPKTPRQLREFLGKAGFCRLFIPGFAEMAAPLYPLTKPGTLFNWGPDQQKAFQEIKQALLTAPALGLPDLTKPFELFVDEKQGYAKGVLTQKLGPWRRPVAYLSKKLDPVAAGWPPCLRMVAAIAVLTKDAGKLTMGQPLVILAPHAVEALVKQPPDRWLSNARMTHYQALLLDTDRVQFGPVVALNPATLLPLPEEGLQHDCLDILAEAHGTRSDLMDQPLPDADHTWYTDGSSFLQEGQRKAGAAVTTETEVIWARALPAGTSAQRAELIALTQALKMAEGKKLNVYTDSRYAFATAHIHGEIYRRRGWLTSEGKEIKNKDEILALLKALFLPKRLSIIHCPGHQKGNSAEARGNRMADQAAREVATRETPETSTLLAGKRTADGSEFEKRTADGSEFESPKKKAKVE

SEQ ID NO: 2399 - protein, 2094 aa, synthetic construct
MPAAKRVKLDGGDKKYSIGLDIGTNSVGWAVITDEYKVPSKKFKVLGNTDRHSIKKNLIGALLFDSGETAEATRLKRTARRRYTRRKNRICYLQEIFSNEMAKVDDSFFHRLEESFLVEEDKKHERHPIFGNIVDEVAYHEKYPTIYHLRKKLVDSTDKADLRLIYLALAHMIKFRGHFLIEGDLNPDNSDVDKLFIQLVQTYNQLFEENPINASGVDAKAILSARLSKSRRLENLIAQLPGEKKNGLFGNLIALSLGLTPNFKSNFDLAEDAKLQLSKDTYDDDLDNLLAQIGDQYADLFLAAKNLSDAILLSDILRVNTEITKAPLSASMIKRYDEHHQDLTLLKALVRQQLPEKYKEIFFDQSKNGYAGYIDGGASQEEFYKFIKPILEKMDGTEELLVKLNREDLLRKQRTFDNGSIPHQIHLGELHAILRRQEDFYPFLKDNREKIEKILTFRIPYYVGPLARGNSRFAWMTRKSEETITPWNFEEVVDKGASAQSFIERMTNFDKNLPNEKVLPKHSLLYEYFTVYNELTKVKYVTEGMRKPAFLSGEQKKAIVDLLFKTNRKVTVKQLKEDYFKKIECFDSVEISGVEDRFNASLGTYHDLLKIIKDKDFLDNEENEDILEDIVLTLTLFEDREMIEERLKTYAHLFDDKVMKQLKRRRYTGWGRLSRKLINGIRDKQSGKTILDFLKSDGFANRNFMQLIHDDSLTFKEDIQKAQVSGQGDSLHEHIANLAGSPAIKKGILQTVKVVDELVKVMGRHKPENIVIEMARENQTTQKGQKNSRERMKRIEEGIKELGSQILKEHPVENTQLQNEKLYLYYLQNGRDMYVDQELDINRLSDYDVDHIVPQSFLKDDSIDNKVLTRSDKARGKSDNVPSEEVVKKMKNYWRQLLNAKLITQRKFDNLTKAERGGLSELDKAGFIKRQLVETRQITKHVAQILDSRMNTKYDENDKLIREVKVITLKSKLVSDFRKDFQFYKVREINNYHHAHDAYLNAVVGTALIKKYPKLESEFVYGDYKVYDVRKMIAKSEQEIGKATAKYFFYSNIMNFFKTEITLANGEIRKRPLIETNGETGEIVWDKGRDFATVRKVLSMPQVNIVKKTEVQTGGFSKESILPKRNSDKLIARKKDWDPKKYGGFDSPTVAYSVLVVAKVEKGKSKKLKSVKELLGITIMERSSFEKNPIDFLEAKGYKEVKKDLIIKLPKYSLFELENGRKRMLASAGELQKGNELALPSKYVNFLYLASHYEKLKGSPEDNEQKQLFVEQHKHYLDEIIEQISEFSKRVILADANLDKVLSAYNKHRDKPIREQAENIIHLFTLTNLGAPAAFKYFDTTIDRKRYTSTKEVLDATLIHQSITGLYETRIDLSQLGGDGGGSSGGSPAPGGTLNIEDEYRLHETSKEPDVSLGSTWLSDFPQAWAETGGMGLAVRQAPLIIPLKATSTPVSIKQYPMSQEARLGIKPHIQRLLDQGILVPCQSPWNTPLLPVKKPGTNDYRPVQDLREVNKRVEDIHPTVPNPYNLLSGLPPSHQWYTVLDLKDAFFCLRLHPTSQPLFAFEWRDPEMGISGQLTWTRLPQGFKNSPTLFNEALHRDLAGFRIQHPDLILLQYVDDLLLAATSELDCQQGTRALLQTLGDLGYRASAKKAQICQKQVKYLGYLLKEGQRWLTEARKETVMGQPIPKTPRQLREFLGKAGFCRLFIPGFAEMAAPLYPLTKPGTLFNWGPDQQKAFQEIKQALLTAPALGLPDLTKPFELFVDEKQGYAKGVLTQKLGPWRRPVAYLSKKLDPVAAGWPPCLRMVAAIAVLTKDAGKLTMGQPLVILAPHAVEALVKQPPDRWLSNARMTHYQALLLDTDRVQFGPVVALNPATLLPLPEEGLQHDCLDILAEAHGTRSDLMDQPLPDADHTWYTDGSSFLQEGQRKAGAAVTTETEVIWARALPAGTSAQRAELIALTQALKMAEGKKLNVYTDSRYAFATAHIHGEIYRRRGWLTSEGKEIKNKDEILALLKALFLPKRLSIIHCPGHQKGNSAEARGNRMADQAAREVATRETPETSTLLAGKRTADGSEFEKRTADGSEFESPKKKAKVE

SEQ ID NO: 2400 - protein, 2096 aa, synthetic construct
MPAAKRVKLDGGDKKYSIGLDIGTNSVGWAVITDEYKVPSKKFKVLGNTDRHSIKKNLIGALLFDSGETAEATRLKRTARRRYTRRKNRICYLQEIFSNEMAKVDDSFFHRLEESFLVEEDKKHERHPIFGNIVDEVAYHEKYPTIYHLRKKLVDSTDKADLRLIYLALAHMIKFRGHFLIEGDLNPDNSDVDKLFIQLVQTYNQLFEENPINASGVDAKAILSARLSKSRRLENLIAQLPGEKKNGLFGNLIALSLGLTPNFKSNFDLAEDAKLQLSKDTYDDDLDNLLAQIGDQYADLFLAAKNLSDAILLSDILRVNTEITKAPLSASMIKRYDEHHQDLTLLKALVRQQLPEKYKEIFFDQSKNGYAGYIDGGASQEEFYKFIKPILEKMDGTEELLVKLNREDLLRKQRTFDNGSIPHQIHLGELHAILRRQEDFYPFLKDNREKIEKILTFRIPYYVGPLARGNSRFAWMTRKSEETITPWNFEEVVDKGASAQSFIERMTNFDKNLPNEKVLPKHSLLYEYFTVYNELTKVKYVTEGMRKPAFLSGEQKKAIVDLLFKTNRKVTVKQLKEDYFKKIECFDSVEISGVEDRFNASLGTYHDLLKIIKDKDFLDNEENEDILEDIVLTLTLFEDREMIEERLKTYAHLFDDKVMKQLKRRRYTGWGRLSRKLINGIRDKQSGKTILDFLKSDGFANRNFMQLIHDDSLTFKEDIQKAQVSGQGDSLHEHIANLAGSPAIKKGILQTVKVVDELVKVMGRHKPENIVIEMARENQTTQKGQKNSRERMKRIEEGIKELGSQILKEHPVENTQLQNEKLYLYYLQNGRDMYVDQELDINRLSDYDVDHIVPQSFLKDDSIDNKVLTRSDKARGKSDNVPSEEVVKKMKNYWRQLLNAKLITQRKFDNLTKAERGGLSELDKAGFIKRQLVETRQITKHVAQILDSRMNTKYDENDKLIREVKVITLKSKLVSDFRKDFQFYKVREINNYHHAHDAYLNAVVGTALIKKYPKLESEFVYGDYKVYDVRKMIAKSEQEIGKATAKYFFYSNIMNFFKTEITLANGEIRKRPLIETNGETGEIVWDKGRDFATVRKVLSMPQVNIVKKTEVQTGGFSKESILPKRNSDKLIARKKDWDPKKYGGFDSPTVAYSVLVVAKVEKGKSKKLKSVKELLGITIMERSSFEKNPIDFLEAKGYKEVKKDLIIKLPKYSLFELENGRKRMLASAGELQKGNELALPSKYVNFLYLASHYEKLKGSPEDNEQKQLFVEQHKHYLDEIIEQISEFSKRVILADANLDKVLSAYNKHRDKPIREQAENIIHLFTLTNLGAPAAFKYFDTTIDRKRYTSTKEVLDATLIHQSITGLYETRIDLSQLGGDGGPAPEAAAKGGGGGTLNIEDEYRLHETSKEPDVSLGSTWLSDFPQAWAETGGMGLAVRQAPLIIPLKATSTPVSIKQYPMSQEARLGIKPHIQRLLDQGILVPCQSPWNTPLLPVKKPGTNDYRPVQDLREVNKRVEDIHPTVPNPYNLLSGLPPSHQWYTVLDLKDAFFCLRLHPTSQPLFAFEWRDPEMGISGQLTWTRLPQGFKNSPTLFNEALHRDLAGFRIQHPDLILLQYVDDLLLAATSELDCQQGTRALLQTLGDLGYRASAKKAQICQKQVKYLGYLLKEGQRWLTEARKETVMGQPIPKTPRQLREFLGKAGFCRLFIPGFAEMAAPLYPLTKPGTLFNWGPDQQKAFQEIKQALLTAPALGLPDLTKPFELFVDEKQGYAKGVLTQKLGPWRRPVAYLSKKLDPVAAGWPPCLRMVAAIAVLTKDAGKLTMGQPLVILAPHAVEALVKQPPDRWLSNARMTHYQALLLDTDRVQFGPVVALNPATLLPLPEEGLQHDCLDILAEAHGTRSDLMDQPLPDADHTWYTDGSSFLQEGQRKAGAAVTTETEVIWARALPAGTSAQRAELIALTQALKMAEGKKLNVYTDSRYAFATAHIHGEIYRRRGWLTSEGKEIKNKDEILALLKALFLPKRLSIIHCPGHQKGNSAEARGNRMADQAAREVATRETPETSTLLAGKRTADGSEFEKRTADGSEFESPKKKAKVE

SEQ ID NO: 2401 - protein, 2094 aa, synthetic construct
MPAAKRVKLDGGDKKYSIGLDIGTNSVGWAVITDEYKVPSKKFKVLGNTDRHSIKKNLIGALLFDSGETAEATRLKRTARRRYTRRKNRICYLQEIFSNEMAKVDDSFFHRLEESFLVEEDKKHERHPIFGNIVDEVAYHEKYPTIYHLRKKLVDSTDKADLRLIYLALAHMIKFRGHFLIEGDLNPDNSDVDKLFIQLVQTYNQLFEENPINASGVDAKAILSARLSKSRRLENLIAQLPGEKKNGLFGNLIALSLGLTPNFKSNFDLAEDAKLQLSKDTYDDDLDNLLAQIGDQYADLFLAAKNLSDAILLSDILRVNTEITKAPLSASMIKRYDEHHQDLTLLKALVRQQLPEKYKEIFFDQSKNGYAGYIDGGASQEEFYKFIKPILEKMDGTEELLVKLNREDLLRKQRTFDNGSIPHQIHLGELHAILRRQEDFYPFLKDNREKIEKILTFRIPYYVGPLARGNSRFAWMTRKSEETITPWNFEEVVDKGASAQSFIERMTNFDKNLPNEKVLPKHSLLYEYFTVYNELTKVKYVTEGMRKPAFLSGEQKKAIVDLLFKTNRKVTVKQLKEDYFKKIECFDSVEISGVEDRFNASLGTYHDLLKIIKDKDFLDNEENEDILEDIVLTLTLFEDREMIEERLKTYAHLFDDKVMKQLKRRRYTGWGRLSRKLINGIRDKQSGKTILDFLKSDGFANRNFMQLIHDDSLTFKEDIQKAQVSGQGDSLHEHIANLAGSPAIKKGILQTVKVVDELVKVMGRHKPENIVIEMARENQTTQKGQKNSRERMKRIEEGIKELGSQILKEHPVENTQLQNEKLYLYYLQNGRDMYVDQELDINRLSDYDVDHIVPQSFLKDDSIDNKVLTRSDKARGKSDNVPSEEVVKKMKNYWRQLLNAKLITQRKFDNLTKAERGGLSELDKAGFIKRQLVETRQITKHVAQILDSRMNTKYDENDKLIREVKVITLKSKLVSDFRKDFQFYKVREINNYHHAHDAYLNAVVGTALIKKYPKLESEFVYGDYKVYDVRKMIAKSEQEIGKATAKYFFYSNIMNFFKTEITLANGEIRKRPLIETNGETGEIVWDKGRDFATVRKVLSMPQVNIVKKTEVQTGGFSKESILPKRNSDKLIARKKDWDPKKYGGFDSPTVAYSVLVVAKVEKGKSKKLKSVKELLGITIMERSSFEKNPIDFLEAKGYKEVKKDLIIKLPKYSLFELENGRKRMLASAGELQKGNELALPSKYVNFLYLASHYEKLKGSPEDNEQKQLFVEQHKHYLDEIIEQISEFSKRVILADANLDKVLSAYNKHRDKPIREQAENIIHLFTLTNLGAPAAFKYFDTTIDRKRYTSTKEVLDATLIHQSITGLYETRIDLSQLGGDGGPAPGGGGGSGGTLNIEDEYRLHETSKEPDVSLGSTWLSDFPQAWAETGGMGLAVRQAPLIIPLKATSTPVSIKQYPMSQEARLGIKPHIQRLLDQGILVPCQSPWNTPLLPVKKPGTNDYRPVQDLREVNKRVEDIHPTVPNPYNLLSGLPPSHQWYTVLDLKDAFFCLRLHPTSQPLFAFEWRDPEMGISGQLTWTRLPQGFKNSPTLFNEALHRDLAGFRIQHPDLILLQYVDDLLLAATSELDCQQGTRALLQTLGDLGYRASAKKAQICQKQVKYLGYLLKEGQRWLTEARKETVMGQPIPKTPRQLREFLGKAGFCRLFIPGFAEMAAPLYPLTKPGTLFNWGPDQQKAFQEIKQALLTAPALGLPDLTKPFELFVDEKQGYAKGVLTQKLGPWRRPVAYLSKKLDPVAAGWPPCLRMVAAIAVLTKDAGKLTMGQPLVILAPHAVEALVKQPPDRWLSNARMTHYQALLLDTDRVQFGPVVALNPATLLPLPEEGLQHDCLDILAEAHGTRSDLMDQPLPDADHTWYTDGSSFLQEGQRKAGAAVTTETEVIWARALPAGTSAQRAELIALTQALKMAEGKKLNVYTDSRYAFATAHIHGEIYRRRGWLTSEGKEIKNKDEILALLKALFLPKRLSIIHCPGHQKGNSAEARGNRMADQAAREVATRETPETSTLLAGKRTADGSEFEKRTADGSEFESPKKKAKVE

SEQ ID NO: 2402 - protein, 2094 aa, synthetic construct
MPAAKRVKLDGGDKKYSIGLDIGTNSVGWAVITDEYKVPSKKFKVLGNTDRHSIKKNLIGALLFDSGETAEATRLKRTARRRYTRRKNRICYLQEIFSNEMAKVDDSFFHRLEESFLVEEDKKHERHPIFGNIVDEVAYHEKYPTIYHLRKKLVDSTDKADLRLIYLALAHMIKFRGHFLIEGDLNPDNSDVDKLFIQLVQTYNQLFEENPINASGVDAKAILSARLSKSRRLENLIAQLPGEKKNGLFGNLIALSLGLTPNFKSNFDLAEDAKLQLSKDTYDDDLDNLLAQIGDQYADLFLAAKNLSDAILLSDILRVNTEITKAPLSASMIKRYDEHHQDLTLLKALVRQQLPEKYKEIFFDQSKNGYAGYIDGGASQEEFYKFIKPILEKMDGTEELLVKLNREDLLRKQRTFDNGSIPHQIHLGELHAILRRQEDFYPFLKDNREKIEKILTFRIPYYVGPLARGNSRFAWMTRKSEETITPWNFEEVVDKGASAQSFIERMTNFDKNLPNEKVLPKHSLLYEYFTVYNELTKVKYVTEGMRKPAFLSGEQKKAIVDLLFKTNRKVTVKQLKEDYFKKIECFDSVEISGVEDRFNASLGTYHDLLKIIKDKDFLDNEENEDILEDIVLTLTLFEDREMIEERLKTYAHLFDDKVMKQLKRRRYTGWGRLSRKLINGIRDKQSGKTILDFLKSDGFANRNFMQLIHDDSLTFKEDIQKAQVSGQGDSLHEHIANLAGSPAIKKGILQTVKVVDELVKVMGRHKPENIVIEMARENQTTQKGQKNSRERMKRIEEGIKELGSQILKEHPVENTQLQNEKLYLYYLQNGRDMYVDQELDINRLSDYDVDHIVPQSFLKDDSIDNKVLTRSDKARGKSDNVPSEEVVKKMKNYWRQLLNAKLITQRKFDNLTKAERGGLSELDKAGFIKRQLVETRQITKHVAQILDSRMNTKYDENDKLIREVKVITLKSKLVSDFRKDFQFYKVREINNYHHAHDAYLNAVVGTALIKKYPKLESEFVYGDYKVYDVRKMIAKSEQEIGKATAKYFFYSNIMNFFKTEITLANGEIRKRPLIETNGETGEIVWDKGRDFATVRKVLSMPQVNIVKKTEVQTGGFSKESILPKRNSDKLIARKKDWDPKKYGGFDSPTVAYSVLVVAKVEKGKSKKLKSVKELLGITIMERSSFEKNPIDFLEAKGYKEVKKDLIIKLPKYSLFELENGRKRMLASAGELQKGNELALPSKYVNFLYLASHYEKLKGSPEDNEQKQLFVEQHKHYLDEIIEQISEFSKRVILADANLDKVLSAYNKHRDKPIREQAENIIHLFTLTNLGAPAAFKYFDTTIDRKRYTSTKEVLDATLIHQSITGLYETRIDLSQLGGDGGGSSGGGPAPGGTLNIEDEYRLHETSKEPDVSLGSTWLSDFPQAWAETGGMGLAVRQAPLIIPLKATSTPVSIKQYPMSQEARLGIKPHIQRLLDQGILVPCQSPWNTPLLPVKKPGTNDYRPVQDLREVNKRVEDIHPTVPNPYNLLSGLPPSHQWYTVLDLKDAFFCLRLHPTSQPLFAFEWRDPEMGISGQLTWTRLPQGFKNSPTLFNEALHRDLAGFRIQHPDLILLQYVDDLLLAATSELDCQQGTRALLQTLGDLGYRASAKKAQICQKQVKYLGYLLKEGQRWLTEARKETVMGQPIPKTPRQLREFLGKAGFCRLFIPGFAEMAAPLYPLTKPGTLFNWGPDQQKAFQEIKQALLTAPALGLPDLTKPFELFVDEKQGYAKGVLTQKLGPWRRPVAYLSKKLDPVAAGWPPCLRMVAAIAVLTKDAGKLTMGQPLVILAPHAVEALVKQPPDRWLSNARMTHYQALLLDTDRVQFGPVVALNPATLLPLPEEGLQHDCLDILAEAHGTRSDLMDQPLPDADHTWYTDGSSFLQEGQRKAGAAVTTETEVIWARALPAGTSAQRAELIALTQALKMAEGKKLNVYTDSRYAFATAHIHGEIYRRRGWLTSEGKEIKNKDEILALLKALFLPKRLSIIHCPGHQKGNSAEARGNRMADQAAREVATRETPETSTLLAGKRTADGSEFEKRTADGSEFESPKKKAKVE

SEQ ID NO: 2403 - protein, 2094 aa, synthetic construct
MPAAKRVKLDGGDKKYSIGLDIGTNSVGWAVITDEYKVPSKKFKVLGNTDRHSIKKNLIGALLFDSGETAEATRLKRTARRRYTRRKNRICYLQEIFSNEMAKVDDSFFHRLEESFLVEEDKKHERHPIFGNIVDEVAYHEKYPTIYHLRKKLVDSTDKADLRLIYLALAHMIKFRGHFLIEGDLNPDNSDVDKLFIQLVQTYNQLFEENPINASGVDAKAILSARLSKSRRLENLIAQLPGEKKNGLFGNLIALSLGLTPNFKSNFDLAEDAKLQLSKDTYDDDLDNLLAQIGDQYADLFLAAKNLSDAILLSDILRVNTEITKAPLSASMIKRYDEHHQDLTLLKALVRQQLPEKYKEIFFDQSKNGYAGYIDGGASQEEFYKFIKPILEKMDGTEELLVKLNREDLLRKQRTFDNGSIPHQIHLGELHAILRRQEDFYPFLKDNREKIEKILTFRIPYYVGPLARGNSRFAWMTRKSEETITPWNFEEVVDKGASAQSFIERMTNFDKNLPNEKVLPKHSLLYEYFTVYNELTKVKYVTEGMRKPAFLSGEQKKAIVDLLFKTNRKVTVKQLKEDYFKKIECFDSVEISGVEDRFNASLGTYHDLLKIIKDKDFLDNEENEDILEDIVLTLTLFEDREMIEERLKTYAHLFDDKVMKQLKRRRYTGWGRLSRKLINGIRDKQSGKTILDFLKSDGFANRNFMQLIHDDSLTFKEDIQKAQVSGQGDSLHEHIANLAGSPAIKKGILQTVKVVDELVKVMGRHKPENIVIEMARENQTTQKGQKNSRERMKRIEEGIKELGSQILKEHPVENTQLQNEKLYLYYLQNGRDMYVDQELDINRLSDYDVDHIVPQSFLKDDSIDNKVLTRSDKARGKSDNVPSEEVVKKMKNYWRQLLNAKLITQRKFDNLTKAERGGLSELDKAGFIKRQLVETRQITKHVAQILDSRMNTKYDENDKLIREVKVITLKSKLVSDFRKDFQFYKVREINNYHHAHDAYLNAVVGTALIKKYPKLESEFVYGDYKVYDVRKMIAKSEQEIGKATAKYFFYSNIMNFFKTEITLANGEIRKRPLIETNGETGEIVWDKGRDFATVRKVLSMPQVNIVKKTEVQTGGFSKESILPKRNSDKLIARKKDWDPKKYGGFDSPTVAYSVLVVAKVEKGKSKKLKSVKELLGITIMERSSFEKNPIDFLEAKGYKEVKKDLIIKLPKYSLFELENGRKRMLASAGELQKGNELALPSKYVNFLYLASHYEKLKGSPEDNEQKQLFVEQHKHYLDEIIEQISEFSKRVILADANLDKVLSAYNKHRDKPIREQAENIIHLFTLTNLGAPAAFKYFDTTIDRKRYTSTKEVLDATLIHQSITGLYETRIDLSQLGGDGGPAPGGSGGGGGTLNIEDEYRLHETSKEPDVSLGSTWLSDFPQAWAETGGMGLAVRQAPLIIPLKATSTPVSIKQYPMSQEARLGIKPHIQRLLDQGILVPCQSPWNTPLLPVKKPGTNDYRPVQDLREVNKRVEDIHPTVPNPYNLLSGLPPSHQWYTVLDLKDAFFCLRLHPTSQPLFAFEWRDPEMGISGQLTWTRLPQGFKNSPTLFNEALHRDLAGFRIQHPDLILLQYVDDLLLAATSELDCQQGTRALLQTLGDLGYRASAKKAQICQKQVKYLGYLLKEGQRWLTEARKETVMGQPIPKTPRQLREFLGKAGFCRLFIPGFAEMAAPLYPLTKPGTLFNWGPDQQKAFQEIKQALLTAPALGLPDLTKPFELFVDEKQGYAKGVLTQKLGPWRRPVAYLSKKLDPVAAGWPPCLRMVAAIAVLTKDAGKLTMGQPLVILAPHAVEALVKQPPDRWLSNARMTHYQALLLDTDRVQFGPVVALNPATLLPLPEEGLQHDCLDILAEAHGTRSDLMDQPLPDADHTWYTDGSSFLQEGQRKAGAAVTTETEVIWARALPAGTSAQRAELIALTQALKMAEGKKLNVYTDSRYAFATAHIHGEIYRRRGWLTSEGKEIKNKDEILALLKALFLPKRLSIIHCPGHQKGNSAEARGNRMADQAAREVATRETPETSTLLAGKRTADGSEFEKRTADGSEFESPKKKAKVE

SEQ ID NO: 2404 - protein, 2096 aa, synthetic construct
MPAAKRVKLDGGDKKYSIGLDIGTNSVGWAVITDEYKVPSKKFKVLGNTDRHSIKKNLIGALLFDSGETAEATRLKRTARRRYTRRKNRICYLQEIFSNEMAKVDDSFFHRLEESFLVEEDKKHERHPIFGNIVDEVAYHEKYPTIYHLRKKLVDSTDKADLRLIYLALAHMIKFRGHFLIEGDLNPDNSDVDKLFIQLVQTYNQLFEENPINASGVDAKAILSARLSKSRRLENLIAQLPGEKKNGLFGNLIALSLGLTPNFKSNFDLAEDAKLQLSKDTYDDDLDNLLAQIGDQYADLFLAAKNLSDAILLSDILRVNTEITKAPLSASMIKRYDEHHQDLTLLKALVRQQLPEKYKEIFFDQSKNGYAGYIDGGASQEEFYKFIKPILEKMDGTEELLVKLNREDLLRKQRTFDNGSIPHQIHLGELHAILRRQEDFYPFLKDNREKIEKILTFRIPYYVGPLARGNSRFAWMTRKSEETITPWNFEEVVDKGASAQSFIERMTNFDKNLPNEKVLPKHSLLYEYFTVYNELTKVKYVTEGMRKPAFLSGEQKKAIVDLLFKTNRKVTVKQLKEDYFKKIECFDSVEISGVEDRFNASLGTYHDLLKIIKDKDFLDNEENEDILEDIVLTLTLFEDREMIEERLKTYAHLFDDKVMKQLKRRRYTGWGRLSRKLINGIRDKQSGKTILDFLKSDGFANRNFMQLIHDDSLTFKEDIQKAQVSGQGDSLHEHIANLAGSPAIKKGILQTVKVVDELVKVMGRHKPENIVIEMARENQTTQKGQKNSRERMKRIEEGIKELGSQILKEHPVENTQLQNEKLYLYYLQNGRDMYVDQELDINRLSDYDVDHIVPQSFLKDDSIDNKVLTRSDKARGKSDNVPSEEVVKKMKNYWRQLLNAKLITQRKFDNLTKAERGGLSELDKAGFIKRQLVETRQITKHVAQILDSRMNTKYDENDKLIREVKVITLKSKLVSDFRKDFQFYKVREINNYHHAHDAYLNAVVGTALIKKYPKLESEFVYGDYKVYDVRKMIAKSEQEIGKATAKYFFYSNIMNFFKTEITLANGEIRKRPLIETNGETGEIVWDKGRDFATVRKVLSMPQVNIVKKTEVQTGGFSKESILPKRNSDKLIARKKDWDPKKYGGFDSPTVAYSVLVVAKVEKGKSKKLKSVKELLGITIMERSSFEKNPIDFLEAKGYKEVKKDLIIKLPKYSLFELENGRKRMLASAGELQKGNELALPSKYVNFLYLASHYEKLKGSPEDNEQKQLFVEQHKHYLDEIIEQISEFSKRVILADANLDKVLSAYNKHRDKPIREQAENIIHLFTLTNLGAPAAFKYFDTTIDRKRYTSTKEVLDATLIHQSITGLYETRIDLSQLGGDGGGGSGSSEAAAKGGTLNIEDEYRLHETSKEPDVSLGSTWLSDFPQAWAETGGMGLAVRQAPLIIPLKATSTPVSIKQYPMSQEARLGIKPHIQRLLDQGILVPCQSPWNTPLLPVKKPGTNDYRPVQDLREVNKRVEDIHPTVPNPYNLLSGLPPSHQWYTVLDLKDAFFCLRLHPTSQPLFAFEWRDPEMGISGQLTWTRLPQGFKNSPTLFNEALHRDLAGFRIQHPDLILLQYVDDLLLAATSELDCQQGTRALLQTLGDLGYRASAKKAQICQKQVKYLGYLLKEGQRWLTEARKETVMGQPIPKTPRQLREFLGKAGFCRLFIPGFAEMAAPLYPLTKPGTLFNWGPDQQKAFQEIKQALLTAPALGLPDLTKPFELFVDEKQGYAKGVLTQKLGPWRRPVAYLSKKLDPVAAGWPPCLRMVAAIAVLTKDAGKLTMGQPLVILAPHAVEALVKQPPDRWLSNARMTHYQALLLDTDRVQFGPVVALNPATLLPLPEEGLQHDCLDILAEAHGTRSDLMDQPLPDADHTWYTDGSSFLQEGQRKAGAAVTTETEVIWARALPAGTSAQRAELIALTQALKMAEGKKLNVYTDSRYAFATAHIHGEIYRRRGWLTSEGKEIKNKDEILALLKALFLPKRLSIIHCPGHQKGNSAEARGNRMADQAAREVATRETPETSTLLAGKRTADGSEFEKRTADGSEFESPKKKAKVE

SEQ ID NO: 2405 - protein, 2100 aa, synthetic construct
MPAAKRVKLDGGDKKYSIGLDIGTNSVGWAVITDEYKVPSKKFKVLGNTDRHSIKKNLIGALLFDSGETAEATRLKRTARRRYTRRKNRICYLQEIFSNEMAKVDDSFFHRLEESFLVEEDKKHERHPIFGNIVDEVAYHEKYPTIYHLRKKLVDSTDKADLRLIYLALAHMIKFRGHFLIEGDLNPDNSDVDKLFIQLVQTYNQLFEENPINASGVDAKAILSARLSKSRRLENLIAQLPGEKKNGLFGNLIALSLGLTPNFKSNFDLAEDAKLQLSKDTYDDDLDNLLAQIGDQYADLFLAAKNLSDAILLSDILRVNTEITKAPLSASMIKRYDEHHQDLTLLKALVRQQLPEKYKEIFFDQSKNGYAGYIDGGASQEEFYKFIKPILEKMDGTEELLVKLNREDLLRKQRTFDNGSIPHQIHLGELHAILRRQEDFYPFLKDNREKIEKILTFRIPYYVGPLARGNSRFAWMTRKSEETITPWNFEEVVDKGASAQSFIERMTNFDKNLPNEKVLPKHSLLYEYFTVYNELTKVKYVTEGMRKPAFLSGEQKKAIVDLLFKTNRKVTVKQLKEDYFKKIECFDSVEISGVEDRFNASLGTYHDLLKIIKDKDFLDNEENEDILEDIVLTLTLFEDREMIEERLKTYAHLFDDKVMKQLKRRRYTGWGRLSRKLINGIRDKQSGKTILDFLKSDGFANRNFMQLIHDDSLTFKEDIQKAQVSGQGDSLHEHIANLAGSPAIKKGILQTVKVVDELVKVMGRHKPENIVIEMARENQTTQKGQKNSRERMKRIEEGIKELGSQILKEHPVENTQLQNEKLYLYYLQNGRDMYVDQELDINRLSDYDVDHIVPQSFLKDDSIDNKVLTRSDKARGKSDNVPSEEVVKKMKNYWRQLLNAKLITQRKFDNLTKAERGGLSELDKAGFIKRQLVETRQITKHVAQILDSRMNTKYDENDKLIREVKVITLKSKLVSDFRKDFQFYKVREINNYHHAHDAYLNAVVGTALIKKYPKLESEFVYGDYKVYDVRKMIAKSEQEIGKATAKYFFYSNIMNFFKTEITLANGEIRKRPLIETNGETGEIVWDKGRDFATVRKVLSMPQVNIVKKTEVQTGGFSKESILPKRNSDKLIARKKDWDPKKYGGFDSPTVAYSVLVVAKVEKGKSKKLKSVKELLGITIMERSSFEKNPIDFLEAKGYKEVKKDLIIKLPKYSLFELENGRKRMLASAGELQKGNELALPSKYVNFLYLASHYEKLKGSPEDNEQKQLFVEQHKHYLDEIIEQISEFSKRVILADANLDKVLSAYNKHRDKPIREQAENIIHLFTLTNLGAPAAFKYFDTTIDRKRYTSTKEVLDATLIHQSITGLYETRIDLSQLGGDGGGSSGSSGSSGSSGSSGGTLNIEDEYRLHETSKEPDVSLGSTWLSDFPQAWAETGGMGLAVRQAPLIIPLKATSTPVSIKQYPMSQEARLGIKPHIQRLLDQGILVPCQSPWNTPLLPVKKPGTNDYRPVQDLREVNKRVEDIHPTVPNPYNLLSGLPPSHQWYTVLDLKDAFFCLRLHPTSQPLFAFEWRDPEMGISGQLTWTRLPQGFKNSPTLFNEALHRDLAGFRIQHPDLILLQYVDDLLLAATSELDCQQGTRALLQTLGDLGYRASAKKAQICQKQVKYLGYLLKEGQRWLTEARKETVMGQPIPKTPRQLREFLGKAGFCRLFIPGFAEMAAPLYPLTKPGTLFNWGPDQQKAFQEIKQALLTAPALGLPDLTKPFELFVDEKQGYAKGVLTQKLGPWRRPVAYLSKKLDPVAAGWPPCLRMVAAIAVLTKDAGKLTMGQPLVILAPHAVEALVKQPPDRWLSNARMTHYQALLLDTDRVQFGPVVALNPATLLPLPEEGLQHDCLDILAEAHGTRSDLMDQPLPDADHTWYTDGSSFLQEGQRKAGAAVTTETEVIWARALPAGTSAQRAELIALTQALKMAEGKKLNVYTDSRYAFATAHIHGEIYRRRGWLTSEGKEIKNKDEILALLKALFLPKRLSIIHCPGHQKGNSAEARGNRMADQAAREVATRETPETSTLLAGKRTADGSEFEKRTADGSEFESPKKKAKVE

SEQ ID NO: 2406 - protein, 2091 aa, synthetic construct
MPAAKRVKLDGGDKKYSIGLDIGTNSVGWAVITDEYKVPSKKFKVLGNTDRHSIKKNLIGALLFDSGETAEATRLKRTARRRYTRRKNRICYLQEIFSNEMAKVDDSFFHRLEESFLVEEDKKHERHPIFGNIVDEVAYHEKYPTIYHLRKKLVDSTDKADLRLIYLALAHMIKFRGHFLIEGDLNPDNSDVDKLFIQLVQTYNQLFEENPINASGVDAKAILSARLSKSRRLENLIAQLPGEKKNGLFGNLIALSLGLTPNFKSNFDLAEDAKLQLSKDTYDDDLDNLLAQIGDQYADLFLAAKNLSDAILLSDILRVNTEITKAPLSASMIKRYDEHHQDLTLLKALVRQQLPEKYKEIFFDQSKNGYAGYIDGGASQEEFYKFIKPILEKMDGTEELLVKLNREDLLRKQRTFDNGSIPHQIHLGELHAILRRQEDFYPFLKDNREKIEKILTFRIPYYVGPLARGNSRFAWMTRKSEETITPWNFEEVVDKGASAQSFIERMTNFDKNLPNEKVLPKHSLLYEYFTVYNELTKVKYVTEGMRKPAFLSGEQKKAIVDLLFKTNRKVTVKQLKEDYFKKIECFDSVEISGVEDRFNASLGTYHDLLKIIKDKDFLDNEENEDILEDIVLTLTLFEDREMIEERLKTYAHLFDDKVMKQLKRRRYTGWGRLSRKLINGIRDKQSGKTILDFLKSDGFANRNFMQLIHDDSLTFKEDIQKAQVSGQGDSLHEHIANLAGSPAIKKGILQTVKVVDELVKVMGRHKPENIVIEMARENQTTQKGQKNSRERMKRIEEGIKELGSQILKEHPVENTQLQNEKLYLYYLQNGRDMYVDQELDINRLSDYDVDHIVPQSFLKDDSIDNKVLTRSDKARGKSDNVPSEEVVKKMKNYWRQLLNAKLITQRKFDNLTKAERGGLSELDKAGFIKRQLVETRQITKHVAQILDSRMNTKYDENDKLIREVKVITLKSKLVSDFRKDFQFYKVREINNYHHAHDAYLNAVVGTALIKKYPKLESEFVYGDYKVYDVRKMIAKSEQEIGKATAKYFFYSNIMNFFKTEITLANGEIRKRPLIETNGETGEIVWDKGRDFATVRKVLSMPQVNIVKKTEVQTGGFSKESILPKRNSDKLIARKKDWDPKKYGGFDSPTVAYSVLVVAKVEKGKSKKLKSVKELLGITIMERSSFEKNPIDFLEAKGYKEVKKDLIIKLPKYSLFELENGRKRMLASAGELQKGNELALPSKYVNFLYLASHYEKLKGSPEDNEQKQLFVEQHKHYLDEIIEQISEFSKRVILADANLDKVLSAYNKHRDKPIREQAENIIHLFTLTNLGAPAAFKYFDTTIDRKRYTSTKEVLDATLIHQSITGLYETRIDLSQLGGDGGGSSGGSGGTLNIEDEYRLHETSKEPDVSLGSTWLSDFPQAWAETGGMGLAVRQAPLIIPLKATSTPVSIKQYPMSQEARLGIKPHIQRLLDQGILVPCQSPWNTPLLPVKKPGTNDYRPVQDLREVNKRVEDIHPTVPNPYNLLSGLPPSHQWYTVLDLKDAFFCLRLHPTSQPLFAFEWRDPEMGISGQLTWTRLPQGFKNSPTLFNEALHRDLAGFRIQHPDLILLQYVDDLLLAATSELDCQQGTRALLQTLGDLGYRASAKKAQICQKQVKYLGYLLKEGQRWLTEARKETVMGQPIPKTPRQLREFLGKAGFCRLFIPGFAEMAAPLYPLTKPGTLFNWGPDQQKAFQEIKQALLTAPALGLPDLTKPFELFVDEKQGYAKGVLTQKLGPWRRPVAYLSKKLDPVAAGWPPCLRMVAAIAVLTKDAGKLTMGQPLVILAPHAVEALVKQPPDRWLSNARMTHYQALLLDTDRVQFGPVVALNPATLLPLPEEGLQHDCLDILAEAHGTRSDLMDQPLPDADHTWYTDGSSFLQEGQRKAGAAVTTETEVIWARALPAGTSAQRAELIALTQALKMAEGKKLNVYTDSRYAFATAHIHGEIYRRRGWLTSEGKEIKNKDEILALLKALFLPKRLSIIHCPGHQKGNSAEARGNRMADQAAREVATRETPETSTLLAGKRTADGSEFEKRTADGSEFESPKKKAKVE

SEQ ID NO: 2407 - protein, 2094 aa, synthetic construct
MPAAKRVKLDGGDKKYSIGLDIGTNSVGWAVITDEYKVPSKKFKVLGNTDRHSIKKNLIGALLFDSGETAEATRLKRTARRRYTRRKNRICYLQEIFSNEMAKVDDSFFHRLEESFLVEEDKKHERHPIFGNIVDEVAYHEKYPTIYHLRKKLVDSTDKADLRLIYLALAHMIKFRGHFLIEGDLNPDNSDVDKLFIQLVQTYNQLFEENPINASGVDAKAILSARLSKSRRLENLIAQLPGEKKNGLFGNLIALSLGLTPNFKSNFDLAEDAKLQLSKDTYDDDLDNLLAQIGDQYADLFLAAKNLSDAILLSDILRVNTEITKAPLSASMIKRYDEHHQDLTLLKALVRQQLPEKYKEIFFDQSKNGYAGYIDGGASQEEFYKFIKPILEKMDGTEELLVKLNREDLLRKQRTFDNGSIPHQIHLGELHAILRRQEDFYPFLKDNREKIEKILTFRIPYYVGPLARGNSRFAWMTRKSEETITPWNFEEVVDKGASAQSFIERMTNFDKNLPNEKVLPKHSLLYEYFTVYNELTKVKYVTEGMRKPAFLSGEQKKAIVDLLFKTNRKVTVKQLKEDYFKKIECFDSVEISGVEDRFNASLGTYHDLLKIIKDKDFLDNEENEDILEDIVLTLTLFEDREMIEERLKTYAHLFDDKVMKQLKRRRYTGWGRLSRKLINGIRDKQSGKTILDFLKSDGFANRNFMQLIHDDSLTFKEDIQKAQVSGQGDSLHEHIANLAGSPAIKKGILQTVKVVDELVKVMGRHKPENIVIEMARENQTTQKGQKNSRERMKRIEEGIKELGSQILKEHPVENTQLQNEKLYLYYLQNGRDMYVDQELDINRLSDYDVDHIVPQSFLKDDSIDNKVLTRSDKARGKSDNVPSEEVVKKMKNYWRQLLNAKLITQRKFDNLTKAERGGLSELDKAGFIKRQLVETRQITKHVAQILDSRMNTKYDENDKLIREVKVITLKSKLVSDFRKDFQFYKVREINNYHHAHDAYLNAVVGTALIKKYPKLESEFVYGDYKVYDVRKMIAKSEQEIGKATAKYFFYSNIMNFFKTEITLANGEIRKRPLIETNGETGEIVWDKGRDFATVRKVLSMPQVNIVKKTEVQTGGFSKESILPKRNSDKLIARKKDWDPKKYGGFDSPTVAYSVLVVAKVEKGKSKKLKSVKELLGITIMERSSFEKNPIDFLEAKGYKEVKKDLIIKLPKYSLFELENGRKRMLASAGELQKGNELALPSKYVNFLYLASHYEKLKGSPEDNEQKQLFVEQHKHYLDEIIEQISEFSKRVILADANLDKVLSAYNKHRDKPIREQAENIIHLFTLTNLGAPAAFKYFDTTIDRKRYTSTKEVLDATLIHQSITGLYETRIDLSQLGGDGGGSSPAPGGSGGTLNIEDEYRLHETSKEPDVSLGSTWLSDFPQAWAETGGMGLAVRQAPLIIPLKATSTPVSIKQYPMSQEARLGIKPHIQRLLDQGILVPCQSPWNTPLLPVKKPGTNDYRPVQDLREVNKRVEDIHPTVPNPYNLLSGLPPSHQWYTVLDLKDAFFCLRLHPTSQPLFAFEWRDPEMGISGQLTWTRLPQGFKNSPTLFNEALHRDLAGFRIQHPDLILLQYVDDLLLAATSELDCQQGTRALLQTLGDLGYRASAKKAQICQKQVKYLGYLLKEGQRWLTEARKETVMGQPIPKTPRQLREFLGKAGFCRLFIPGFAEMAAPLYPLTKPGTLFNWGPDQQKAFQEIKQALLTAPALGLPDLTKPFELFVDEKQGYAKGVLTQKLGPWRRPVAYLSKKLDPVAAGWPPCLRMVAAIAVLTKDAGKLTMGQPLVILAPHAVEALVKQPPDRWLSNARMTHYQALLLDTDRVQFGPVVALNPATLLPLPEEGLQHDCLDILAEAHGTRSDLMDQPLPDADHTWYTDGSSFLQEGQRKAGAAVTTETEVIWARALPAGTSAQRAELIALTQALKMAEGKKLNVYTDSRYAFATAHIHGEIYRRRGWLTSEGKEIKNKDEILALLKALFLPKRLSIIHCPGHQKGNSAEARGNRMADQAAREVATRETPETSTLLAGKRTADGSEFEKRTADGSEFESPKKKAKVE

SEQ ID NO: 2408 - protein, 2096 aa, synthetic construct
MPAAKRVKLDGGDKKYSIGLDIGTNSVGWAVITDEYKVPSKKFKVLGNTDRHSIKKNLIGALLFDSGETAEATRLKRTARRRYTRRKNRICYLQEIFSNEMAKVDDSFFHRLEESFLVEEDKKHERHPIFGNIVDEVAYHEKYPTIYHLRKKLVDSTDKADLRLIYLALAHMIKFRGHFLIEGDLNPDNSDVDKLFIQLVQTYNQLFEENPINASGVDAKAILSARLSKSRRLENLIAQLPGEKKNGLFGNLIALSLGLTPNFKSNFDLAEDAKLQLSKDTYDDDLDNLLAQIGDQYADLFLAAKNLSDAILLSDILRVNTEITKAPLSASMIKRYDEHHQDLTLLKALVRQQLPEKYKEIFFDQSKNGYAGYIDGGASQEEFYKFIKPILEKMDGTEELLVKLNREDLLRKQRTFDNGSIPHQIHLGELHAILRRQEDFYPFLKDNREKIEKILTFRIPYYVGPLARGNSRFAWMTRKSEETITPWNFEEVVDKGASAQSFIERMTNFDKNLPNEKVLPKHSLLYEYFTVYNELTKVKYVTEGMRKPAFLSGEQKKAIVDLLFKTNRKVTVKQLKEDYFKKIECFDSVEISGVEDRFNASLGTYHDLLKIIKDKDFLDNEENEDILEDIVLTLTLFEDREMIEERLKTYAHLFDDKVMKQLKRRRYTGWGRLSRKLINGIRDKQSGKTILDFLKSDGFANRNFMQLIHDDSLTFKEDIQKAQVSGQGDSLHEHIANLAGSPAIKKGILQTVKVVDELVKVMGRHKPENIVIEMARENQTTQKGQKNSRERMKRIEEGIKELGSQILKEHPVENTQLQNEKLYLYYLQNGRDMYVDQELDINRLSDYDVDHIVPQSFLKDDSIDNKVLTRSDKARGKSDNVPSEEVVKKMKNYWRQLLNAKLITQRKFDNLTKAERGGLSELDKAGFIKRQLVETRQITKHVAQILDSRMNTKYDENDKLIREVKVITLKSKLVSDFRKDFQFYKVREINNYHHAHDAYLNAVVGTALIKKYPKLESEFVYGDYKVYDVRKMIAKSEQEIGKATAKYFFYSNIMNFFKTEITLANGEIRKRPLIETNGETGEIVWDKGRDFATVRKVLSMPQVNIVKKTEVQTGGFSKESILPKRNSDKLIARKKDWDPKKYGGFDSPTVAYSVLVVAKVEKGKSKKLKSVKELLGITIMERSSFEKNPIDFLEAKGYKEVKKDLIIKLPKYSLFELENGRKRMLASAGELQKGNELALPSKYVNFLYLASHYEKLKGSPEDNEQKQLFVEQHKHYLDEIIEQISEFSKRVILADANLDKVLSAYNKHRDKPIREQAENIIHLFTLTNLGAPAAFKYFDTTIDRKRYTSTKEVLDATLIHQSITGLYETRIDLSQLGGDGGGGSEAAAKGSSGGTLNIEDEYRLHETSKEPDVSLGSTWLSDFPQAWAETGGMGLAVRQAPLIIPLKATSTPVSIKQYPMSQEARLGIKPHIQRLLDQGILVPCQSPWNTPLLPVKKPGTNDYRPVQDLREVNKRVEDIHPTVPNPYNLLSGLPPSHQWYTVLDLKDAFFCLRLHPTSQPLFAFEWRDPEMGISGQLTWTRLPQGFKNSPTLFNEALHRDLAGFRIQHPDLILLQYVDDLLLAATSELDCQQGTRALLQTLGDLGYRASAKKAQICQKQVKYLGYLLKEGQRWLTEARKETVMGQPIPKTPRQLREFLGKAGFCRLFIPGFAEMAAPLYPLTKPGTLFNWGPDQQKAFQEIKQALLTAPALGLPDLTKPFELFVDEKQGYAKGVLTQKLGPWRRPVAYLSKKLDPVAAGWPPCLRMVAAIAVLTKDAGKLTMGQPLVILAPHAVEALVKQPPDRWLSNARMTHYQALLLDTDRVQFGPVVALNPATLLPLPEEGLQHDCLDILAEAHGTRSDLMDQPLPDADHTWYTDGSSFLQEGQRKAGAAVTTETEVIWARALPAGTSAQRAELIALTQALKMAEGKKLNVYTDSRYAFATAHIHGEIYRRRGWLTSEGKEIKNKDEILALLKALFLPKRLSIIHCPGHQKGNSAEARGNRMADQAAREVATRETPETSTLLAGKRTADGSEFEKRTADGSEFESPKKKAKVE

SEQ ID NO: 2409 - protein, 2094 aa, synthetic construct
MPAAKRVKLDGGDKKYSIGLDIGTNSVGWAVITDEYKVPSKKFKVLGNTDRHSIKKNLIGALLFDSGETAEATRLKRTARRRYTRRKNRICYLQEIFSNEMAKVDDSFFHRLEESFLVEEDKKHERHPIFGNIVDEVAYHEKYPTIYHLRKKLVDSTDKADLRLIYLALAHMIKFRGHFLIEGDLNPDNSDVDKLFIQLVQTYNQLFEENPINASGVDAKAILSARLSKSRRLENLIAQLPGEKKNGLFGNLIALSLGLTPNFKSNFDLAEDAKLQLSKDTYDDDLDNLLAQIGDQYADLFLAAKNLSDAILLSDILRVNTEITKAPLSASMIKRYDEHHQDLTLLKALVRQQLPEKYKEIFFDQSKNGYAGYIDGGASQEEFYKFIKPILEKMDGTEELLVKLNREDLLRKQRTFDNGSIPHQIHLGELHAILRRQEDFYPFLKDNREKIEKILTFRIPYYVGPLARGNSRFAWMTRKSEETITPWNFEEVVDKGASAQSFIERMTNFDKNLPNEKVLPKHSLLYEYFTVYNELTKVKYVTEGMRKPAFLSGEQKKAIVDLLFKTNRKVTVKQLKEDYFKKIECFDSVEISGVEDRFNASLGTYHDLLKIIKDKDFLDNEENEDILEDIVLTLTLFEDREMIEERLKTYAHLFDDKVMKQLKRRRYTGWGRLSRKLINGIRDKQSGKTILDFLKSDGFANRNFMQLIHDDSLTFKEDIQKAQVSGQGDSLHEHIANLAGSPAIKKGILQTVKVVDELVKVMGRHKPENIVIEMARENQTTQKGQKNSRERMKRIEEGIKELGSQILKEHPVENTQLQNEKLYLYYLQNGRDMYVDQELDINRLSDYDVDHIVPQSFLKDDSIDNKVLTRSDKARGKSDNVPSEEVVKKMKNYWRQLLNAKLITQRKFDNLTKAERGGLSELDKAGFIKRQLVETRQITKHVAQILDSRMNTKYDENDKLIREVKVITLKSKLVSDFRKDFQFYKVREINNYHHAHDAYLNAVVGTALIKKYPKLESEFVYGDYKVYDVRKMIAKSEQEIGKATAKYFFYSNIMNFFKTEITLANGEIRKRPLIETNGETGEIVWDKGRDFATVRKVLSMPQVNIVKKTEVQTGGFSKESILPKRNSDKLIARKKDWDPKKYGGFDSPTVAYSVLVVAKVEKGKSKKLKSVKELLGITIMERSSFEKNPIDFLEAKGYKEVKKDLIIKLPKYSLFELENGRKRMLASAGELQKGNELALPSKYVNFLYLASHYEKLKGSPEDNEQKQLFVEQHKHYLDEIIEQISEFSKRVILADANLDKVLSAYNKHRDKPIREQAENIIHLFTLTNLGAPAAFKYFDTTIDRKRYTSTKEVLDATLIHQSITGLYETRIDLSQLGGDGGGGGGSSGGSGGTLNIEDEYRLHETSKEPDVSLGSTWLSDFPQAWAETGGMGLAVRQAPLIIPLKATSTPVSIKQYPMSQEARLGIKPHIQRLLDQGILVPCQSPWNTPLLPVKKPGTNDYRPVQDLREVNKRVEDIHPTVPNPYNLLSGLPPSHQWYTVLDLKDAFFCLRLHPTSQPLFAFEWRDPEMGISGQLTWTRLPQGFKNSPTLFNEALHRDLAGFRIQHPDLILLQYVDDLLLAATSELDCQQGTRALLQTLGDLGYRASAKKAQICQKQVKYLGYLLKEGQRWLTEARKETVMGQPIPKTPRQLREFLGKAGFCRLFIPGFAEMAAPLYPLTKPGTLFNWGPDQQKAFQEIKQALLTAPALGLPDLTKPFELFVDEKQGYAKGVLTQKLGPWRRPVAYLSKKLDPVAAGWPPCLRMVAAIAVLTKDAGKLTMGQPLVILAPHAVEALVKQPPDRWLSNARMTHYQALLLDTDRVQFGPVVALNPATLLPLPEEGLQHDCLDILAEAHGTRSDLMDQPLPDADHTWYTDGSSFLQEGQRKAGAAVTTETEVIWARALPAGTSAQRAELIALTQALKMAEGKKLNVYTDSRYAFATAHIHGEIYRRRGWLTSEGKEIKNKDEILALLKALFLPKRLSIIHCPGHQKGNSAEARGNRMADQAAREVATRETPETSTLLAGKRTADGSEFEKRTADGSEFESPKKKAKVE

SEQ ID NO: 2410 - protein, 2110 aa, synthetic construct
MPAAKRVKLDGGDKKYSIGLDIGTNSVGWAVITDEYKVPSKKFKVLGNTDRHSIKKNLIGALLFDSGETAEATRLKRTARRRYTRRKNRICYLQEIFSNEMAKVDDSFFHRLEESFLVEEDKKHERHPIFGNIVDEVAYHEKYPTIYHLRKKLVDSTDKADLRLIYLALAHMIKFRGHFLIEGDLNPDNSDVDKLFIQLVQTYNQLFEENPINASGVDAKAILSARLSKSRRLENLIAQLPGEKKNGLFGNLIALSLGLTPNFKSNFDLAEDAKLQLSKDTYDDDLDNLLAQIGDQYADLFLAAKNLSDAILLSDILRVNTEITKAPLSASMIKRYDEHHQDLTLLKALVRQQLPEKYKEIFFDQSKNGYAGYIDGGASQEEFYKFIKPILEKMDGTEELLVKLNREDLLRKQRTFDNGSIPHQIHLGELHAILRRQEDFYPFLKDNREKIEKILTFRIPYYVGPLARGNSRFAWMTRKSEETITPWNFEEVVDKGASAQSFIERMTNFDKNLPNEKVLPKHSLLYEYFTVYNELTKVKYVTEGMRKPAFLSGEQKKAIVDLLFKTNRKVTVKQLKEDYFKKIECFDSVEISGVEDRFNASLGTYHDLLKIIKDKDFLDNEENEDILEDIVLTLTLFEDREMIEERLKTYAHLFDDKVMKQLKRRRYTGWGRLSRKLINGIRDKQSGKTILDFLKSDGFANRNFMQLIHDDSLTFKEDIQKAQVSGQGDSLHEHIANLAGSPAIKKGILQTVKVVDELVKVMGRHKPENIVIEMARENQTTQKGQKNSRERMKRIEEGIKELGSQILKEHPVENTQLQNEKLYLYYLQNGRDMYVDQELDINRLSDYDVDHIVPQSFLKDDSIDNKVLTRSDKARGKSDNVPSEEVVKKMKNYWRQLLNAKLITQRKFDNLTKAERGGLSELDKAGFIKRQLVETRQITKHVAQILDSRMNTKYDENDKLIREVKVITLKSKLVSDFRKDFQFYKVREINNYHHAHDAYLNAVVGTALIKKYPKLESEFVYGDYKVYDVRKMIAKSEQEIGKATAKYFFYSNIMNFFKTEITLANGEIRKRPLIETNGETGEIVWDKGRDFATVRKVLSMPQVNIVKKTEVQTGGFSKESILPKRNSDKLIARKKDWDPKKYGGFDSPTVAYSVLVVAKVEKGKSKKLKSVKELLGITIMERSSFEKNPIDFLEAKGYKEVKKDLIIKLPKYSLFELENGRKRMLASAGELQKGNELALPSKYVNFLYLASHYEKLKGSPEDNEQKQLFVEQHKHYLDEIIEQISEFSKRVILADANLDKVLSAYNKHRDKPIREQAENIIHLFTLTNLGAPAAFKYFDTTIDRKRYTSTKEVLDATLIHQSITGLYETRIDLSQLGGDGGGGGGSGGGGSGGGGSGGGGSGGGGSGGTLNIEDEYRLHETSKEPDVSLGSTWLSDFPQAWAETGGMGLAVRQAPLIIPLKATSTPVSIKQYPMSQEARLGIKPHIQRLLDQGILVPCQSPWNTPLLPVKKPGTNDYRPVQDLREVNKRVEDIHPTVPNPYNLLSGLPPSHQWYTVLDLKDAFFCLRLHPTSQPLFAFEWRDPEMGISGQLTWTRLPQGFKNSPTLFNEALHRDLAGFRIQHPDLILLQYVDDLLLAATSELDCQQGTRALLQTLGDLGYRASAKKAQICQKQVKYLGYLLKEGQRWLTEARKETVMGQPIPKTPRQLREFLGKAGFCRLFIPGFAEMAAPLYPLTKPGTLFNWGPDQQKAFQEIKQALLTAPALGLPDLTKPFELFVDEKQGYAKGVLTQKLGPWRRPVAYLSKKLDPVAAGWPPCLRMVAAIAVLTKDAGKLTMGQPLVILAPHAVEALVKQPPDRWLSNARMTHYQALLLDTDRVQFGPVVALNPATLLPLPEEGLQHDCLDILAEAHGTRSDLMDQPLPDADHTWYTDGSSFLQEGQRKAGAAVTTETEVIWARALPAGTSAQRAELIALTQALKMAEGKKLNVYTDSRYAFATAHIHGEIYRRRGWLTSEGKEIKNKDEILALLKALFLPKRLSIIHCPGHQKGNSAEARGNRMADQAAREVATRETPETSTLLAGKRTADGSEFEKRTADGSEFESPKKKAKVE

SEQ ID NO: 2411 - protein, 2091 aa, synthetic construct
MPAAKRVKLDGGDKKYSIGLDIGTNSVGWAVITDEYKVPSKKFKVLGNTDRHSIKKNLIGALLFDSGETAEATRLKRTARRRYTRRKNRICYLQEIFSNEMAKVDDSFFHRLEESFLVEEDKKHERHPIFGNIVDEVAYHEKYPTIYHLRKKLVDSTDKADLRLIYLALAHMIKFRGHFLIEGDLNPDNSDVDKLFIQLVQTYNQLFEENPINASGVDAKAILSARLSKSRRLENLIAQLPGEKKNGLFGNLIALSLGLTPNFKSNFDLAEDAKLQLSKDTYDDDLDNLLAQIGDQYADLFLAAKNLSDAILLSDILRVNTEITKAPLSASMIKRYDEHHQDLTLLKALVRQQLPEKYKEIFFDQSKNGYAGYIDGGASQEEFYKFIKPILEKMDGTEELLVKLNREDLLRKQRTFDNGSIPHQIHLGELHAILRRQEDFYPFLKDNREKIEKILTFRIPYYVGPLARGNSRFAWMTRKSEETITPWNFEEVVDKGASAQSFIERMTNFDKNLPNEKVLPKHSLLYEYFTVYNELTKVKYVTEGMRKPAFLSGEQKKAIVDLLFKTNRKVTVKQLKEDYFKKIECFDSVEISGVEDRFNASLGTYHDLLKIIKDKDFLDNEENEDILEDIVLTLTLFEDREMIEERLKTYAHLFDDKVMKQLKRRRYTGWGRLSRKLINGIRDKQSGKTILDFLKSDGFANRNFMQLIHDDSLTFKEDIQKAQVSGQGDSLHEHIANLAGSPAIKKGILQTVKVVDELVKVMGRHKPENIVIEMARENQTTQKGQKNSRERMKRIEEGIKELGSQILKEHPVENTQLQNEKLYLYYLQNGRDMYVDQELDINRLSDYDVDHIVPQSFLKDDSIDNKVLTRSDKARGKSDNVPSEEVVKKMKNYWRQLLNAKLITQRKFDNLTKAERGGLSELDKAGFIKRQLVETRQITKHVAQILDSRMNTKYDENDKLIREVKVITLKSKLVSDFRKDFQFYKVREINNYHHAHDAYLNAVVGTALIKKYPKLESEFVYGDYKVYDVRKMIAKSEQEIGKATAKYFFYSNIMNFFKTEITLANGEIRKRPLIETNGETGEIVWDKGRDFATVRKVLSMPQVNIVKKTEVQTGGFSKESILPKRNSDKLIARKKDWDPKKYGGFDSPTVAYSVLVVAKVEKGKSKKLKSVKELLGITIMERSSFEKNPIDFLEAKGYKEVKKDLIIKLPKYSLFELENGRKRMLASAGELQKGNELALPSKYVNFLYLASHYEKLKGSPEDNEQKQLFVEQHKHYLDEIIEQISEFSKRVILADANLDKVLSAYNKHRDKPIREQAENIIHLFTLTNLGAPAAFKYFDTTIDRKRYTSTKEVLDATLIHQSITGLYETRIDLSQLGGDGGGSSGSSGGTLNIEDEYRLHETSKEPDVSLGSTWLSDFPQAWAETGGMGLAVRQAPLIIPLKATSTPVSIKQYPMSQEARLGIKPHIQRLLDQGILVPCQSPWNTPLLPVKKPGTNDYRPVQDLREVNKRVEDIHPTVPNPYNLLSGLPPSHQWYTVLDLKDAFFCLRLHPTSQPLFAFEWRDPEMGISGQLTWTRLPQGFKNSPTLFNEALHRDLAGFRIQHPDLILLQYVDDLLLAATSELDCQQGTRALLQTLGDLGYRASAKKAQICQKQVKYLGYLLKEGQRWLTEARKETVMGQPIPKTPRQLREFLGKAGFCRLFIPGFAEMAAPLYPLTKPGTLFNWGPDQQKAFQEIKQALLTAPALGLPDLTKPFELFVDEKQGYAKGVLTQKLGPWRRPVAYLSKKLDPVAAGWPPCLRMVAAIAVLTKDAGKLTMGQPLVILAPHAVEALVKQPPDRWLSNARMTHYQALLLDTDRVQFGPVVALNPATLLPLPEEGLQHDCLDILAEAHGTRSDLMDQPLPDADHTWYTDGSSFLQEGQRKAGAAVTTETEVIWARALPAGTSAQRAELIALTQALKMAEGKKLNVYTDSRYAFATAHIHGEIYRRRGWLTSEGKEIKNKDEILALLKALFLPKRLSIIHCPGHQKGNSAEARGNRMADQAAREVATRETPETSTLLAGKRTADGSEFEKRTADGSEFESPKKKAKVE

SEQ ID NO: 2412 - protein, 2096 aa, synthetic construct
MPAAKRVKLDGGDKKYSIGLDIGTNSVGWAVITDEYKVPSKKFKVLGNTDRHSIKKNLIGALLFDSGETAEATRLKRTARRRYTRRKNRICYLQEIFSNEMAKVDDSFFHRLEESFLVEEDKKHERHPIFGNIVDEVAYHEKYPTIYHLRKKLVDSTDKADLRLIYLALAHMIKFRGHFLIEGDLNPDNSDVDKLFIQLVQTYNQLFEENPINASGVDAKAILSARLSKSRRLENLIAQLPGEKKNGLFGNLIALSLGLTPNFKSNFDLAEDAKLQLSKDTYDDDLDNLLAQIGDQYADLFLAAKNLSDAILLSDILRVNTEITKAPLSASMIKRYDEHHQDLTLLKALVRQQLPEKYKEIFFDQSKNGYAGYIDGGASQEEFYKFIKPILEKMDGTEELLVKLNREDLLRKQRTFDNGSIPHQIHLGELHAILRRQEDFYPFLKDNREKIEKILTFRIPYYVGPLARGNSRFAWMTRKSEETITPWNFEEVVDKGASAQSFIERMTNFDKNLPNEKVLPKHSLLYEYFTVYNELTKVKYVTEGMRKPAFLSGEQKKAIVDLLFKTNRKVTVKQLKEDYFKKIECFDSVEISGVEDRFNASLGTYHDLLKIIKDKDFLDNEENEDILEDIVLTLTLFEDREMIEERLKTYAHLFDDKVMKQLKRRRYTGWGRLSRKLINGIRDKQSGKTILDFLKSDGFANRNFMQLIHDDSLTFKEDIQKAQVSGQGDSLHEHIANLAGSPAIKKGILQTVKVVDELVKVMGRHKPENIVIEMARENQTTQKGQKNSRERMKRIEEGIKELGSQILKEHPVENTQLQNEKLYLYYLQNGRDMYVDQELDINRLSDYDVDHIVPQSFLKDDSIDNKVLTRSDKARGKSDNVPSEEVVKKMKNYWRQLLNAKLITQRKFDNLTKAERGGLSELDKAGFIKRQLVETRQITKHVAQILDSRMNTKYDENDKLIREVKVITLKSKLVSDFRKDFQFYKVREINNYHHAHDAYLNAVVGTALIKKYPKLESEFVYGDYKVYDVRKMIAKSEQEIGKATAKYFFYSNIMNFFKTEITLANGEIRKRPLIETNGETGEIVWDKGRDFATVRKVLSMPQVNIVKKTEVQTGGFSKESILPKRNSDKLIARKKDWDPKKYGGFDSPTVAYSVLVVAKVEKGKSKKLKSVKELLGITIMERSSFEKNPIDFLEAKGYKEVKKDLIIKLPKYSLFELENGRKRMLASAGELQKGNELALPSKYVNFLYLASHYEKLKGSPEDNEQKQLFVEQHKHYLDEIIEQISEFSKRVILADANLDKVLSAYNKHRDKPIREQAENIIHLFTLTNLGAPAAFKYFDTTIDRKRYTSTKEVLDATLIHQSITGLYETRIDLSQLGGDGGEAAAKGGGGSSGGTLNIEDEYRLHETSKEPDVSLGSTWLSDFPQAWAETGGMGLAVRQAPLIIPLKATSTPVSIKQYPMSQEARLGIKPHIQRLLDQGILVPCQSPWNTPLLPVKKPGTNDYRPVQDLREVNKRVEDIHPTVPNPYNLLSGLPPSHQWYTVLDLKDAFFCLRLHPTSQPLFAFEWRDPEMGISGQLTWTRLPQGFKNSPTLFNEALHRDLAGFRIQHPDLILLQYVDDLLLAATSELDCQQGTRALLQTLGDLGYRASAKKAQICQKQVKYLGYLLKEGQRWLTEARKETVMGQPIPKTPRQLREFLGKAGFCRLFIPGFAEMAAPLYPLTKPGTLFNWGPDQQKAFQEIKQALLTAPALGLPDLTKPFELFVDEKQGYAKGVLTQKLGPWRRPVAYLSKKLDPVAAGWPPCLRMVAAIAVLTKDAGKLTMGQPLVILAPHAVEALVKQPPDRWLSNARMTHYQALLLDTDRVQFGPVVALNPATLLPLPEEGLQHDCLDILAEAHGTRSDLMDQPLPDADHTWYTDGSSFLQEGQRKAGAAVTTETEVIWARALPAGTSAQRAELIALTQALKMAEGKKLNVYTDSRYAFATAHIHGEIYRRRGWLTSEGKEIKNKDEILALLKALFLPKRLSIIHCPGHQKGNSAEARGNRMADQAAREVATRETPETSTLLAGKRTADGSEFEKRTADGSEFESPKKKAKVE

SEQ ID NO: 2413 - protein, 2096 aa, synthetic construct
MPAAKRVKLDGGDKKYSIGLDIGTNSVGWAVITDEYKVPSKKFKVLGNTDRHSIKKNLIGALLFDSGETAEATRLKRTARRRYTRRKNRICYLQEIFSNEMAKVDDSFFHRLEESFLVEEDKKHERHPIFGNIVDEVAYHEKYPTIYHLRKKLVDSTDKADLRLIYLALAHMIKFRGHFLIEGDLNPDNSDVDKLFIQLVQTYNQLFEENPINASGVDAKAILSARLSKSRRLENLIAQLPGEKKNGLFGNLIALSLGLTPNFKSNFDLAEDAKLQLSKDTYDDDLDNLLAQIGDQYADLFLAAKNLSDAILLSDILRVNTEITKAPLSASMIKRYDEHHQDLTLLKALVRQQLPEKYKEIFFDQSKNGYAGYIDGGASQEEFYKFIKPILEKMDGTEELLVKLNREDLLRKQRTFDNGSIPHQIHLGELHAILRRQEDFYPFLKDNREKIEKILTFRIPYYVGPLARGNSRFAWMTRKSEETITPWNFEEVVDKGASAQSFIERMTNFDKNLPNEKVLPKHSLLYEYFTVYNELTKVKYVTEGMRKPAFLSGEQKKAIVDLLFKTNRKVTVKQLKEDYFKKIECFDSVEISGVEDRFNASLGTYHDLLKIIKDKDFLDNEENEDILEDIVLTLTLFEDREMIEERLKTYAHLFDDKVMKQLKRRRYTGWGRLSRKLINGIRDKQSGKTILDFLKSDGFANRNFMQLIHDDSLTFKEDIQKAQVSGQGDSLHEHIANLAGSPAIKKGILQTVKVVDELVKVMGRHKPENIVIEMARENQTTQKGQKNSRERMKRIEEGIKELGSQILKEHPVENTQLQNEKLYLYYLQNGRDMYVDQELDINRLSDYDVDHIVPQSFLKDDSIDNKVLTRSDKARGKSDNVPSEEVVKKMKNYWRQLLNAKLITQRKFDNLTKAERGGLSELDKAGFIKRQLVETRQITKHVAQILDSRMNTKYDENDKLIREVKVITLKSKLVSDFRKDFQFYKVREINNYHHAHDAYLNAVVGTALIKKYPKLESEFVYGDYKVYDVRKMIAKSEQEIGKATAKYFFYSNIMNFFKTEITLANGEIRKRPLIETNGETGEIVWDKGRDFATVRKVLSMPQVNIVKKTEVQTGGFSKESILPKRNSDKLIARKKDWDPKKYGGFDSPTVAYSVLVVAKVEKGKSKKLKSVKELLGITIMERSSFEKNPIDFLEAKGYKEVKKDLIIKLPKYSLFELENGRKRMLASAGELQKGNELALPSKYVNFLYLASHYEKLKGSPEDNEQKQLFVEQHKHYLDEIIEQISEFSKRVILADANLDKVLSAYNKHRDKPIREQAENIIHLFTLTNLGAPAAFKYFDTTIDRKRYTSTKEVLDATLIHQSITGLYETRIDLSQLGGDGGGGSGGGEAAAKGGTLNIEDEYRLHETSKEPDVSLGSTWLSDFPQAWAETGGMGLAVRQAPLIIPLKATSTPVSIKQYPMSQEARLGIKPHIQRLLDQGILVPCQSPWNTPLLPVKKPGTNDYRPVQDLREVNKRVEDIHPTVPNPYNLLSGLPPSHQWYTVLDLKDAFFCLRLHPTSQPLFAFEWRDPEMGISGQLTWTRLPQGFKNSPTLFNEALHRDLAGFRIQHPDLILLQYVDDLLLAATSELDCQQGTRALLQTLGDLGYRASAKKAQICQKQVKYLGYLLKEGQRWLTEARKETVMGQPIPKTPRQLREFLGKAGFCRLFIPGFAEMAAPLYPLTKPGTLFNWGPDQQKAFQEIKQALLTAPALGLPDLTKPFELFVDEKQGYAKGVLTQKLGPWRRPVAYLSKKLDPVAAGWPPCLRMVAAIAVLTKDAGKLTMGQPLVILAPHAVEALVKQPPDRWLSNARMTHYQALLLDTDRVQFGPVVALNPATLLPLPEEGLQHDCLDILAEAHGTRSDLMDQPLPDADHTWYTDGSSFLQEGQRKAGAAVTTETEVIWARALPAGTSAQRAELIALTQALKMAEGKKLNVYTDSRYAFATAHIHGEIYRRRGWLTSEGKEIKNKDEILALLKALFLPKRLSIIHCPGHQKGNSAEARGNRMADQAAREVATRETPETSTLLAGKRTADGSEFEKRTADGSEFESPKKKAKVE

SEQ ID NO: 2414 - protein, 2094 aa, synthetic construct
MPAAKRVKLDGGDKKYSIGLDIGTNSVGWAVITDEYKVPSKKFKVLGNTDRHSIKKNLIGALLFDSGETAEATRLKRTARRRYTRRKNRICYLQEIFSNEMAKVDDSFFHRLEESFLVEEDKKHERHPIFGNIVDEVAYHEKYPTIYHLRKKLVDSTDKADLRLIYLALAHMIKFRGHFLIEGDLNPDNSDVDKLFIQLVQTYNQLFEENPINASGVDAKAILSARLSKSRRLENLIAQLPGEKKNGLFGNLIALSLGLTPNFKSNFDLAEDAKLQLSKDTYDDDLDNLLAQIGDQYADLFLAAKNLSDAILLSDILRVNTEITKAPLSASMIKRYDEHHQDLTLLKALVRQQLPEKYKEIFFDQSKNGYAGYIDGGASQEEFYKFIKPILEKMDGTEELLVKLNREDLLRKQRTFDNGSIPHQIHLGELHAILRRQEDFYPFLKDNREKIEKILTFRIPYYVGPLARGNSRFAWMTRKSEETITPWNFEEVVDKGASAQSFIERMTNFDKNLPNEKVLPKHSLLYEYFTVYNELTKVKYVTEGMRKPAFLSGEQKKAIVDLLFKTNRKVTVKQLKEDYFKKIECFDSVEISGVEDRFNASLGTYHDLLKIIKDKDFLDNEENEDILEDIVLTLTLFEDREMIEERLKTYAHLFDDKVMKQLKRRRYTGWGRLSRKLINGIRDKQSGKTILDFLKSDGFANRNFMQLIHDDSLTFKEDIQKAQVSGQGDSLHEHIANLAGSPAIKKGILQTVKVVDELVKVMGRHKPENIVIEMARENQTTQKGQKNSRERMKRIEEGIKELGSQILKEHPVENTQLQNEKLYLYYLQNGRDMYVDQELDINRLSDYDVDHIVPQSFLKDDSIDNKVLTRSDKARGKSDNVPSEEVVKKMKNYWRQLLNAKLITQRKFDNLTKAERGGLSELDKAGFIKRQLVETRQITKHVAQILDSRMNTKYDENDKLIREVKVITLKSKLVSDFRKDFQFYKVREINNYHHAHDAYLNAVVGTALIKKYPKLESEFVYGDYKVYDVRKMIAKSEQEIGKATAKYFFYSNIMNFFKTEITLANGEIRKRPLIETNGETGEIVWDKGRDFATVRKVLSMPQVNIVKKTEVQTGGFSKESILPKRNSDKLIARKKDWDPKKYGGFDSPTVAYSVLVVAKVEKGKSKKLKSVKELLGITIMERSSFEKNPIDFLEAKGYKEVKKDLIIKLPKYSLFELENGRKRMLASAGELQKGNELALPSKYVNFLYLASHYEKLKGSPEDNEQKQLFVEQHKHYLDEIIEQISEFSKRVILADANLDKVLSAYNKHRDKPIREQAENIIHLFTLTNLGAPAAFKYFDTTIDRKRYTSTKEVLDATLIHQSITGLYETRIDLSQLGGDGGPAPGSSGGGGGTLNIEDEYRLHETSKEPDVSLGSTWLSDFPQAWAETGGMGLAVRQAPLIIPLKATSTPVSIKQYPMSQEARLGIKPHIQRLLDQGILVPCQSPWNTPLLPVKKPGTNDYRPVQDLREVNKRVEDIHPTVPNPYNLLSGLPPSHQWYTVLDLKDAFFCLRLHPTSQPLFAFEWRDPEMGISGQLTWTRLPQGFKNSPTLFNEALHRDLAGFRIQHPDLILLQYVDDLLLAATSELDCQQGTRALLQTLGDLGYRASAKKAQICQKQVKYLGYLLKEGQRWLTEARKETVMGQPIPKTPRQLREFLGKAGFCRLFIPGFAEMAAPLYPLTKPGTLFNWGPDQQKAFQEIKQALLTAPALGLPDLTKPFELFVDEKQGYAKGVLTQKLGPWRRPVAYLSKKLDPVAAGWPPCLRMVAAIAVLTKDAGKLTMGQPLVILAPHAVEALVKQPPDRWLSNARMTHYQALLLDTDRVQFGPVVALNPATLLPLPEEGLQHDCLDILAEAHGTRSDLMDQPLPDADHTWYTDGSSFLQEGQRKAGAAVTTETEVIWARALPAGTSAQRAELIALTQALKMAEGKKLNVYTDSRYAFATAHIHGEIYRRRGWLTSEGKEIKNKDEILALLKALFLPKRLSIIHCPGHQKGNSAEARGNRMADQAAREVATRETPETSTLLAGKRTADGSEFEKRTADGSEFESPKKKAKVE

SEQ ID NO: 2415 - protein, 2089 aa, synthetic construct
MPAAKRVKLDGGDKKYSIGLDIGTNSVGWAVITDEYKVPSKKFKVLGNTDRHSIKKNLIGALLFDSGETAEATRLKRTARRRYTRRKNRICYLQEIFSNEMAKVDDSFFHRLEESFLVEEDKKHERHPIFGNIVDEVAYHEKYPTIYHLRKKLVDSTDKADLRLIYLALAHMIKFRGHFLIEGDLNPDNSDVDKLFIQLVQTYNQLFEENPINASGVDAKAILSARLSKSRRLENLIAQLPGEKKNGLFGNLIALSLGLTPNFKSNFDLAEDAKLQLSKDTYDDDLDNLLAQIGDQYADLFLAAKNLSDAILLSDILRVNTEITKAPLSASMIKRYDEHHQDLTLLKALVRQQLPEKYKEIFFDQSKNGYAGYIDGGASQEEFYKFIKPILEKMDGTEELLVKLNREDLLRKQRTFDNGSIPHQIHLGELHAILRRQEDFYPFLKDNREKIEKILTFRIPYYVGPLARGNSRFAWMTRKSEETITPWNFEEVVDKGASAQSFIERMTNFDKNLPNEKVLPKHSLLYEYFTVYNELTKVKYVTEGMRKPAFLSGEQKKAIVDLLFKTNRKVTVKQLKEDYFKKIECFDSVEISGVEDRFNASLGTYHDLLKIIKDKDFLDNEENEDILEDIVLTLTLFEDREMIEERLKTYAHLFDDKVMKQLKRRRYTGWGRLSRKLINGIRDKQSGKTILDFLKSDGFANRNFMQLIHDDSLTFKEDIQKAQVSGQGDSLHEHIANLAGSPAIKKGILQTVKVVDELVKVMGRHKPENIVIEMARENQTTQKGQKNSRERMKRIEEGIKELGSQILKEHPVENTQLQNEKLYLYYLQNGRDMYVDQELDINRLSDYDVDHIVPQSFLKDDSIDNKVLTRSDKARGKSDNVPSEEVVKKMKNYWRQLLNAKLITQRKFDNLTKAERGGLSELDKAGFIKRQLVETRQITKHVAQILDSRMNTKYDENDKLIREVKVITLKSKLVSDFRKDFQFYKVREINNYHHAHDAYLNAVVGTALIKKYPKLESEFVYGDYKVYDVRKMIAKSEQEIGKATAKYFFYSNIMNFFKTEITLANGEIRKRPLIETNGETGEIVWDKGRDFATVRKVLSMPQVNIVKKTEVQTGGFSKESILPKRNSDKLIARKKDWDPKKYGGFDSPTVAYSVLVVAKVEKGKSKKLKSVKELLGITIMERSSFEKNPIDFLEAKGYKEVKKDLIIKLPKYSLFELENGRKRMLASAGELQKGNELALPSKYVNFLYLASHYEKLKGSPEDNEQKQLFVEQHKHYLDEIIEQISEFSKRVILADANLDKVLSAYNKHRDKPIREQAENIIHLFTLTNLGAPAAFKYFDTTIDRKRYTSTKEVLDATLIHQSITGLYETRIDLSQLGGDGGGGGGGGTLNIEDEYRLHETSKEPDVSLGSTWLSDFPQAWAETGGMGLAVRQAPLIIPLKATSTPVSIKQYPMSQEARLGIKPHIQRLLDQGILVPCQSPWNTPLLPVKKPGTNDYRPVQDLREVNKRVEDIHPTVPNPYNLLSGLPPSHQWYTVLDLKDAFFCLRLHPTSQPLFAFEWRDPEMGISGQLTWTRLPQGFKNSPTLFNEALHRDLAGFRIQHPDLILLQYVDDLLLAATSELDCQQGTRALLQTLGDLGYRASAKKAQICQKQVKYLGYLLKEGQRWLTEARKETVMGQPIPKTPRQLREFLGKAGFCRLFIPGFAEMAAPLYPLTKPGTLFNWGPDQQKAFQEIKQALLTAPALGLPDLTKPFELFVDEKQGYAKGVLTQKLGPWRRPVAYLSKKLDPVAAGWPPCLRMVAAIAVLTKDAGKLTMGQPLVILAPHAVEALVKQPPDRWLSNARMTHYQALLLDTDRVQFGPVVALNPATLLPLPEEGLQHDCLDILAEAHGTRSDLMDQPLPDADHTWYTDGSSFLQEGQRKAGAAVTTETEVIWARALPAGTSAQRAELIALTQALKMAEGKKLNVYTDSRYAFATAHIHGEIYRRRGWLTSEGKEIKNKDEILALLKALFLPKRLSIIHCPGHQKGNSAEARGNRMADQAAREVATRETPETSTLLAGKRTADGSEFEKRTADGSEFESPKKKAKVE

SEQ ID NO: 2416 - protein, 2094 aa, synthetic construct
MPAAKRVKLDGGDKKYSIGLDIGTNSVGWAVITDEYKVPSKKFKVLGNTDRHSIKKNLIGALLFDSGETAEATRLKRTARRRYTRRKNRICYLQEIFSNEMAKVDDSFFHRLEESFLVEEDKKHERHPIFGNIVDEVAYHEKYPTIYHLRKKLVDSTDKADLRLIYLALAHMIKFRGHFLIEGDLNPDNSDVDKLFIQLVQTYNQLFEENPINASGVDAKAILSARLSKSRRLENLIAQLPGEKKNGLFGNLIALSLGLTPNFKSNFDLAEDAKLQLSKDTYDDDLDNLLAQIGDQYADLFLAAKNLSDAILLSDILRVNTEITKAPLSASMIKRYDEHHQDLTLLKALVRQQLPEKYKEIFFDQSKNGYAGYIDGGASQEEFYKFIKPILEKMDGTEELLVKLNREDLLRKQRTFDNGSIPHQIHLGELHAILRRQEDFYPFLKDNREKIEKILTFRIPYYVGPLARGNSRFAWMTRKSEETITPWNFEEVVDKGASAQSFIERMTNFDKNLPNEKVLPKHSLLYEYFTVYNELTKVKYVTEGMRKPAFLSGEQKKAIVDLLFKTNRKVTVKQLKEDYFKKIECFDSVEISGVEDRFNASLGTYHDLLKIIKDKDFLDNEENEDILEDIVLTLTLFEDREMIEERLKTYAHLFDDKVMKQLKRRRYTGWGRLSRKLINGIRDKQSGKTILDFLKSDGFANRNFMQLIHDDSLTFKEDIQKAQVSGQGDSLHEHIANLAGSPAIKKGILQTVKVVDELVKVMGRHKPENIVIEMARENQTTQKGQKNSRERMKRIEEGIKELGSQILKEHPVENTQLQNEKLYLYYLQNGRDMYVDQELDINRLSDYDVDHIVPQSFLKDDSIDNKVLTRSDKARGKSDNVPSEEVVKKMKNYWRQLLNAKLITQRKFDNLTKAERGGLSELDKAGFIKRQLVETRQITKHVAQILDSRMNTKYDENDKLIREVKVITLKSKLVSDFRKDFQFYKVREINNYHHAHDAYLNAVVGTALIKKYPKLESEFVYGDYKVYDVRKMIAKSEQEIGKATAKYFFYSNIMNFFKTEITLANGEIRKRPLIETNGETGEIVWDKGRDFATVRKVLSMPQVNIVKKTEVQTGGFSKESILPKRNSDKLIARKKDWDPKKYGGFDSPTVAYSVLVVAKVEKGKSKKLKSVKELLGITIMERSSFEKNPIDFLEAKGYKEVKKDLIIKLPKYSLFELENGRKRMLASAGELQKGNELALPSKYVNFLYLASHYEKLKGSPEDNEQKQLFVEQHKHYLDEIIEQISEFSKRVILADANLDKVLSAYNKHRDKPIREQAENIIHLFTLTNLGAPAAFKYFDTTIDRKRYTSTKEVLDATLIHQSITGLYETRIDLSQLGGDGGGGGGGSPAPGGTLNIEDEYRLHETSKEPDVSLGSTWLSDFPQAWAETGGMGLAVRQAPLIIPLKATSTPVSIKQYPMSQEARLGIKPHIQRLLDQGILVPCQSPWNTPLLPVKKPGTNDYRPVQDLREVNKRVEDIHPTVPNPYNLLSGLPPSHQWYTVLDLKDAFFCLRLHPTSQPLFAFEWRDPEMGISGQLTWTRLPQGFKNSPTLFNEALHRDLAGFRIQHPDLILLQYVDDLLLAATSELDCQQGTRALLQTLGDLGYRASAKKAQICQKQVKYLGYLLKEGQRWLTEARKETVMGQPIPKTPRQLREFLGKAGFCRLFIPGFAEMAAPLYPLTKPGTLFNWGPDQQKAFQEIKQALLTAPALGLPDLTKPFELFVDEKQGYAKGVLTQKLGPWRRPVAYLSKKLDPVAAGWPPCLRMVAAIAVLTKDAGKLTMGQPLVILAPHAVEALVKQPPDRWLSNARMTHYQALLLDTDRVQFGPVVALNPATLLPLPEEGLQHDCLDILAEAHGTRSDLMDQPLPDADHTWYTDGSSFLQEGQRKAGAAVTTETEVIWARALPAGTSAQRAELIALTQALKMAEGKKLNVYTDSRYAFATAHIHGEIYRRRGWLTSEGKEIKNKDEILALLKALFLPKRLSIIHCPGHQKGNSAEARGNRMADQAAREVATRETPETSTLLAGKRTADGSEFEKRTADGSEFESPKKKAKVE

SEQ ID NO: 2417 - protein, 2100 aa, synthetic construct
MPAAKRVKLDGGDKKYSIGLDIGTNSVGWAVITDEYKVPSKKFKVLGNTDRHSIKKNLIGALLFDSGETAEATRLKRTARRRYTRRKNRICYLQEIFSNEMAKVDDSFFHRLEESFLVEEDKKHERHPIFGNIVDEVAYHEKYPTIYHLRKKLVDSTDKADLRLIYLALAHMIKFRGHFLIEGDLNPDNSDVDKLFIQLVQTYNQLFEENPINASGVDAKAILSARLSKSRRLENLIAQLPGEKKNGLFGNLIALSLGLTPNFKSNFDLAEDAKLQLSKDTYDDDLDNLLAQIGDQYADLFLAAKNLSDAILLSDILRVNTEITKAPLSASMIKRYDEHHQDLTLLKALVRQQLPEKYKEIFFDQSKNGYAGYIDGGASQEEFYKFIKPILEKMDGTEELLVKLNREDLLRKQRTFDNGSIPHQIHLGELHAILRRQEDFYPFLKDNREKIEKILTFRIPYYVGPLARGNSRFAWMTRKSEETITPWNFEEVVDKGASAQSFIERMTNFDKNLPNEKVLPKHSLLYEYFTVYNELTKVKYVTEGMRKPAFLSGEQKKAIVDLLFKTNRKVTVKQLKEDYFKKIECFDSVEISGVEDRFNASLGTYHDLLKIIKDKDFLDNEENEDILEDIVLTLTLFEDREMIEERLKTYAHLFDDKVMKQLKRRRYTGWGRLSRKLINGIRDKQSGKTILDFLKSDGFANRNFMQLIHDDSLTFKEDIQKAQVSGQGDSLHEHIANLAGSPAIKKGILQTVKVVDELVKVMGRHKPENIVIEMARENQTTQKGQKNSRERMKRIEEGIKELGSQILKEHPVENTQLQNEKLYLYYLQNGRDMYVDQELDINRLSDYDVDHIVPQSFLKDDSIDNKVLTRSDKARGKSDNVPSEEVVKKMKNYWRQLLNAKLITQRKFDNLTKAERGGLSELDKAGFIKRQLVETRQITKHVAQILDSRMNTKYDENDKLIREVKVITLKSKLVSDFRKDFQFYKVREINNYHHAHDAYLNAVVGTALIKKYPKLESEFVYGDYKVYDVRKMIAKSEQEIGKATAKYFFYSNIMNFFKTEITLANGEIRKRPLIETNGETGEIVWDKGRDFATVRKVLSMPQVNIVKKTEVQTGGFSKESILPKRNSDKLIARKKDWDPKKYGGFDSPTVAYSVLVVAKVEKGKSKKLKSVKELLGITIMERSSFEKNPIDFLEAKGYKEVKKDLIIKLPKYSLFELENGRKRMLASAGELQKGNELALPSKYVNFLYLASHYEKLKGSPEDNEQKQLFVEQHKHYLDEIIEQISEFSKRVILADANLDKVLSAYNKHRDKPIREQAENIIHLFTLTNLGAPAAFKYFDTTIDRKRYTSTKEVLDATLIHQSITGLYETRIDLSQLGGDGGGGSGGSGGSGGSGGSGGTLNIEDEYRLHETSKGPDVPLGSTWLSDFPQAWAETGGMGLAFRQAPLIISLKATSTPVSIKQYPMSQEARLGIKPHIQRLLDQGILVPCQSPWNTPLLPVKKPGTNDYRPVQDLREVNKRVEDIHPTVPNPYNLLSGLPPSHQWYTVLDLKDAFFCLRLHPTSQSLFAFEWKDPEMGISGQLTWTRLPQGFKNSPTLFDEALHRDLADFRIQHPDLILLQYVDDLLLAATSELDCQQGTRALLQTLGDLGYRASAKKAQICQKQVKYLGYLLKEGQRWLTEARKETVMGQPTPKTPRQLREFLGTAGLCRLWIPGFAEMAAPLYPLTKTGTLFKWGPDQQKAYQEIKQALLTAPALGLPDLTKPFELFVDEKQGYAKGVLTQKLGPWRRPVAYLSKKLDPVAAGWPPCLRMVAAIAVLTKDVGKLTMGQPLVILAPHAVEALVKQPPDRWLSNARMTHYQALLLDTDRVQFGPIVALNPATLLPLPEEGLQHDCLDILAEAHGTRPDLTDQPLPDADHTWYTDGSSFLQEGQRRAGAAVTTETEVIWAKALPAGTSAQRAELIALTQALKMAAGKKLNVYTDSRYAFATAHIHGEIYRRRGLLTSEGKEIKNKDEILALLKALFLPKRLSIIHCPGHQKGNHAEARGNRMADQAAREVATRETPETSTLLAGKRTADGSEFEKRTADGSEFESPKKKAKVE

SEQ ID NO: 2418 - protein, 2096 aa, synthetic construct
MPAAKRVKLDGGDKKYSIGLDIGTNSVGWAVITDEYKVPSKKFKVLGNTDRHSIKKNLIGALLFDSGETAEATRLKRTARRRYTRRKNRICYLQEIFSNEMAKVDDSFFHRLEESFLVEEDKKHERHPIFGNIVDEVAYHEKYPTIYHLRKKLVDSTDKADLRLIYLALAHMIKFRGHFLIEGDLNPDNSDVDKLFIQLVQTYNQLFEENPINASGVDAKAILSARLSKSRRLENLIAQLPGEKKNGLFGNLIALSLGLTPNFKSNFDLAEDAKLQLSKDTYDDDLDNLLAQIGDQYADLFLAAKNLSDAILLSDILRVNTEITKAPLSASMIKRYDEHHQDLTLLKALVRQQLPEKYKEIFFDQSKNGYAGYIDGGASQEEFYKFIKPILEKMDGTEELLVKLNREDLLRKQRTFDNGSIPHQIHLGELHAILRRQEDFYPFLKDNREKIEKILTFRIPYYVGPLARGNSRFAWMTRKSEETITPWNFEEVVDKGASAQSFIERMTNFDKNLPNEKVLPKHSLLYEYFTVYNELTKVKYVTEGMRKPAFLSGEQKKAIVDLLFKTNRKVTVKQLKEDYFKKIECFDSVEISGVEDRFNASLGTYHDLLKIIKDKDFLDNEENEDILEDIVLTLTLFEDREMIEERLKTYAHLFDDKVMKQLKRRRYTGWGRLSRKLINGIRDKQSGKTILDFLKSDGFANRNFMQLIHDDSLTFKEDIQKAQVSGQGDSLHEHIANLAGSPAIKKGILQTVKVVDELVKVMGRHKPENIVIEMARENQTTQKGQKNSRERMKRIEEGIKELGSQILKEHPVENTQLQNEKLYLYYLQNGRDMYVDQELDINRLSDYDVDHIVPQSFLKDDSIDNKVLTRSDKARGKSDNVPSEEVVKKMKNYWRQLLNAKLITQRKFDNLTKAERGGLSELDKAGFIKRQLVETRQITKHVAQILDSRMNTKYDENDKLIREVKVITLKSKLVSDFRKDFQFYKVREINNYHHAHDAYLNAVVGTALIKKYPKLESEFVYGDYKVYDVRKMIAKSEQEIGKATAKYFFYSNIMNFFKTEITLANGEIRKRPLIETNGETGEIVWDKGRDFATVRKVLSMPQVNIVKKTEVQTGGFSKESILPKRNSDKLIARKKDWDPKKYGGFDSPTVAYSVLVVAKVEKGKSKKLKSVKELLGITIMERSSFEKNPIDFLEAKGYKEVKKDLIIKLPKYSLFELENGRKRMLASAGELQKGNELALPSKYVNFLYLASHYEKLKGSPEDNEQKQLFVEQHKHYLDEIIEQISEFSKRVILADANLDKVLSAYNKHRDKPIREQAENIIHLFTLTNLGAPAAFKYFDTTIDRKRYTSTKEVLDATLIHQSITGLYETRIDLSQLGGDGGEAAAKGGGPAPGGTLNIEDEYRLHETSKGPDVPLGSTWLSDFPQAWAETGGMGLAFRQAPLIISLKATSTPVSIKQYPMSQEARLGIKPHIQRLLDQGILVPCQSPWNTPLLPVKKPGTNDYRPVQDLREVNKRVEDIHPTVPNPYNLLSGLPPSHQWYTVLDLKDAFFCLRLHPTSQSLFAFEWKDPEMGISGQLTWTRLPQGFKNSPTLFDEALHRDLADFRIQHPDLILLQYVDDLLLAATSELDCQQGTRALLQTLGDLGYRASAKKAQICQKQVKYLGYLLKEGQRWLTEARKETVMGQPTPKTPRQLREFLGTAGLCRLWIPGFAEMAAPLYPLTKTGTLFKWGPDQQKAYQEIKQALLTAPALGLPDLTKPFELFVDEKQGYAKGVLTQKLGPWRRPVAYLSKKLDPVAAGWPPCLRMVAAIAVLTKDVGKLTMGQPLVILAPHAVEALVKQPPDRWLSNARMTHYQALLLDTDRVQFGPIVALNPATLLPLPEEGLQHDCLDILAEAHGTRPDLTDQPLPDADHTWYTDGSSFLQEGQRRAGAAVTTETEVIWAKALPAGTSAQRAELIALTQALKMAAGKKLNVYTDSRYAFATAHIHGEIYRRRGLLTSEGKEIKNKDEILALLKALFLPKRLSIIHCPGHQKGNHAEARGNRMADQAAREVATRETPETSTLLAGKRTADGSEFEKRTADGSEFESPKKKAKVE

SEQ ID NO: 2419 - protein, 2094 aa, synthetic construct
MPAAKRVKLDGGDKKYSIGLDIGTNSVGWAVITDEYKVPSKKFKVLGNTDRHSIKKNLIGALLFDSGETAEATRLKRTARRRYTRRKNRICYLQEIFSNEMAKVDDSFFHRLEESFLVEEDKKHERHPIFGNIVDEVAYHEKYPTIYHLRKKLVDSTDKADLRLIYLALAHMIKFRGHFLIEGDLNPDNSDVDKLFIQLVQTYNQLFEENPINASGVDAKAILSARLSKSRRLENLIAQLPGEKKNGLFGNLIALSLGLTPNFKSNFDLAEDAKLQLSKDTYDDDLDNLLAQIGDQYADLFLAAKNLSDAILLSDILRVNTEITKAPLSASMIKRYDEHHQDLTLLKALVRQQLPEKYKEIFFDQSKNGYAGYIDGGASQEEFYKFIKPILEKMDGTEELLVKLNREDLLRKQRTFDNGSIPHQIHLGELHAILRRQEDFYPFLKDNREKIEKILTFRIPYYVGPLARGNSRFAWMTRKSEETITPWNFEEVVDKGASAQSFIERMTNFDKNLPNEKVLPKHSLLYEYFTVYNELTKVKYVTEGMRKPAFLSGEQKKAIVDLLFKTNRKVTVKQLKEDYFKKIECFDSVEISGVEDRFNASLGTYHDLLKIIKDKDFLDNEENEDILEDIVLTLTLFEDREMIEERLKTYAHLFDDKVMKQLKRRRYTGWGRLSRKLINGIRDKQSGKTILDFLKSDGFANRNFMQLIHDDSLTFKEDIQKAQVSGQGDSLHEHIANLAGSPAIKKGILQTVKVVDELVKVMGRHKPENIVIEMARENQTTQKGQKNSRERMKRIEEGIKELGSQILKEHPVENTQLQNEKLYLYYLQNGRDMYVDQELDINRLSDYDVDHIVPQSFLKDDSIDNKVLTRSDKARGKSDNVPSEEVVKKMKNYWRQLLNAKLITQRKFDNLTKAERGGLSELDKAGFIKRQLVETRQITKHVAQILDSRMNTKYDENDKLIREVKVITLKSKLVSDFRKDFQFYKVREINNYHHAHDAYLNAVVGTALIKKYPKLESEFVYGDYKVYDVRKMIAKSEQEIGKATAKYFFYSNIMNFFKTEITLANGEIRKRPLIETNGETGEIVWDKGRDFATVRKVLSMPQVNIVKKTEVQTGGFSKESILPKRNSDKLIARKKDWDPKKYGGFDSPTVAYSVLVVAKVEKGKSKKLKSVKELLGITIMERSSFEKNPIDFLEAKGYKEVKKDLIIKLPKYSLFELENGRKRMLASAGELQKGNELALPSKYVNFLYLASHYEKLKGSPEDNEQKQLFVEQHKHYLDEIIEQISEFSKRVILADANLDKVLSAYNKHRDKPIREQAENIIHLFTLTNLGAPAAFKYFDTTIDRKRYTSTKEVLDATLIHQSITGLYETRIDLSQLGGDGGGSSGGSGGGGGTLNIEDEYRLHETSKGPDVPLGSTWLSDFPQAWAETGGMGLAFRQAPLIISLKATSTPVSIKQYPMSQEARLGIKPHIQRLLDQGILVPCQSPWNTPLLPVKKPGTNDYRPVQDLREVNKRVEDIHPTVPNPYNLLSGLPPSHQWYTVLDLKDAFFCLRLHPTSQSLFAFEWKDPEMGISGQLTWTRLPQGFKNSPTLFDEALHRDLADFRIQHPDLILLQYVDDLLLAATSELDCQQGTRALLQTLGDLGYRASAKKAQICQKQVKYLGYLLKEGQRWLTEARKETVMGQPTPKTPRQLREFLGTAGLCRLWIPGFAEMAAPLYPLTKTGTLFKWGPDQQKAYQEIKQALLTAPALGLPDLTKPFELFVDEKQGYAKGVLTQKLGPWRRPVAYLSKKLDPVAAGWPPCLRMVAAIAVLTKDVGKLTMGQPLVILAPHAVEALVKQPPDRWLSNARMTHYQALLLDTDRVQFGPIVALNPATLLPLPEEGLQHDCLDILAEAHGTRPDLTDQPLPDADHTWYTDGSSFLQEGQRRAGAAVTTETEVIWAKALPAGTSAQRAELIALTQALKMAAGKKLNVYTDSRYAFATAHIHGEIYRRRGLLTSEGKEIKNKDEILALLKALFLPKRLSIIHCPGHQKGNHAEARGNRMADQAAREVATRETPETSTLLAGKRTADGSEFEKRTADGSEFESPKKKAKVE

SEQ ID NO: 2420 - protein, 2096 aa, synthetic construct
MPAAKRVKLDGGDKKYSIGLDIGTNSVGWAVITDEYKVPSKKFKVLGNTDRHSIKKNLIGALLFDSGETAEATRLKRTARRRYTRRKNRICYLQEIFSNEMAKVDDSFFHRLEESFLVEEDKKHERHPIFGNIVDEVAYHEKYPTIYHLRKKLVDSTDKADLRLIYLALAHMIKFRGHFLIEGDLNPDNSDVDKLFIQLVQTYNQLFEENPINASGVDAKAILSARLSKSRRLENLIAQLPGEKKNGLFGNLIALSLGLTPNFKSNFDLAEDAKLQLSKDTYDDDLDNLLAQIGDQYADLFLAAKNLSDAILLSDILRVNTEITKAPLSASMIKRYDEHHQDLTLLKALVRQQLPEKYKEIFFDQSKNGYAGYIDGGASQEEFYKFIKPILEKMDGTEELLVKLNREDLLRKQRTFDNGSIPHQIHLGELHAILRRQEDFYPFLKDNREKIEKILTFRIPYYVGPLARGNSRFAWMTRKSEETITPWNFEEVVDKGASAQSFIERMTNFDKNLPNEKVLPKHSLLYEYFTVYNELTKVKYVTEGMRKPAFLSGEQKKAIVDLLFKTNRKVTVKQLKEDYFKKIECFDSVEISGVEDRFNASLGTYHDLLKIIKDKDFLDNEENEDILEDIVLTLTLFEDREMIEERLKTYAHLFDDKVMKQLKRRRYTGWGRLSRKLINGIRDKQSGKTILDFLKSDGFANRNFMQLIHDDSLTFKEDIQKAQVSGQGDSLHEHIANLAGSPAIKKGILQTVKVVDELVKVMGRHKPENIVIEMARENQTTQKGQKNSRERMKRIEEGIKELGSQILKEHPVENTQLQNEKLYLYYLQNGRDMYVDQELDINRLSDYDVDHIVPQSFLKDDSIDNKVLTRSDKARGKSDNVPSEEVVKKMKNYWRQLLNAKLITQRKFDNLTKAERGGLSELDKAGFIKRQLVETRQITKHVAQILDSRMNTKYDENDKLIREVKVITLKSKLVSDFRKDFQFYKVREINNYHHAHDAYLNAVVGTALIKKYPKLESEFVYGDYKVYDVRKMIAKSEQEIGKATAKYFFYSNIMNFFKTEITLANGEIRKRPLIETNGETGEIVWDKGRDFATVRKVLSMPQVNIVKKTEVQTGGFSKESILPKRNSDKLIARKKDWDPKKYGGFDSPTVAYSVLVVAKVEKGKSKKLKSVKELLGITIMERSSFEKNPIDFLEAKGYKEVKKDLIIKLPKYSLFELENGRKRMLASAGELQKGNELALPSKYVNFLYLASHYEKLKGSPEDNEQKQLFVEQHKHYLDEIIEQISEFSKRVILADANLDKVLSAYNKHRDKPIREQAENIIHLFTLTNLGAPAAFKYFDTTIDRKRYTSTKEVLDATLIHQSITGLYETRIDLSQLGGDGGPAPEAAAKGGGGGTLNIEDEYRLHETSKGPDVPLGSTWLSDFPQAWAETGGMGLAFRQAPLIISLKATSTPVSIKQYPMSQEARLGIKPHIQRLLDQGILVPCQSPWNTPLLPVKKPGTNDYRPVQDLREVNKRVEDIHPTVPNPYNLLSGLPPSHQWYTVLDLKDAFFCLRLHPTSQSLFAFEWKDPEMGISGQLTWTRLPQGFKNSPTLFDEALHRDLADFRIQHPDLILLQYVDDLLLAATSELDCQQGTRALLQTLGDLGYRASAKKAQICQKQVKYLGYLLKEGQRWLTEARKETVMGQPTPKTPRQLREFLGTAGLCRLWIPGFAEMAAPLYPLTKTGTLFKWGPDQQKAYQEIKQALLTAPALGLPDLTKPFELFVDEKQGYAKGVLTQKLGPWRRPVAYLSKKLDPVAAGWPPCLRMVAAIAVLTKDVGKLTMGQPLVILAPHAVEALVKQPPDRWLSNARMTHYQALLLDTDRVQFGPIVALNPATLLPLPEEGLQHDCLDILAEAHGTRPDLTDQPLPDADHTWYTDGSSFLQEGQRRAGAAVTTETEVIWAKALPAGTSAQRAELIALTQALKMAAGKKLNVYTDSRYAFATAHIHGEIYRRRGLLTSEGKEIKNKDEILALLKALFLPKRLSIIHCPGHQKGNHAEARGNRMADQAAREVATRETPETSTLLAGKRTADGSEFEKRTADGSEFESPKKKAKVE

SEQ ID NO: 2421 - protein, 2008 aa, synthetic construct
MPAAKRVKLDGGDKKYSIGLDIGTNSVGWAVITDEYKVPSKKFKVLGNTDRHSIKKNLIGALLFDSGETAEATRLKRTARRRYTRRKNRICYLQEIFSNEMAKVDDSFFHRLEESFLVEEDKKHERHPIFGNIVDEVAYHEKYPTIYHLRKKLVDSTDKADLRLIYLALAHMIKFRGHFLIEGDLNPDNSDVDKLFIQLVQTYNQLFEENPINASGVDAKAILSARLSKSRRLENLIAQLPGEKKNGLFGNLIALSLGLTPNFKSNFDLAEDAKLQLSKDTYDDDLDNLLAQIGDQYADLFLAAKNLSDAILLSDILRVNTEITKAPLSASMIKRYDEHHQDLTLLKALVRQQLPEKYKEIFFDQSKNGYAGYIDGGASQEEFYKFIKPILEKMDGTEELLVKLNREDLLRKQRTFDNGSIPHQIHLGELHAILRRQEDFYPFLKDNREKIEKILTFRIPYYVGPLARGNSRFAWMTRKSEETITPWNFEEVVDKGASAQSFIERMTNFDKNLPNEKVLPKHSLLYEYFTVYNELTKVKYVTEGMRKPAFLSGEQKKAIVDLLFKTNRKVTVKQLKEDYFKKIECFDSVEISGVEDRFNASLGTYHDLLKIIKDKDFLDNEENEDILEDIVLTLTLFEDREMIEERLKTYAHLFDDKVMKQLKRRRYTGWGRLSRKLINGIRDKQSGKTILDFLKSDGFANRNFMQLIHDDSLTFKEDIQKAQVSGQGDSLHEHIANLAGSPAIKKGILQTVKVVDELVKVMGRHKPENIVIEMARENQTTQKGQKNSRERMKRIEEGIKELGSQILKEHPVENTQLQNEKLYLYYLQNGRDMYVDQELDINRLSDYDVDHIVPQSFLKDDSIDNKVLTRSDKARGKSDNVPSEEVVKKMKNYWRQLLNAKLITQRKFDNLTKAERGGLSELDKAGFIKRQLVETRQITKHVAQILDSRMNTKYDENDKLIREVKVITLKSKLVSDFRKDFQFYKVREINNYHHAHDAYLNAVVGTALIKKYPKLESEFVYGDYKVYDVRKMIAKSEQEIGKATAKYFFYSNIMNFFKTEITLANGEIRKRPLIETNGETGEIVWDKGRDFATVRKVLSMPQVNIVKKTEVQTGGFSKESILPKRNSDKLIARKKDWDPKKYGGFDSPTVAYSVLVVAKVEKGKSKKLKSVKELLGITIMERSSFEKNPIDFLEAKGYKEVKKDLIIKLPKYSLFELENGRKRMLASAGELQKGNELALPSKYVNFLYLASHYEKLKGSPEDNEQKQLFVEQHKHYLDEIIEQISEFSKRVILADANLDKVLSAYNKHRDKPIREQAENIIHLFTLTNLGAPAAFKYFDTTIDRKRYTSTKEVLDATLIHQSITGLYETRIDLSQLGGDGGGGSGGSGGSGGSGGSGGSGGGVLDAPPSHIGLEHLPPPPEVPQFPLNLERLQALQDLVHRSLEAGYISPWDGPGNNPVFPVRKPNGAWRFVHDLRVTNALTKPIPALSPGPPDLTAIPTHLPHIICLDLKDAFFQIPVEDRFRSYFAFTLPTPGGLQPHRRFAWRVLPQGFINSPALFERALQEPLRQVSAAFSQSLLVSYMDDILYVSPTEEQRLQCYQTMAAHLRDLGFQVASEKTRQTPSPVPFLGQMVHERMVTYQSLPTLQISSPISLHQLQTVLGDLQWVSRGTPTTRRPLQLLYSSLKGIDDPRAIIHLSPEQQQGIAELRQALSHNARSRYNEQEPLLAYVHLTRAGSTLVLFQKGAQFPLAYFQTPLTDNQASPWGLLLLLGCQYLQAQALSSYAKTILKYYHNLPKTSLDNWIQSSEDPRVQELLQLWPQISSQGIQPPGPWKTLVTRAEVFLTPQFSPEPIPAALCLFSDGAARRGAYCLWKDHLLDFQAVPAPESAQKGELAGLLAGLAAAPPEPLNIWVDSKYLYSLLRTLVLGAWLQPDPVPSYALLYKSLLRHPAIFVGHVRSHSSASHPIASLNNYVDQLAGKRTADGSEFEKRTADGSEFESPKKKAKVE

SEQ ID NO: 2422 - protein, 2093 aa, synthetic construct
MPAAKRVKLDGGDKKYSIGLDIGTNSVGWAVITDEYKVPSKKFKVLGNTDRHSIKKNLIGALLFDSGETAEATRLKRTARRRYTRRKNRICYLQEIFSNEMAKVDDSFFHRLEESFLVEEDKKHERHPIFGNIVDEVAYHEKYPTIYHLRKKLVDSTDKADLRLIYLALAHMIKFRGHFLIEGDLNPDNSDVDKLFIQLVQTYNQLFEENPINASGVDAKAILSARLSKSRRLENLIAQLPGEKKNGLFGNLIALSLGLTPNFKSNFDLAEDAKLQLSKDTYDDDLDNLLAQIGDQYADLFLAAKNLSDAILLSDILRVNTEITKAPLSASMIKRYDEHHQDLTLLKALVRQQLPEKYKEIFFDQSKNGYAGYIDGGASQEEFYKFIKPILEKMDGTEELLVKLNREDLLRKQRTFDNGSIPHQIHLGELHAILRRQEDFYPFLKDNREKIEKILTFRIPYYVGPLARGNSRFAWMTRKSEETITPWNFEEVVDKGASAQSFIERMTNFDKNLPNEKVLPKHSLLYEYFTVYNELTKVKYVTEGMRKPAFLSGEQKKAIVDLLFKTNRKVTVKQLKEDYFKKIECFDSVEISGVEDRFNASLGTYHDLLKIIKDKDFLDNEENEDILEDIVLTLTLFEDREMIEERLKTYAHLFDDKVMKQLKRRRYTGWGRLSRKLINGIRDKQSGKTILDFLKSDGFANRNFMQLIHDDSLTFKEDIQKAQVSGQGDSLHEHIANLAGSPAIKKGILQTVKVVDELVKVMGRHKPENIVIEMARENQTTQKGQKNSRERMKRIEEGIKELGSQILKEHPVENTQLQNEKLYLYYLQNGRDMYVDQELDINRLSDYDVDHIVPQSFLKDDSIDNKVLTRSDKARGKSDNVPSEEVVKKMKNYWRQLLNAKLITQRKFDNLTKAERGGLSELDKAGFIKRQLVETRQITKHVAQILDSRMNTKYDENDKLIREVKVITLKSKLVSDFRKDFQFYKVREINNYHHAHDAYLNAVVGTALIKKYPKLESEFVYGDYKVYDVRKMIAKSEQEIGKATAKYFFYSNIMNFFKTEITLANGEIRKRPLIETNGETGEIVWDKGRDFATVRKVLSMPQVNIVKKTEVQTGGFSKESILPKRNSDKLIARKKDWDPKKYGGFDSPTVAYSVLVVAKVEKGKSKKLKSVKELLGITIMERSSFEKNPIDFLEAKGYKEVKKDLIIKLPKYSLFELENGRKRMLASAGELQKGNELALPSKYVNFLYLASHYEKLKGSPEDNEQKQLFVEQHKHYLDEIIEQISEFSKRVILADANLDKVLSAYNKHRDKPIREQAENIIHLFTLTNLGAPAAFKYFDTTIDRKRYTSTKEVLDATLIHQSITGLYETRIDLSQLGGDGGEAAAKPAPGGTLNIEDEYRLHETSKGPDVPLGSTWLSDFPQAWAETGGMGLAFRQAPLIISLKATSTPVSIKQYPMSQEARLGIKPHIQRLLDQGILVPCQSPWNTPLLPVKKPGTNDYRPVQDLREVNKRVEDIHPTVPNPYNLLSGLPPSHQWYTVLDLKDAFFCLRLHPTSQSLFAFEWKDPEMGISGQLTWTRLPQGFKNSPTLFNEALHRDLADFRIQHPDLILLQYVDDLLLAATSELDCQQGTRALLQTLGDLGYRASAKKAQICQKQVKYLGYLLKEGQRWLTEARKETVMGQPTPKTPRQLREFLGTAGLCRLWIPGFAEMAAPLYPLTKPGTLFKWGPDQQKAYQEIKQALLTAPALGLPDLTKPFELFVDEKQGYAKGVLTQKLGPWRRPVAYLSKKLDPVAAGWPPCLRMVAAIAVLTKDVGKLTMGQPLVILAPHAVEALVKQPPDRWLSNARMTHYQALLLDTDRVQFGPIVALNPATLLPLPEEGLQHDCLDILAEAHGTRPDLTDQPLPDADHTWYTDGSSFLQEGQRRAGAAVTTETEVIWAKALPAGTSAQRAELIALTQALKMAAGKKLNVYTDSRYAFATAHIHGEIYRRRGWLTSEGKEIKNKDEILALLKALFLPKRLSIIHCPGHQKGNHAEARGNRMADQAAREVATRETPETSTLLAGKRTADGSEFEKRTADGSEFESPKKKAKVE

SEQ ID NO: 2423 - protein, 2096 aa, synthetic construct
MPAAKRVKLDGGDKKYSIGLDIGTNSVGWAVITDEYKVPSKKFKVLGNTDRHSIKKNLIGALLFDSGETAEATRLKRTARRRYTRRKNRICYLQEIFSNEMAKVDDSFFHRLEESFLVEEDKKHERHPIFGNIVDEVAYHEKYPTIYHLRKKLVDSTDKADLRLIYLALAHMIKFRGHFLIEGDLNPDNSDVDKLFIQLVQTYNQLFEENPINASGVDAKAILSARLSKSRRLENLIAQLPGEKKNGLFGNLIALSLGLTPNFKSNFDLAEDAKLQLSKDTYDDDLDNLLAQIGDQYADLFLAAKNLSDAILLSDILRVNTEITKAPLSASMIKRYDEHHQDLTLLKALVRQQLPEKYKEIFFDQSKNGYAGYIDGGASQEEFYKFIKPILEKMDGTEELLVKLNREDLLRKQRTFDNGSIPHQIHLGELHAILRRQEDFYPFLKDNREKIEKILTFRIPYYVGPLARGNSRFAWMTRKSEETITPWNFEEVVDKGASAQSFIERMTNFDKNLPNEKVLPKHSLLYEYFTVYNELTKVKYVTEGMRKPAFLSGEQKKAIVDLLFKTNRKVTVKQLKEDYFKKIECFDSVEISGVEDRFNASLGTYHDLLKIIKDKDFLDNEENEDILEDIVLTLTLFEDREMIEERLKTYAHLFDDKVMKQLKRRRYTGWGRLSRKLINGIRDKQSGKTILDFLKSDGFANRNFMQLIHDDSLTFKEDIQKAQVSGQGDSLHEHIANLAGSPAIKKGILQTVKVVDELVKVMGRHKPENIVIEMARENQTTQKGQKNSRERMKRIEEGIKELGSQILKEHPVENTQLQNEKLYLYYLQNGRDMYVDQELDINRLSDYDVDHIVPQSFLKDDSIDNKVLTRSDKARGKSDNVPSEEVVKKMKNYWRQLLNAKLITQRKFDNLTKAERGGLSELDKAGFIKRQLVETRQITKHVAQILDSRMNTKYDENDKLIREVKVITLKSKLVSDFRKDFQFYKVREINNYHHAHDAYLNAVVGTALIKKYPKLESEFVYGDYKVYDVRKMIAKSEQEIGKATAKYFFYSNIMNFFKTEITLANGEIRKRPLIETNGETGEIVWDKGRDFATVRKVLSMPQVNIVKKTEVQTGGFSKESILPKRNSDKLIARKKDWDPKKYGGFDSPTVAYSVLVVAKVEKGKSKKLKSVKELLGITIMERSSFEKNPIDFLEAKGYKEVKKDLIIKLPKYSLFELENGRKRMLASAGELQKGNELALPSKYVNFLYLASHYEKLKGSPEDNEQKQLFVEQHKHYLDEIIEQISEFSKRVILADANLDKVLSAYNKHRDKPIREQAENIIHLFTLTNLGAPAAFKYFDTTIDRKRYTSTKEVLDATLIHQSITGLYETRIDLSQLGGDGGPAPAPAPAPAPGGTLNIEDEYRLHETSKGPDVPLGSTWLSDFPQAWAETGGMGLAFRQAPLIISLKATSTPVSIKQYPMSQEARLGIKPHIQRLLDQGILVPCQSPWNTPLLPVKKPGTNDYRPVQDLREVNKRVEDIHPTVPNPYNLLSGLPPSHQWYTVLDLKDAFFCLRLHPTSQSLFAFEWKDPEMGISGQLTWTRLPQGFKNSPTLFNEALHRDLADFRIQHPDLILLQYVDDLLLAATSELDCQQGTRALLQTLGDLGYRASAKKAQICQKQVKYLGYLLKEGQRWLTEARKETVMGQPTPKTPRQLREFLGTAGLCRLWIPGFAEMAAPLYPLTKPGTLFKWGPDQQKAYQEIKQALLTAPALGLPDLTKPFELFVDEKQGYAKGVLTQKLGPWRRPVAYLSKKLDPVAAGWPPCLRMVAAIAVLTKDVGKLTMGQPLVILAPHAVEALVKQPPDRWLSNARMTHYQALLLDTDRVQFGPIVALNPATLLPLPEEGLQHDCLDILAEAHGTRPDLTDQPLPDADHTWYTDGSSFLQEGQRRAGAAVTTETEVIWAKALPAGTSAQRAELIALTQALKMAAGKKLNVYTDSRYAFATAHIHGEIYRRRGWLTSEGKEIKNKDEILALLKALFLPKRLSIIHCPGHQKGNHAEARGNRMADQAAREVATRETPETSTLLAGKRTADGSEFEKRTADGSEFESPKKKAKVE

SEQ ID NO: 2424 - protein, 2089 aa, synthetic construct
MPAAKRVKLDGGDKKYSIGLDIGTNSVGWAVITDEYKVPSKKFKVLGNTDRHSIKKNLIGALLFDSGETAEATRLKRTARRRYTRRKNRICYLQEIFSNEMAKVDDSFFHRLEESFLVEEDKKHERHPIFGNIVDEVAYHEKYPTIYHLRKKLVDSTDKADLRLIYLALAHMIKFRGHFLIEGDLNPDNSDVDKLFIQLVQTYNQLFEENPINASGVDAKAILSARLSKSRRLENLIAQLPGEKKNGLFGNLIALSLGLTPNFKSNFDLAEDAKLQLSKDTYDDDLDNLLAQIGDQYADLFLAAKNLSDAILLSDILRVNTEITKAPLSASMIKRYDEHHQDLTLLKALVRQQLPEKYKEIFFDQSKNGYAGYIDGGASQEEFYKFIKPILEKMDGTEELLVKLNREDLLRKQRTFDNGSIPHQIHLGELHAILRRQEDFYPFLKDNREKIEKILTFRIPYYVGPLARGNSRFAWMTRKSEETITPWNFEEVVDKGASAQSFIERMTNFDKNLPNEKVLPKHSLLYEYFTVYNELTKVKYVTEGMRKPAFLSGEQKKAIVDLLFKTNRKVTVKQLKEDYFKKIECFDSVEISGVEDRFNASLGTYHDLLKIIKDKDFLDNEENEDILEDIVLTLTLFEDREMIEERLKTYAHLFDDKVMKQLKRRRYTGWGRLSRKLINGIRDKQSGKTILDFLKSDGFANRNFMQLIHDDSLTFKEDIQKAQVSGQGDSLHEHIANLAGSPAIKKGILQTVKVVDELVKVMGRHKPENIVIEMARENQTTQKGQKNSRERMKRIEEGIKELGSQILKEHPVENTQLQNEKLYLYYLQNGRDMYVDQELDINRLSDYDVDHIVPQSFLKDDSIDNKVLTRSDKARGKSDNVPSEEVVKKMKNYWRQLLNAKLITQRKFDNLTKAERGGLSELDKAGFIKRQLVETRQITKHVAQILDSRMNTKYDENDKLIREVKVITLKSKLVSDFRKDFQFYKVREINNYHHAHDAYLNAVVGTALIKKYPKLESEFVYGDYKVYDVRKMIAKSEQEIGKATAKYFFYSNIMNFFKTEITLANGEIRKRPLIETNGETGEIVWDKGRDFATVRKVLSMPQVNIVKKTEVQTGGFSKESILPKRNSDKLIARKKDWDPKKYGGFDSPTVAYSVLVVAKVEKGKSKKLKSVKELLGITIMERSSFEKNPIDFLEAKGYKEVKKDLIIKLPKYSLFELENGRKRMLASAGELQKGNELALPSKYVNFLYLASHYEKLKGSPEDNEQKQLFVEQHKHYLDEIIEQISEFSKRVILADANLDKVLSAYNKHRDKPIREQAENIIHLFTLTNLGAPAAFKYFDTTIDRKRYTSTKEVLDATLIHQSITGLYETRIDLSQLGGDGGGGGGGGTLNIEDEYRLHETSKGPDVPLGSTWLSDFPQAWAETGGMGLAFRQAPLIISLKATSTPVSIKQYPMSQEARLGIKPHIQRLLDQGILVPCQSPWNTPLLPVKKPGTNDYRPVQDLREVNKRVEDIHPTVPNPYNLLSGLPPSHQWYTVLDLKDAFFCLRLHPTSQSLFAFEWKDPEMGISGQLTWTRLPQGFKNSPTLFNEALHRDLADFRIQHPDLILLQYVDDLLLAATSELDCQQGTRALLQTLGDLGYRASAKKAQICQKQVKYLGYLLKEGQRWLTEARKETVMGQPTPKTPRQLREFLGTAGLCRLWIPGFAEMAAPLYPLTKPGTLFKWGPDQQKAYQEIKQALLTAPALGLPDLTKPFELFVDEKQGYAKGVLTQKLGPWRRPVAYLSKKLDPVAAGWPPCLRMVAAIAVLTKDVGKLTMGQPLVILAPHAVEALVKQPPDRWLSNARMTHYQALLLDTDRVQFGPIVALNPATLLPLPEEGLQHDCLDILAEAHGTRPDLTDQPLPDADHTWYTDGSSFLQEGQRRAGAAVTTETEVIWAKALPAGTSAQRAELIALTQALKMAAGKKLNVYTDSRYAFATAHIHGEIYRRRGWLTSEGKEIKNKDEILALLKALFLPKRLSIIHCPGHQKGNHAEARGNRMADQAAREVATRETPETSTLLAGKRTADGSEFEKRTADGSEFESPKKKAKVE

SEQ ID NO: 2425 - protein, 2094 aa, synthetic construct
MPAAKRVKLDGGDKKYSIGLDIGTNSVGWAVITDEYKVPSKKFKVLGNTDRHSIKKNLIGALLFDSGETAEATRLKRTARRRYTRRKNRICYLQEIFSNEMAKVDDSFFHRLEESFLVEEDKKHERHPIFGNIVDEVAYHEKYPTIYHLRKKLVDSTDKADLRLIYLALAHMIKFRGHFLIEGDLNPDNSDVDKLFIQLVQTYNQLFEENPINASGVDAKAILSARLSKSRRLENLIAQLPGEKKNGLFGNLIALSLGLTPNFKSNFDLAEDAKLQLSKDTYDDDLDNLLAQIGDQYADLFLAAKNLSDAILLSDILRVNTEITKAPLSASMIKRYDEHHQDLTLLKALVRQQLPEKYKEIFFDQSKNGYAGYIDGGASQEEFYKFIKPILEKMDGTEELLVKLNREDLLRKQRTFDNGSIPHQIHLGELHAILRRQEDFYPFLKDNREKIEKILTFRIPYYVGPLARGNSRFAWMTRKSEETITPWNFEEVVDKGASAQSFIERMTNFDKNLPNEKVLPKHSLLYEYFTVYNELTKVKYVTEGMRKPAFLSGEQKKAIVDLLFKTNRKVTVKQLKEDYFKKIECFDSVEISGVEDRFNASLGTYHDLLKIIKDKDFLDNEENEDILEDIVLTLTLFEDREMIEERLKTYAHLFDDKVMKQLKRRRYTGWGRLSRKLINGIRDKQSGKTILDFLKSDGFANRNFMQLIHDDSLTFKEDIQKAQVSGQGDSLHEHIANLAGSPAIKKGILQTVKVVDELVKVMGRHKPENIVIEMARENQTTQKGQKNSRERMKRIEEGIKELGSQILKEHPVENTQLQNEKLYLYYLQNGRDMYVDQELDINRLSDYDVDHIVPQSFLKDDSIDNKVLTRSDKARGKSDNVPSEEVVKKMKNYWRQLLNAKLITQRKFDNLTKAERGGLSELDKAGFIKRQLVETRQITKHVAQILDSRMNTKYDENDKLIREVKVITLKSKLVSDFRKDFQFYKVREINNYHHAHDAYLNAVVGTALIKKYPKLESEFVYGDYKVYDVRKMIAKSEQEIGKATAKYFFYSNIMNFFKTEITLANGEIRKRPLIETNGETGEIVWDKGRDFATVRKVLSMPQVNIVKKTEVQTGGFSKESILPKRNSDKLIARKKDWDPKKYGGFDSPTVAYSVLVVAKVEKGKSKKLKSVKELLGITIMERSSFEKNPIDFLEAKGYKEVKKDLIIKLPKYSLFELENGRKRMLASAGELQKGNELALPSKYVNFLYLASHYEKLKGSPEDNEQKQLFVEQHKHYLDEIIEQISEFSKRVILADANLDKVLSAYNKHRDKPIREQAENIIHLFTLTNLGAPAAFKYFDTTIDRKRYTSTKEVLDATLIHQSITGLYETRIDLSQLGGDGGGSSGGGGGSGGTLNIEDEYRLHETSKGPDVPLGSTWLSDFPQAWAETGGMGLAFRQAPLIISLKATSTPVSIKQYPMSQEARLGIKPHIQRLLDQGILVPCQSPWNTPLLPVKKPGTNDYRPVQDLREVNKRVEDIHPTVPNPYNLLSGLPPSHQWYTVLDLKDAFFCLRLHPTSQSLFAFEWKDPEMGISGQLTWTRLPQGFKNSPTLFNEALHRDLADFRIQHPDLILLQYVDDLLLAATSELDCQQGTRALLQTLGDLGYRASAKKAQICQKQVKYLGYLLKEGQRWLTEARKETVMGQPTPKTPRQLREFLGTAGLCRLWIPGFAEMAAPLYPLTKPGTLFKWGPDQQKAYQEIKQALLTAPALGLPDLTKPFELFVDEKQGYAKGVLTQKLGPWRRPVAYLSKKLDPVAAGWPPCLRMVAAIAVLTKDVGKLTMGQPLVILAPHAVEALVKQPPDRWLSNARMTHYQALLLDTDRVQFGPIVALNPATLLPLPEEGLQHDCLDILAEAHGTRPDLTDQPLPDADHTWYTDGSSFLQEGQRRAGAAVTTETEVIWAKALPAGTSAQRAELIALTQALKMAAGKKLNVYTDSRYAFATAHIHGEIYRRRGWLTSEGKEIKNKDEILALLKALFLPKRLSIIHCPGHQKGNHAEARGNRMADQAAREVATRETPETSTLLAGKRTADGSEFEKRTADGSEFESPKKKAKVE

SEQ ID NO: 2426 - protein, 2093 aa, synthetic construct
MPAAKRVKLDGGDKKYSIGLDIGTNSVGWAVITDEYKVPSKKFKVLGNTDRHSIKKNLIGALLFDSGETAEATRLKRTARRRYTRRKNRICYLQEIFSNEMAKVDDSFFHRLEESFLVEEDKKHERHPIFGNIVDEVAYHEKYPTIYHLRKKLVDSTDKADLRLIYLALAHMIKFRGHFLIEGDLNPDNSDVDKLFIQLVQTYNQLFEENPINASGVDAKAILSARLSKSRRLENLIAQLPGEKKNGLFGNLIALSLGLTPNFKSNFDLAEDAKLQLSKDTYDDDLDNLLAQIGDQYADLFLAAKNLSDAILLSDILRVNTEITKAPLSASMIKRYDEHHQDLTLLKALVRQQLPEKYKEIFFDQSKNGYAGYIDGGASQEEFYKFIKPILEKMDGTEELLVKLNREDLLRKQRTFDNGSIPHQIHLGELHAILRRQEDFYPFLKDNREKIEKILTFRIPYYVGPLARGNSRFAWMTRKSEETITPWNFEEVVDKGASAQSFIERMTNFDKNLPNEKVLPKHSLLYEYFTVYNELTKVKYVTEGMRKPAFLSGEQKKAIVDLLFKTNRKVTVKQLKEDYFKKIECFDSVEISGVEDRFNASLGTYHDLLKIIKDKDFLDNEENEDILEDIVLTLTLFEDREMIEERLKTYAHLFDDKVMKQLKRRRYTGWGRLSRKLINGIRDKQSGKTILDFLKSDGFANRNFMQLIHDDSLTFKEDIQKAQVSGQGDSLHEHIANLAGSPAIKKGILQTVKVVDELVKVMGRHKPENIVIEMARENQTTQKGQKNSRERMKRIEEGIKELGSQILKEHPVENTQLQNEKLYLYYLQNGRDMYVDQELDINRLSDYDVDHIVPQSFLKDDSIDNKVLTRSDKARGKSDNVPSEEVVKKMKNYWRQLLNAKLITQRKFDNLTKAERGGLSELDKAGFIKRQLVETRQITKHVAQILDSRMNTKYDENDKLIREVKVITLKSKLVSDFRKDFQFYKVREINNYHHAHDAYLNAVVGTALIKKYPKLESEFVYGDYKVYDVRKMIAKSEQEIGKATAKYFFYSNIMNFFKTEITLANGEIRKRPLIETNGETGEIVWDKGRDFATVRKVLSMPQVNIVKKTEVQTGGFSKESILPKRNSDKLIARKKDWDPKKYGGFDSPTVAYSVLVVAKVEKGKSKKLKSVKELLGITIMERSSFEKNPIDFLEAKGYKEVKKDLIIKLPKYSLFELENGRKRMLASAGELQKGNELALPSKYVNFLYLASHYEKLKGSPEDNEQKQLFVEQHKHYLDEIIEQISEFSKRVILADANLDKVLSAYNKHRDKPIREQAENIIHLFTLTNLGAPAAFKYFDTTIDRKRYTSTKEVLDATLIHQSITGLYETRIDLSQLGGDGGEAAAKGGSGGTLNIEDEYRLHETSKGPDVPLGSTWLSDFPQAWAETGGMGLAFRQAPLIISLKATSTPVSIKQYPMSQEARLGIKPHIQRLLDQGILVPCQSPWNTPLLPVKKPGTNDYRPVQDLREVNKRVEDIHPTVPNPYNLLSGLPPSHQWYTVLDLKDAFFCLRLHPTSQSLFAFEWKDPEMGISGQLTWTRLPQGFKNSPTLFNEALHRDLADFRIQHPDLILLQYVDDLLLAATSELDCQQGTRALLQTLGDLGYRASAKKAQICQKQVKYLGYLLKEGQRWLTEARKETVMGQPTPKTPRQLREFLGTAGLCRLWIPGFAEMAAPLYPLTKPGTLFKWGPDQQKAYQEIKQALLTAPALGLPDLTKPFELFVDEKQGYAKGVLTQKLGPWRRPVAYLSKKLDPVAAGWPPCLRMVAAIAVLTKDVGKLTMGQPLVILAPHAVEALVKQPPDRWLSNARMTHYQALLLDTDRVQFGPIVALNPATLLPLPEEGLQHDCLDILAEAHGTRPDLTDQPLPDADHTWYTDGSSFLQEGQRRAGAAVTTETEVIWAKALPAGTSAQRAELIALTQALKMAAGKKLNVYTDSRYAFATAHIHGEIYRRRGWLTSEGKEIKNKDEILALLKALFLPKRLSIIHCPGHQKGNHAEARGNRMADQAAREVATRETPETSTLLAGKRTADGSEFEKRTADGSEFESPKKKAKVE

SEQ ID NO: 2427 - protein, 2088 aa, synthetic construct
MPAAKRVKLDGGDKKYSIGLDIGTNSVGWAVITDEYKVPSKKFKVLGNTDRHSIKKNLIGALLFDSGETAEATRLKRTARRRYTRRKNRICYLQEIFSNEMAKVDDSFFHRLEESFLVEEDKKHERHPIFGNIVDEVAYHEKYPTIYHLRKKLVDSTDKADLRLIYLALAHMIKFRGHFLIEGDLNPDNSDVDKLFIQLVQTYNQLFEENPINASGVDAKAILSARLSKSRRLENLIAQLPGEKKNGLFGNLIALSLGLTPNFKSNFDLAEDAKLQLSKDTYDDDLDNLLAQIGDQYADLFLAAKNLSDAILLSDILRVNTEITKAPLSASMIKRYDEHHQDLTLLKALVRQQLPEKYKEIFFDQSKNGYAGYIDGGASQEEFYKFIKPILEKMDGTEELLVKLNREDLLRKQRTFDNGSIPHQIHLGELHAILRRQEDFYPFLKDNREKIEKILTFRIPYYVGPLARGNSRFAWMTRKSEETITPWNFEEVVDKGASAQSFIERMTNFDKNLPNEKVLPKHSLLYEYFTVYNELTKVKYVTEGMRKPAFLSGEQKKAIVDLLFKTNRKVTVKQLKEDYFKKIECFDSVEISGVEDRFNASLGTYHDLLKIIKDKDFLDNEENEDILEDIVLTLTLFEDREMIEERLKTYAHLFDDKVMKQLKRRRYTGWGRLSRKLINGIRDKQSGKTILDFLKSDGFANRNFMQLIHDDSLTFKEDIQKAQVSGQGDSLHEHIANLAGSPAIKKGILQTVKVVDELVKVMGRHKPENIVIEMARENQTTQKGQKNSRERMKRIEEGIKELGSQILKEHPVENTQLQNEKLYLYYLQNGRDMYVDQELDINRLSDYDVDHIVPQSFLKDDSIDNKVLTRSDKARGKSDNVPSEEVVKKMKNYWRQLLNAKLITQRKFDNLTKAERGGLSELDKAGFIKRQLVETRQITKHVAQILDSRMNTKYDENDKLIREVKVITLKSKLVSDFRKDFQFYKVREINNYHHAHDAYLNAVVGTALIKKYPKLESEFVYGDYKVYDVRKMIAKSEQEIGKATAKYFFYSNIMNFFKTEITLANGEIRKRPLIETNGETGEIVWDKGRDFATVRKVLSMPQVNIVKKTEVQTGGFSKESILPKRNSDKLIARKKDWDPKKYGGFDSPTVAYSVLVVAKVEKGKSKKLKSVKELLGITIMERSSFEKNPIDFLEAKGYKEVKKDLIIKLPKYSLFELENGRKRMLASAGELQKGNELALPSKYVNFLYLASHYEKLKGSPEDNEQKQLFVEQHKHYLDEIIEQISEFSKRVILADANLDKVLSAYNKHRDKPIREQAENIIHLFTLTNLGAPAAFKYFDTTIDRKRYTSTKEVLDATLIHQSITGLYETRIDLSQLGGDGGPAPGGTLNIEDEYRLHETSKGPDVPLGSTWLSDFPQAWAETGGMGLAFRQAPLIISLKATSTPVSIKQYPMSQEARLGIKPHIQRLLDQGILVPCQSPWNTPLLPVKKPGTNDYRPVQDLREVNKRVEDIHPTVPNPYNLLSGLPPSHQWYTVLDLKDAFFCLRLHPTSQSLFAFEWKDPEMGISGQLTWTRLPQGFKNSPTLFNEALHRDLADFRIQHPDLILLQYVDDLLLAATSELDCQQGTRALLQTLGDLGYRASAKKAQICQKQVKYLGYLLKEGQRWLTEARKETVMGQPTPKTPRQLREFLGTAGLCRLWIPGFAEMAAPLYPLTKPGTLFKWGPDQQKAYQEIKQALLTAPALGLPDLTKPFELFVDEKQGYAKGVLTQKLGPWRRPVAYLSKKLDPVAAGWPPCLRMVAAIAVLTKDVGKLTMGQPLVILAPHAVEALVKQPPDRWLSNARMTHYQALLLDTDRVQFGPIVALNPATLLPLPEEGLQHDCLDILAEAHGTRPDLTDQPLPDADHTWYTDGSSFLQEGQRRAGAAVTTETEVIWAKALPAGTSAQRAELIALTQALKMAAGKKLNVYTDSRYAFATAHIHGEIYRRRGWLTSEGKEIKNKDEILALLKALFLPKRLSIIHCPGHQKGNHAEARGNRMADQAAREVATRETPETSTLLAGKRTADGSEFEKRTADGSEFESPKKKAKVE

SEQ ID NO: 2428 - protein, 2096 aa, synthetic construct
MPAAKRVKLDGGDKKYSIGLDIGTNSVGWAVITDEYKVPSKKFKVLGNTDRHSIKKNLIGALLFDSGETAEATRLKRTARRRYTRRKNRICYLQEIFSNEMAKVDDSFFHRLEESFLVEEDKKHERHPIFGNIVDEVAYHEKYPTIYHLRKKLVDSTDKADLRLIYLALAHMIKFRGHFLIEGDLNPDNSDVDKLFIQLVQTYNQLFEENPINASGVDAKAILSARLSKSRRLENLIAQLPGEKKNGLFGNLIALSLGLTPNFKSNFDLAEDAKLQLSKDTYDDDLDNLLAQIGDQYADLFLAAKNLSDAILLSDILRVNTEITKAPLSASMIKRYDEHHQDLTLLKALVRQQLPEKYKEIFFDQSKNGYAGYIDGGASQEEFYKFIKPILEKMDGTEELLVKLNREDLLRKQRTFDNGSIPHQIHLGELHAILRRQEDFYPFLKDNREKIEKILTFRIPYYVGPLARGNSRFAWMTRKSEETITPWNFEEVVDKGASAQSFIERMTNFDKNLPNEKVLPKHSLLYEYFTVYNELTKVKYVTEGMRKPAFLSGEQKKAIVDLLFKTNRKVTVKQLKEDYFKKIECFDSVEISGVEDRFNASLGTYHDLLKIIKDKDFLDNEENEDILEDIVLTLTLFEDREMIEERLKTYAHLFDDKVMKQLKRRRYTGWGRLSRKLINGIRDKQSGKTILDFLKSDGFANRNFMQLIHDDSLTFKEDIQKAQVSGQGDSLHEHIANLAGSPAIKKGILQTVKVVDELVKVMGRHKPENIVIEMARENQTTQKGQKNSRERMKRIEEGIKELGSQILKEHPVENTQLQNEKLYLYYLQNGRDMYVDQELDINRLSDYDVDHIVPQSFLKDDSIDNKVLTRSDKARGKSDNVPSEEVVKKMKNYWRQLLNAKLITQRKFDNLTKAERGGLSELDKAGFIKRQLVETRQITKHVAQILDSRMNTKYDENDKLIREVKVITLKSKLVSDFRKDFQFYKVREINNYHHAHDAYLNAVVGTALIKKYPKLESEFVYGDYKVYDVRKMIAKSEQEIGKATAKYFFYSNIMNFFKTEITLANGEIRKRPLIETNGETGEIVWDKGRDFATVRKVLSMPQVNIVKKTEVQTGGFSKESILPKRNSDKLIARKKDWDPKKYGGFDSPTVAYSVLVVAKVEKGKSKKLKSVKELLGITIMERSSFEKNPIDFLEAKGYKEVKKDLIIKLPKYSLFELENGRKRMLASAGELQKGNELALPSKYVNFLYLASHYEKLKGSPEDNEQKQLFVEQHKHYLDEIIEQISEFSKRVILADANLDKVLSAYNKHRDKPIREQAENIIHLFTLTNLGAPAAFKYFDTTIDRKRYTSTKEVLDATLIHQSITGLYETRIDLSQLGGDGGPAPGSSEAAAKGGTLNIEDEYRLHETSKGPDVPLGSTWLSDFPQAWAETGGMGLAFRQAPLIISLKATSTPVSIKQYPMSQEARLGIKPHIQRLLDQGILVPCQSPWNTPLLPVKKPGTNDYRPVQDLREVNKRVEDIHPTVPNPYNLLSGLPPSHQWYTVLDLKDAFFCLRLHPTSQSLFAFEWKDPEMGISGQLTWTRLPQGFKNSPTLFNEALHRDLADFRIQHPDLILLQYVDDLLLAATSELDCQQGTRALLQTLGDLGYRASAKKAQICQKQVKYLGYLLKEGQRWLTEARKETVMGQPTPKTPRQLREFLGTAGLCRLWIPGFAEMAAPLYPLTKPGTLFKWGPDQQKAYQEIKQALLTAPALGLPDLTKPFELFVDEKQGYAKGVLTQKLGPWRRPVAYLSKKLDPVAAGWPPCLRMVAAIAVLTKDVGKLTMGQPLVILAPHAVEALVKQPPDRWLSNARMTHYQALLLDTDRVQFGPIVALNPATLLPLPEEGLQHDCLDILAEAHGTRPDLTDQPLPDADHTWYTDGSSFLQEGQRRAGAAVTTETEVIWAKALPAGTSAQRAELIALTQALKMAAGKKLNVYTDSRYAFATAHIHGEIYRRRGWLTSEGKEIKNKDEILALLKALFLPKRLSIIHCPGHQKGNHAEARGNRMADQAAREVATRETPETSTLLAGKRTADGSEFEKRTADGSEFESPKKKAKVE

SEQ ID NO: 2429 - protein, 2115 aa, synthetic construct
MPAAKRVKLDGGDKKYSIGLDIGTNSVGWAVITDEYKVPSKKFKVLGNTDRHSIKKNLIGALLFDSGETAEATRLKRTARRRYTRRKNRICYLQEIFSNEMAKVDDSFFHRLEESFLVEEDKKHERHPIFGNIVDEVAYHEKYPTIYHLRKKLVDSTDKADLRLIYLALAHMIKFRGHFLIEGDLNPDNSDVDKLFIQLVQTYNQLFEENPINASGVDAKAILSARLSKSRRLENLIAQLPGEKKNGLFGNLIALSLGLTPNFKSNFDLAEDAKLQLSKDTYDDDLDNLLAQIGDQYADLFLAAKNLSDAILLSDILRVNTEITKAPLSASMIKRYDEHHQDLTLLKALVRQQLPEKYKEIFFDQSKNGYAGYIDGGASQEEFYKFIKPILEKMDGTEELLVKLNREDLLRKQRTFDNGSIPHQIHLGELHAILRRQEDFYPFLKDNREKIEKILTFRIPYYVGPLARGNSRFAWMTRKSEETITPWNFEEVVDKGASAQSFIERMTNFDKNLPNEKVLPKHSLLYEYFTVYNELTKVKYVTEGMRKPAFLSGEQKKAIVDLLFKTNRKVTVKQLKEDYFKKIECFDSVEISGVEDRFNASLGTYHDLLKIIKDKDFLDNEENEDILEDIVLTLTLFEDREMIEERLKTYAHLFDDKVMKQLKRRRYTGWGRLSRKLINGIRDKQSGKTILDFLKSDGFANRNFMQLIHDDSLTFKEDIQKAQVSGQGDSLHEHIANLAGSPAIKKGILQTVKVVDELVKVMGRHKPENIVIEMARENQTTQKGQKNSRERMKRIEEGIKELGSQILKEHPVENTQLQNEKLYLYYLQNGRDMYVDQELDINRLSDYDVDHIVPQSFLKDDSIDNKVLTRSDKARGKSDNVPSEEVVKKMKNYWRQLLNAKLITQRKFDNLTKAERGGLSELDKAGFIKRQLVETRQITKHVAQILDSRMNTKYDENDKLIREVKVITLKSKLVSDFRKDFQFYKVREINNYHHAHDAYLNAVVGTALIKKYPKLESEFVYGDYKVYDVRKMIAKSEQEIGKATAKYFFYSNIMNFFKTEITLANGEIRKRPLIETNGETGEIVWDKGRDFATVRKVLSMPQVNIVKKTEVQTGGFSKESILPKRNSDKLIARKKDWDPKKYGGFDSPTVAYSVLVVAKVEKGKSKKLKSVKELLGITIMERSSFEKNPIDFLEAKGYKEVKKDLIIKLPKYSLFELENGRKRMLASAGELQKGNELALPSKYVNFLYLASHYEKLKGSPEDNEQKQLFVEQHKHYLDEIIEQISEFSKRVILADANLDKVLSAYNKHRDKPIREQAENIIHLFTLTNLGAPAAFKYFDTTIDRKRYTSTKEVLDATLIHQSITGLYETRIDLSQLGGDGGGGGGSGGGGSGGGGSGGGGSGGGGSGGGGSGGTLNIEDEYRLHETSKGPDVPLGSTWLSDFPQAWAETGGMGLAFRQAPLIISLKATSTPVSIKQYPMSQEARLGIKPHIQRLLDQGILVPCQSPWNTPLLPVKKPGTNDYRPVQDLREVNKRVEDIHPTVPNPYNLLSGLPPSHQWYTVLDLKDAFFCLRLHPTSQSLFAFEWKDPEMGISGQLTWTRLPQGFKNSPTLFNEALHRDLADFRIQHPDLILLQYVDDLLLAATSELDCQQGTRALLQTLGDLGYRASAKKAQICQKQVKYLGYLLKEGQRWLTEARKETVMGQPTPKTPRQLREFLGTAGLCRLWIPGFAEMAAPLYPLTKPGTLFKWGPDQQKAYQEIKQALLTAPALGLPDLTKPFELFVDEKQGYAKGVLTQKLGPWRRPVAYLSKKLDPVAAGWPPCLRMVAAIAVLTKDVGKLTMGQPLVILAPHAVEALVKQPPDRWLSNARMTHYQALLLDTDRVQFGPIVALNPATLLPLPEEGLQHDCLDILAEAHGTRPDLTDQPLPDADHTWYTDGSSFLQEGQRRAGAAVTTETEVIWAKALPAGTSAQRAELIALTQALKMAAGKKLNVYTDSRYAFATAHIHGEIYRRRGWLTSEGKEIKNKDEILALLKALFLPKRLSIIHCPGHQKGNHAEARGNRMADQAAREVATRETPETSTLLAGKRTADGSEFEKRTADGSEFESPKKKAKVE

SEQ ID NO: 2430 - protein, 2098 aa, synthetic construct
MPAAKRVKLDGGDKKYSIGLDIGTNSVGWAVITDEYKVPSKKFKVLGNTDRHSIKKNLIGALLFDSGETAEATRLKRTARRRYTRRKNRICYLQEIFSNEMAKVDDSFFHRLEESFLVEEDKKHERHPIFGNIVDEVAYHEKYPTIYHLRKKLVDSTDKADLRLIYLALAHMIKFRGHFLIEGDLNPDNSDVDKLFIQLVQTYNQLFEENPINASGVDAKAILSARLSKSRRLENLIAQLPGEKKNGLFGNLIALSLGLTPNFKSNFDLAEDAKLQLSKDTYDDDLDNLLAQIGDQYADLFLAAKNLSDAILLSDILRVNTEITKAPLSASMIKRYDEHHQDLTLLKALVRQQLPEKYKEIFFDQSKNGYAGYIDGGASQEEFYKFIKPILEKMDGTEELLVKLNREDLLRKQRTFDNGSIPHQIHLGELHAILRRQEDFYPFLKDNREKIEKILTFRIPYYVGPLARGNSRFAWMTRKSEETITPWNFEEVVDKGASAQSFIERMTNFDKNLPNEKVLPKHSLLYEYFTVYNELTKVKYVTEGMRKPAFLSGEQKKAIVDLLFKTNRKVTVKQLKEDYFKKIECFDSVEISGVEDRFNASLGTYHDLLKIIKDKDFLDNEENEDILEDIVLTLTLFEDREMIEERLKTYAHLFDDKVMKQLKRRRYTGWGRLSRKLINGIRDKQSGKTILDFLKSDGFANRNFMQLIHDDSLTFKEDIQKAQVSGQGDSLHEHIANLAGSPAIKKGILQTVKVVDELVKVMGRHKPENIVIEMARENQTTQKGQKNSRERMKRIEEGIKELGSQILKEHPVENTQLQNEKLYLYYLQNGRDMYVDQELDINRLSDYDVDHIVPQSFLKDDSIDNKVLTRSDKARGKSDNVPSEEVVKKMKNYWRQLLNAKLITQRKFDNLTKAERGGLSELDKAGFIKRQLVETRQITKHVAQILDSRMNTKYDENDKLIREVKVITLKSKLVSDFRKDFQFYKVREINNYHHAHDAYLNAVVGTALIKKYPKLESEFVYGDYKVYDVRKMIAKSEQEIGKATAKYFFYSNIMNFFKTEITLANGEIRKRPLIETNGETGEIVWDKGRDFATVRKVLSMPQVNIVKKTEVQTGGFSKESILPKRNSDKLIARKKDWDPKKYGGFDSPTVAYSVLVVAKVEKGKSKKLKSVKELLGITIMERSSFEKNPIDFLEAKGYKEVKKDLIIKLPKYSLFELENGRKRMLASAGELQKGNELALPSKYVNFLYLASHYEKLKGSPEDNEQKQLFVEQHKHYLDEIIEQISEFSKRVILADANLDKVLSAYNKHRDKPIREQAENIIHLFTLTNLGAPAAFKYFDTTIDRKRYTSTKEVLDATLIHQSITGLYETRIDLSQLGGDGGPAPAPAPAPAPAPGGTLNIEDEYRLHETSKGPDVPLGSTWLSDFPQAWAETGGMGLAFRQAPLIISLKATSTPVSIKQYPMSQEARLGIKPHIQRLLDQGILVPCQSPWNTPLLPVKKPGTNDYRPVQDLREVNKRVEDIHPTVPNPYNLLSGLPPSHQWYTVLDLKDAFFCLRLHPTSQSLFAFEWKDPEMGISGQLTWTRLPQGFKNSPTLFNEALHRDLADFRIQHPDLILLQYVDDLLLAATSELDCQQGTRALLQTLGDLGYRASAKKAQICQKQVKYLGYLLKEGQRWLTEARKETVMGQPTPKTPRQLREFLGKAGLCRLFIPGFAEMAAPLYPLTKPGTLFKWGPDQQKAYQEIKQALLTAPALGLPDLTKPFELFVDEKQGYAKGVLTQKLGPWRRPVAYLSKKLDPVAAGWPPCLRMVAAIAVLTKDVGKLTMGQPLVILAPHAVEALVKQPPDRWLSNARMTHYQALLLDTDRVQFGPIVALNPATLLPLPEEGLQHDCLDILAEAHGTRPDLTDQPLPDADHTWYTDGSSFLQEGQRRAGAAVTTETEVIWAKALPAGTSAQRAELIALTQALKMAAGKKLNVYTDSRYAFATAHIHGEIYRRRGWLTSEGKEIKNKDEILALLKALFLPKRLSIIHCPGHQKGNHAEARGNRMADQAAREVATRETPETSTLLAGKRTADGSEFEKRTADGSEFESPKKKAKVE

SEQ ID NO: 2431 - protein, 2096 aa, synthetic construct
MPAAKRVKLDGGDKKYSIGLDIGTNSVGWAVITDEYKVPSKKFKVLGNTDRHSIKKNLIGALLFDSGETAEATRLKRTARRRYTRRKNRICYLQEIFSNEMAKVDDSFFHRLEESFLVEEDKKHERHPIFGNIVDEVAYHEKYPTIYHLRKKLVDSTDKADLRLIYLALAHMIKFRGHFLIEGDLNPDNSDVDKLFIQLVQTYNQLFEENPINASGVDAKAILSARLSKSRRLENLIAQLPGEKKNGLFGNLIALSLGLTPNFKSNFDLAEDAKLQLSKDTYDDDLDNLLAQIGDQYADLFLAAKNLSDAILLSDILRVNTEITKAPLSASMIKRYDEHHQDLTLLKALVRQQLPEKYKEIFFDQSKNGYAGYIDGGASQEEFYKFIKPILEKMDGTEELLVKLNREDLLRKQRTFDNGSIPHQIHLGELHAILRRQEDFYPFLKDNREKIEKILTFRIPYYVGPLARGNSRFAWMTRKSEETITPWNFEEVVDKGASAQSFIERMTNFDKNLPNEKVLPKHSLLYEYFTVYNELTKVKYVTEGMRKPAFLSGEQKKAIVDLLFKTNRKVTVKQLKEDYFKKIECFDSVEISGVEDRFNASLGTYHDLLKIIKDKDFLDNEENEDILEDIVLTLTLFEDREMIEERLKTYAHLFDDKVMKQLKRRRYTGWGRLSRKLINGIRDKQSGKTILDFLKSDGFANRNFMQLIHDDSLTFKEDIQKAQVSGQGDSLHEHIANLAGSPAIKKGILQTVKVVDELVKVMGRHKPENIVIEMARENQTTQKGQKNSRERMKRIEEGIKELGSQILKEHPVENTQLQNEKLYLYYLQNGRDMYVDQELDINRLSDYDVDHIVPQSFLKDDSIDNKVLTRSDKARGKSDNVPSEEVVKKMKNYWRQLLNAKLITQRKFDNLTKAERGGLSELDKAGFIKRQLVETRQITKHVAQILDSRMNTKYDENDKLIREVKVITLKSKLVSDFRKDFQFYKVREINNYHHAHDAYLNAVVGTALIKKYPKLESEFVYGDYKVYDVRKMIAKSEQEIGKATAKYFFYSNIMNFFKTEITLANGEIRKRPLIETNGETGEIVWDKGRDFATVRKVLSMPQVNIVKKTEVQTGGFSKESILPKRNSDKLIARKKDWDPKKYGGFDSPTVAYSVLVVAKVEKGKSKKLKSVKELLGITIMERSSFEKNPIDFLEAKGYKEVKKDLIIKLPKYSLFELENGRKRMLASAGELQKGNELALPSKYVNFLYLASHYEKLKGSPEDNEQKQLFVEQHKHYLDEIIEQISEFSKRVILADANLDKVLSAYNKHRDKPIREQAENIIHLFTLTNLGAPAAFKYFDTTIDRKRYTSTKEVLDATLIHQSITGLYETRIDLSQLGGDGGEAAAKPAPGGSGGTLNIEDEYRLHETSKGPDVPLGSTWLSDFPQAWAETGGMGLAFRQAPLIISLKATSTPVSIKQYPMSQEARLGIKPHIQRLLDQGILVPCQSPWNTPLLPVKKPGTNDYRPVQDLREVNKRVEDIHPTVPNPYNLLSGLPPSHQWYTVLDLKDAFFCLRLHPTSQSLFAFEWKDPEMGISGQLTWTRLPQGFKNSPTLFNEALHRDLADFRIQHPDLILLQYVDDLLLAATSELDCQQGTRALLQTLGDLGYRASAKKAQICQKQVKYLGYLLKEGQRWLTEARKETVMGQPTPKTPRQLREFLGKAGLCRLFIPGFAEMAAPLYPLTKPGTLFKWGPDQQKAYQEIKQALLTAPALGLPDLTKPFELFVDEKQGYAKGVLTQKLGPWRRPVAYLSKKLDPVAAGWPPCLRMVAAIAVLTKDVGKLTMGQPLVILAPHAVEALVKQPPDRWLSNARMTHYQALLLDTDRVQFGPIVALNPATLLPLPEEGLQHDCLDILAEAHGTRPDLTDQPLPDADHTWYTDGSSFLQEGQRRAGAAVTTETEVIWAKALPAGTSAQRAELIALTQALKMAAGKKLNVYTDSRYAFATAHIHGEIYRRRGWLTSEGKEIKNKDEILALLKALFLPKRLSIIHCPGHQKGNHAEARGNRMADQAAREVATRETPETSTLLAGKRTADGSEFEKRTADGSEFESPKKKAKVE

SEQ ID NO: 2432 - protein, 2094 aa, synthetic construct
MPAAKRVKLDGGDKKYSIGLDIGTNSVGWAVITDEYKVPSKKFKVLGNTDRHSIKKNLIGALLFDSGETAEATRLKRTARRRYTRRKNRICYLQEIFSNEMAKVDDSFFHRLEESFLVEEDKKHERHPIFGNIVDEVAYHEKYPTIYHLRKKLVDSTDKADLRLIYLALAHMIKFRGHFLIEGDLNPDNSDVDKLFIQLVQTYNQLFEENPINASGVDAKAILSARLSKSRRLENLIAQLPGEKKNGLFGNLIALSLGLTPNFKSNFDLAEDAKLQLSKDTYDDDLDNLLAQIGDQYADLFLAAKNLSDAILLSDILRVNTEITKAPLSASMIKRYDEHHQDLTLLKALVRQQLPEKYKEIFFDQSKNGYAGYIDGGASQEEFYKFIKPILEKMDGTEELLVKLNREDLLRKQRTFDNGSIPHQIHLGELHAILRRQEDFYPFLKDNREKIEKILTFRIPYYVGPLARGNSRFAWMTRKSEETITPWNFEEVVDKGASAQSFIERMTNFDKNLPNEKVLPKHSLLYEYFTVYNELTKVKYVTEGMRKPAFLSGEQKKAIVDLLFKTNRKVTVKQLKEDYFKKIECFDSVEISGVEDRFNASLGTYHDLLKIIKDKDFLDNEENEDILEDIVLTLTLFEDREMIEERLKTYAHLFDDKVMKQLKRRRYTGWGRLSRKLINGIRDKQSGKTILDFLKSDGFANRNFMQLIHDDSLTFKEDIQKAQVSGQGDSLHEHIANLAGSPAIKKGILQTVKVVDELVKVMGRHKPENIVIEMARENQTTQKGQKNSRERMKRIEEGIKELGSQILKEHPVENTQLQNEKLYLYYLQNGRDMYVDQELDINRLSDYDVDHIVPQSFLKDDSIDNKVLTRSDKARGKSDNVPSEEVVKKMKNYWRQLLNAKLITQRKFDNLTKAERGGLSELDKAGFIKRQLVETRQITKHVAQILDSRMNTKYDENDKLIREVKVITLKSKLVSDFRKDFQFYKVREINNYHHAHDAYLNAVVGTALIKKYPKLESEFVYGDYKVYDVRKMIAKSEQEIGKATAKYFFYSNIMNFFKTEITLANGEIRKRPLIETNGETGEIVWDKGRDFATVRKVLSMPQVNIVKKTEVQTGGFSKESILPKRNSDKLIARKKDWDPKKYGGFDSPTVAYSVLVVAKVEKGKSKKLKSVKELLGITIMERSSFEKNPIDFLEAKGYKEVKKDLIIKLPKYSLFELENGRKRMLASAGELQKGNELALPSKYVNFLYLASHYEKLKGSPEDNEQKQLFVEQHKHYLDEIIEQISEFSKRVILADANLDKVLSAYNKHRDKPIREQAENIIHLFTLTNLGAPAAFKYFDTTIDRKRYTSTKEVLDATLIHQSITGLYETRIDLSQLGGDGGPAPGGSGGGGGTLNIEDEYRLHETSKGPDVPLGSTWLSDFPQAWAETGGMGLAFRQAPLIISLKATSTPVSIKQYPMSQEARLGIKPHIQRLLDQGILVPCQSPWNTPLLPVKKPGTNDYRPVQDLREVNKRVEDIHPTVPNPYNLLSGLPPSHQWYTVLDLKDAFFCLRLHPTSQSLFAFEWKDPEMGISGQLTWTRLPQGFKNSPTLFNEALHRDLADFRIQHPDLILLQYVDDLLLAATSELDCQQGTRALLQTLGDLGYRASAKKAQICQKQVKYLGYLLKEGQRWLTEARKETVMGQPTPKTPRQLREFLGKAGLCRLFIPGFAEMAAPLYPLTKPGTLFKWGPDQQKAYQEIKQALLTAPALGLPDLTKPFELFVDEKQGYAKGVLTQKLGPWRRPVAYLSKKLDPVAAGWPPCLRMVAAIAVLTKDVGKLTMGQPLVILAPHAVEALVKQPPDRWLSNARMTHYQALLLDTDRVQFGPIVALNPATLLPLPEEGLQHDCLDILAEAHGTRPDLTDQPLPDADHTWYTDGSSFLQEGQRRAGAAVTTETEVIWAKALPAGTSAQRAELIALTQALKMAAGKKLNVYTDSRYAFATAHIHGEIYRRRGWLTSEGKEIKNKDEILALLKALFLPKRLSIIHCPGHQKGNHAEARGNRMADQAAREVATRETPETSTLLAGKRTADGSEFEKRTADGSEFESPKKKAKVE

SEQ ID NO: 2433 - protein, 2100 aa, synthetic construct
MPAAKRVKLDGGDKKYSIGLDIGTNSVGWAVITDEYKVPSKKFKVLGNTDRHSIKKNLIGALLFDSGETAEATRLKRTARRRYTRRKNRICYLQEIFSNEMAKVDDSFFHRLEESFLVEEDKKHERHPIFGNIVDEVAYHEKYPTIYHLRKKLVDSTDKADLRLIYLALAHMIKFRGHFLIEGDLNPDNSDVDKLFIQLVQTYNQLFEENPINASGVDAKAILSARLSKSRRLENLIAQLPGEKKNGLFGNLIALSLGLTPNFKSNFDLAEDAKLQLSKDTYDDDLDNLLAQIGDQYADLFLAAKNLSDAILLSDILRVNTEITKAPLSASMIKRYDEHHQDLTLLKALVRQQLPEKYKEIFFDQSKNGYAGYIDGGASQEEFYKFIKPILEKMDGTEELLVKLNREDLLRKQRTFDNGSIPHQIHLGELHAILRRQEDFYPFLKDNREKIEKILTFRIPYYVGPLARGNSRFAWMTRKSEETITPWNFEEVVDKGASAQSFIERMTNFDKNLPNEKVLPKHSLLYEYFTVYNELTKVKYVTEGMRKPAFLSGEQKKAIVDLLFKTNRKVTVKQLKEDYFKKIECFDSVEISGVEDRFNASLGTYHDLLKIIKDKDFLDNEENEDILEDIVLTLTLFEDREMIEERLKTYAHLFDDKVMKQLKRRRYTGWGRLSRKLINGIRDKQSGKTILDFLKSDGFANRNFMQLIHDDSLTFKEDIQKAQVSGQGDSLHEHIANLAGSPAIKKGILQTVKVVDELVKVMGRHKPENIVIEMARENQTTQKGQKNSRERMKRIEEGIKELGSQILKEHPVENTQLQNEKLYLYYLQNGRDMYVDQELDINRLSDYDVDHIVPQSFLKDDSIDNKVLTRSDKARGKSDNVPSEEVVKKMKNYWRQLLNAKLITQRKFDNLTKAERGGLSELDKAGFIKRQLVETRQITKHVAQILDSRMNTKYDENDKLIREVKVITLKSKLVSDFRKDFQFYKVREINNYHHAHDAYLNAVVGTALIKKYPKLESEFVYGDYKVYDVRKMIAKSEQEIGKATAKYFFYSNIMNFFKTEITLANGEIRKRPLIETNGETGEIVWDKGRDFATVRKVLSMPQVNIVKKTEVQTGGFSKESILPKRNSDKLIARKKDWDPKKYGGFDSPTVAYSVLVVAKVEKGKSKKLKSVKELLGITIMERSSFEKNPIDFLEAKGYKEVKKDLIIKLPKYSLFELENGRKRMLASAGELQKGNELALPSKYVNFLYLASHYEKLKGSPEDNEQKQLFVEQHKHYLDEIIEQISEFSKRVILADANLDKVLSAYNKHRDKPIREQAENIIHLFTLTNLGAPAAFKYFDTTIDRKRYTSTKEVLDATLIHQSITGLYETRIDLSQLGGDGGEAAAKGGGGSEAAAKGGTLNIEDEYRLHETSKGPDVPLGSTWLSDFPQAWAETGGMGLAFRQAPLIISLKATSTPVSIKQYPMSQEARLGIKPHIQRLLDQGILVPCQSPWNTPLLPVKKPGTNDYRPVQDLREVNKRVEDIHPTVPNPYNLLSGLPPSHQWYTVLDLKDAFFCLRLHPTSQSLFAFEWKDPEMGISGQLTWTRLPQGFKNSPTLFNEALHRDLADFRIQHPDLILLQYVDDLLLAATSELDCQQGTRALLQTLGDLGYRASAKKAQICQKQVKYLGYLLKEGQRWLTEARKETVMGQPTPKTPRQLREFLGKAGLCRLFIPGFAEMAAPLYPLTKPGTLFKWGPDQQKAYQEIKQALLTAPALGLPDLTKPFELFVDEKQGYAKGVLTQKLGPWRRPVAYLSKKLDPVAAGWPPCLRMVAAIAVLTKDVGKLTMGQPLVILAPHAVEALVKQPPDRWLSNARMTHYQALLLDTDRVQFGPIVALNPATLLPLPEEGLQHDCLDILAEAHGTRPDLTDQPLPDADHTWYTDGSSFLQEGQRRAGAAVTTETEVIWAKALPAGTSAQRAELIALTQALKMAAGKKLNVYTDSRYAFATAHIHGEIYRRRGWLTSEGKEIKNKDEILALLKALFLPKRLSIIHCPGHQKGNHAEARGNRMADQAAREVATRETPETSTLLAGKRTADGSEFEKRTADGSEFESPKKKAKVE

SEQ ID NO: 2434 - protein, 2096 aa, synthetic construct
MPAAKRVKLDGGDKKYSIGLDIGTNSVGWAVITDEYKVPSKKFKVLGNTDRHSIKKNLIGALLFDSGETAEATRLKRTARRRYTRRKNRICYLQEIFSNEMAKVDDSFFHRLEESFLVEEDKKHERHPIFGNIVDEVAYHEKYPTIYHLRKKLVDSTDKADLRLIYLALAHMIKFRGHFLIEGDLNPDNSDVDKLFIQLVQTYNQLFEENPINASGVDAKAILSARLSKSRRLENLIAQLPGEKKNGLFGNLIALSLGLTPNFKSNFDLAEDAKLQLSKDTYDDDLDNLLAQIGDQYADLFLAAKNLSDAILLSDILRVNTEITKAPLSASMIKRYDEHHQDLTLLKALVRQQLPEKYKEIFFDQSKNGYAGYIDGGASQEEFYKFIKPILEKMDGTEELLVKLNREDLLRKQRTFDNGSIPHQIHLGELHAILRRQEDFYPFLKDNREKIEKILTFRIPYYVGPLARGNSRFAWMTRKSEETITPWNFEEVVDKGASAQSFIERMTNFDKNLPNEKVLPKHSLLYEYFTVYNELTKVKYVTEGMRKPAFLSGEQKKAIVDLLFKTNRKVTVKQLKEDYFKKIECFDSVEISGVEDRFNASLGTYHDLLKIIKDKDFLDNEENEDILEDIVLTLTLFEDREMIEERLKTYAHLFDDKVMKQLKRRRYTGWGRLSRKLINGIRDKQSGKTILDFLKSDGFANRNFMQLIHDDSLTFKEDIQKAQVSGQGDSLHEHIANLAGSPAIKKGILQTVKVVDELVKVMGRHKPENIVIEMARENQTTQKGQKNSRERMKRIEEGIKELGSQILKEHPVENTQLQNEKLYLYYLQNGRDMYVDQELDINRLSDYDVDHIVPQSFLKDDSIDNKVLTRSDKARGKSDNVPSEEVVKKMKNYWRQLLNAKLITQRKFDNLTKAERGGLSELDKAGFIKRQLVETRQITKHVAQILDSRMNTKYDENDKLIREVKVITLKSKLVSDFRKDFQFYKVREINNYHHAHDAYLNAVVGTALIKKYPKLESEFVYGDYKVYDVRKMIAKSEQEIGKATAKYFFYSNIMNFFKTEITLANGEIRKRPLIETNGETGEIVWDKGRDFATVRKVLSMPQVNIVKKTEVQTGGFSKESILPKRNSDKLIARKKDWDPKKYGGFDSPTVAYSVLVVAKVEKGKSKKLKSVKELLGITIMERSSFEKNPIDFLEAKGYKEVKKDLIIKLPKYSLFELENGRKRMLASAGELQKGNELALPSKYVNFLYLASHYEKLKGSPEDNEQKQLFVEQHKHYLDEIIEQISEFSKRVILADANLDKVLSAYNKHRDKPIREQAENIIHLFTLTNLGAPAAFKYFDTTIDRKRYTSTKEVLDATLIHQSITGLYETRIDLSQLGGDGGGGGGSSEAAAKGGTLNIEDEYRLHETSKGPDVPLGSTWLSDFPQAWAETGGMGLAFRQAPLIISLKATSTPVSIKQYPMSQEARLGIKPHIQRLLDQGILVPCQSPWNTPLLPVKKPGTNDYRPVQDLREVNKRVEDIHPTVPNPYNLLSGLPPSHQWYTVLDLKDAFFCLRLHPTSQSLFAFEWKDPEMGISGQLTWTRLPQGFKNSPTLFNEALHRDLADFRIQHPDLILLQYVDDLLLAATSELDCQQGTRALLQTLGDLGYRASAKKAQICQKQVKYLGYLLKEGQRWLTEARKETVMGQPTPKTPRQLREFLGKAGLCRLFIPGFAEMAAPLYPLTKPGTLFKWGPDQQKAYQEIKQALLTAPALGLPDLTKPFELFVDEKQGYAKGVLTQKLGPWRRPVAYLSKKLDPVAAGWPPCLRMVAAIAVLTKDVGKLTMGQPLVILAPHAVEALVKQPPDRWLSNARMTHYQALLLDTDRVQFGPIVALNPATLLPLPEEGLQHDCLDILAEAHGTRPDLTDQPLPDADHTWYTDGSSFLQEGQRRAGAAVTTETEVIWAKALPAGTSAQRAELIALTQALKMAAGKKLNVYTDSRYAFATAHIHGEIYRRRGWLTSEGKEIKNKDEILALLKALFLPKRLSIIHCPGHQKGNHAEARGNRMADQAAREVATRETPETSTLLAGKRTADGSEFEKRTADGSEFESPKKKAKVE

SEQ ID NO: 2435 - protein, 2093 aa, synthetic construct
MPAAKRVKLDGGDKKYSIGLDIGTNSVGWAVITDEYKVPSKKFKVLGNTDRHSIKKNLIGALLFDSGETAEATRLKRTARRRYTRRKNRICYLQEIFSNEMAKVDDSFFHRLEESFLVEEDKKHERHPIFGNIVDEVAYHEKYPTIYHLRKKLVDSTDKADLRLIYLALAHMIKFRGHFLIEGDLNPDNSDVDKLFIQLVQTYNQLFEENPINASGVDAKAILSARLSKSRRLENLIAQLPGEKKNGLFGNLIALSLGLTPNFKSNFDLAEDAKLQLSKDTYDDDLDNLLAQIGDQYADLFLAAKNLSDAILLSDILRVNTEITKAPLSASMIKRYDEHHQDLTLLKALVRQQLPEKYKEIFFDQSKNGYAGYIDGGASQEEFYKFIKPILEKMDGTEELLVKLNREDLLRKQRTFDNGSIPHQIHLGELHAILRRQEDFYPFLKDNREKIEKILTFRIPYYVGPLARGNSRFAWMTRKSEETITPWNFEEVVDKGASAQSFIERMTNFDKNLPNEKVLPKHSLLYEYFTVYNELTKVKYVTEGMRKPAFLSGEQKKAIVDLLFKTNRKVTVKQLKEDYFKKIECFDSVEISGVEDRFNASLGTYHDLLKIIKDKDFLDNEENEDILEDIVLTLTLFEDREMIEERLKTYAHLFDDKVMKQLKRRRYTGWGRLSRKLINGIRDKQSGKTILDFLKSDGFANRNFMQLIHDDSLTFKEDIQKAQVSGQGDSLHEHIANLAGSPAIKKGILQTVKVVDELVKVMGRHKPENIVIEMARENQTTQKGQKNSRERMKRIEEGIKELGSQILKEHPVENTQLQNEKLYLYYLQNGRDMYVDQELDINRLSDYDVDHIVPQSFLKDDSIDNKVLTRSDKARGKSDNVPSEEVVKKMKNYWRQLLNAKLITQRKFDNLTKAERGGLSELDKAGFIKRQLVETRQITKHVAQILDSRMNTKYDENDKLIREVKVITLKSKLVSDFRKDFQFYKVREINNYHHAHDAYLNAVVGTALIKKYPKLESEFVYGDYKVYDVRKMIAKSEQEIGKATAKYFFYSNIMNFFKTEITLANGEIRKRPLIETNGETGEIVWDKGRDFATVRKVLSMPQVNIVKKTEVQTGGFSKESILPKRNSDKLIARKKDWDPKKYGGFDSPTVAYSVLVVAKVEKGKSKKLKSVKELLGITIMERSSFEKNPIDFLEAKGYKEVKKDLIIKLPKYSLFELENGRKRMLASAGELQKGNELALPSKYVNFLYLASHYEKLKGSPEDNEQKQLFVEQHKHYLDEIIEQISEFSKRVILADANLDKVLSAYNKHRDKPIREQAENIIHLFTLTNLGAPAAFKYFDTTIDRKRYTSTKEVLDATLIHQSITGLYETRIDLSQLGGDGGEAAAKGGSGGTLNIEDEYRLHETSKGPDVPLGSTWLSDFPQAWAETGGMGLAFRQAPLIISLKATSTPVSIKQYPMSQEARLGIKPHIQRLLDQGILVPCQSPWNTPLLPVKKPGTNDYRPVQDLREVNKRVEDIHPTVPNPYNLLSGLPPSHQWYTVLDLKDAFFCLRLHPTSQSLFAFEWKDPEMGISGQLTWTRLPQGFKNSPTLFNEALHRDLADFRIQHPDLILLQYVDDLLLAATSELDCQQGTRALLQTLGDLGYRASAKKAQICQKQVKYLGYLLKEGQRWLTEARKETVMGQPTPKTPRQLREFLGKAGLCRLFIPGFAEMAAPLYPLTKPGTLFKWGPDQQKAYQEIKQALLTAPALGLPDLTKPFELFVDEKQGYAKGVLTQKLGPWRRPVAYLSKKLDPVAAGWPPCLRMVAAIAVLTKDVGKLTMGQPLVILAPHAVEALVKQPPDRWLSNARMTHYQALLLDTDRVQFGPIVALNPATLLPLPEEGLQHDCLDILAEAHGTRPDLTDQPLPDADHTWYTDGSSFLQEGQRRAGAAVTTETEVIWAKALPAGTSAQRAELIALTQALKMAAGKKLNVYTDSRYAFATAHIHGEIYRRRGWLTSEGKEIKNKDEILALLKALFLPKRLSIIHCPGHQKGNHAEARGNRMADQAAREVATRETPETSTLLAGKRTADGSEFEKRTADGSEFESPKKKAKVE

SEQ ID NO: 2436 - protein, 2091 aa, synthetic construct
MPAAKRVKLDGGDKKYSIGLDIGTNSVGWAVITDEYKVPSKKFKVLGNTDRHSIKKNLIGALLFDSGETAEATRLKRTARRRYTRRKNRICYLQEIFSNEMAKVDDSFFHRLEESFLVEEDKKHERHPIFGNIVDEVAYHEKYPTIYHLRKKLVDSTDKADLRLIYLALAHMIKFRGHFLIEGDLNPDNSDVDKLFIQLVQTYNQLFEENPINASGVDAKAILSARLSKSRRLENLIAQLPGEKKNGLFGNLIALSLGLTPNFKSNFDLAEDAKLQLSKDTYDDDLDNLLAQIGDQYADLFLAAKNLSDAILLSDILRVNTEITKAPLSASMIKRYDEHHQDLTLLKALVRQQLPEKYKEIFFDQSKNGYAGYIDGGASQEEFYKFIKPILEKMDGTEELLVKLNREDLLRKQRTFDNGSIPHQIHLGELHAILRRQEDFYPFLKDNREKIEKILTFRIPYYVGPLARGNSRFAWMTRKSEETITPWNFEEVVDKGASAQSFIERMTNFDKNLPNEKVLPKHSLLYEYFTVYNELTKVKYVTEGMRKPAFLSGEQKKAIVDLLFKTNRKVTVKQLKEDYFKKIECFDSVEISGVEDRFNASLGTYHDLLKIIKDKDFLDNEENEDILEDIVLTLTLFEDREMIEERLKTYAHLFDDKVMKQLKRRRYTGWGRLSRKLINGIRDKQSGKTILDFLKSDGFANRNFMQLIHDDSLTFKEDIQKAQVSGQGDSLHEHIANLAGSPAIKKGILQTVKVVDELVKVMGRHKPENIVIEMARENQTTQKGQKNSRERMKRIEEGIKELGSQILKEHPVENTQLQNEKLYLYYLQNGRDMYVDQELDINRLSDYDVDHIVPQSFLKDDSIDNKVLTRSDKARGKSDNVPSEEVVKKMKNYWRQLLNAKLITQRKFDNLTKAERGGLSELDKAGFIKRQLVETRQITKHVAQILDSRMNTKYDENDKLIREVKVITLKSKLVSDFRKDFQFYKVREINNYHHAHDAYLNAVVGTALIKKYPKLESEFVYGDYKVYDVRKMIAKSEQEIGKATAKYFFYSNIMNFFKTEITLANGEIRKRPLIETNGETGEIVWDKGRDFATVRKVLSMPQVNIVKKTEVQTGGFSKESILPKRNSDKLIARKKDWDPKKYGGFDSPTVAYSVLVVAKVEKGKSKKLKSVKELLGITIMERSSFEKNPIDFLEAKGYKEVKKDLIIKLPKYSLFELENGRKRMLASAGELQKGNELALPSKYVNFLYLASHYEKLKGSPEDNEQKQLFVEQHKHYLDEIIEQISEFSKRVILADANLDKVLSAYNKHRDKPIREQAENIIHLFTLTNLGAPAAFKYFDTTIDRKRYTSTKEVLDATLIHQSITGLYETRIDLSQLGGDGGGGGGGSGGTLNIEDEYRLHETSKGPDVPLGSTWLSDFPQAWAETGGMGLAFRQAPLIISLKATSTPVSIKQYPMSQEARLGIKPHIQRLLDQGILVPCQSPWNTPLLPVKKPGTNDYRPVQDLREVNKRVEDIHPTVPNPYNLLSGLPPSHQWYTVLDLKDAFFCLRLHPTSQSLFAFEWKDPEMGISGQLTWTRLPQGFKNSPTLFNEALHRDLADFRIQHPDLILLQYVDDLLLAATSELDCQQGTRALLQTLGDLGYRASAKKAQICQKQVKYLGYLLKEGQRWLTEARKETVMGQPTPKTPRQLREFLGKAGLCRLFIPGFAEMAAPLYPLTKPGTLFKWGPDQQKAYQEIKQALLTAPALGLPDLTKPFELFVDEKQGYAKGVLTQKLGPWRRPVAYLSKKLDPVAAGWPPCLRMVAAIAVLTKDVGKLTMGQPLVILAPHAVEALVKQPPDRWLSNARMTHYQALLLDTDRVQFGPIVALNPATLLPLPEEGLQHDCLDILAEAHGTRPDLTDQPLPDADHTWYTDGSSFLQEGQRRAGAAVTTETEVIWAKALPAGTSAQRAELIALTQALKMAAGKKLNVYTDSRYAFATAHIHGEIYRRRGWLTSEGKEIKNKDEILALLKALFLPKRLSIIHCPGHQKGNHAEARGNRMADQAAREVATRETPETSTLLAGKRTADGSEFEKRTADGSEFESPKKKAKVE

SEQ ID NO: 2437 - protein, 2096 aa, synthetic construct
MPAAKRVKLDGGDKKYSIGLDIGTNSVGWAVITDEYKVPSKKFKVLGNTDRHSIKKNLIGALLFDSGETAEATRLKRTARRRYTRRKNRICYLQEIFSNEMAKVDDSFFHRLEESFLVEEDKKHERHPIFGNIVDEVAYHEKYPTIYHLRKKLVDSTDKADLRLIYLALAHMIKFRGHFLIEGDLNPDNSDVDKLFIQLVQTYNQLFEENPINASGVDAKAILSARLSKSRRLENLIAQLPGEKKNGLFGNLIALSLGLTPNFKSNFDLAEDAKLQLSKDTYDDDLDNLLAQIGDQYADLFLAAKNLSDAILLSDILRVNTEITKAPLSASMIKRYDEHHQDLTLLKALVRQQLPEKYKEIFFDQSKNGYAGYIDGGASQEEFYKFIKPILEKMDGTEELLVKLNREDLLRKQRTFDNGSIPHQIHLGELHAILRRQEDFYPFLKDNREKIEKILTFRIPYYVGPLARGNSRFAWMTRKSEETITPWNFEEVVDKGASAQSFIERMTNFDKNLPNEKVLPKHSLLYEYFTVYNELTKVKYVTEGMRKPAFLSGEQKKAIVDLLFKTNRKVTVKQLKEDYFKKIECFDSVEISGVEDRFNASLGTYHDLLKIIKDKDFLDNEENEDILEDIVLTLTLFEDREMIEERLKTYAHLFDDKVMKQLKRRRYTGWGRLSRKLINGIRDKQSGKTILDFLKSDGFANRNFMQLIHDDSLTFKEDIQKAQVSGQGDSLHEHIANLAGSPAIKKGILQTVKVVDELVKVMGRHKPENIVIEMARENQTTQKGQKNSRERMKRIEEGIKELGSQILKEHPVENTQLQNEKLYLYYLQNGRDMYVDQELDINRLSDYDVDHIVPQSFLKDDSIDNKVLTRSDKARGKSDNVPSEEVVKKMKNYWRQLLNAKLITQRKFDNLTKAERGGLSELDKAGFIKRQLVETRQITKHVAQILDSRMNTKYDENDKLIREVKVITLKSKLVSDFRKDFQFYKVREINNYHHAHDAYLNAVVGTALIKKYPKLESEFVYGDYKVYDVRKMIAKSEQEIGKATAKYFFYSNIMNFFKTEITLANGEIRKRPLIETNGETGEIVWDKGRDFATVRKVLSMPQVNIVKKTEVQTGGFSKESILPKRNSDKLIARKKDWDPKKYGGFDSPTVAYSVLVVAKVEKGKSKKLKSVKELLGITIMERSSFEKNPIDFLEAKGYKEVKKDLIIKLPKYSLFELENGRKRMLASAGELQKGNELALPSKYVNFLYLASHYEKLKGSPEDNEQKQLFVEQHKHYLDEIIEQISEFSKRVILADANLDKVLSAYNKHRDKPIREQAENIIHLFTLTNLGAPAAFKYFDTTIDRKRYTSTKEVLDATLIHQSITGLYETRIDLSQLGGDGGGSSGGSEAAAKGGTLNIEDEYRLHETSKGPDVPLGSTWLSDFPQAWAETGGMGLAFRQAPLIISLKATSTPVSIKQYPMSQEARLGIKPHIQRLLDQGILVPCQSPWNTPLLPVKKPGTNDYRPVQDLREVNKRVEDIHPTVPNPYNLLSGLPPSHQWYTVLDLKDAFFCLRLHPTSQSLFAFEWKDPEMGISGQLTWTRLPQGFKNSPTLFNEALHRDLADFRIQHPDLILLQYVDDLLLAATSELDCQQGTRALLQTLGDLGYRASAKKAQICQKQVKYLGYLLKEGQRWLTEARKETVMGQPTPKTPRQLREFLGKAGLCRLFIPGFAEMAAPLYPLTKPGTLFKWGPDQQKAYQEIKQALLTAPALGLPDLTKPFELFVDEKQGYAKGVLTQKLGPWRRPVAYLSKKLDPVAAGWPPCLRMVAAIAVLTKDVGKLTMGQPLVILAPHAVEALVKQPPDRWLSNARMTHYQALLLDTDRVQFGPIVALNPATLLPLPEEGLQHDCLDILAEAHGTRPDLTDQPLPDADHTWYTDGSSFLQEGQRRAGAAVTTETEVIWAKALPAGTSAQRAELIALTQALKMAAGKKLNVYTDSRYAFATAHIHGEIYRRRGWLTSEGKEIKNKDEILALLKALFLPKRLSIIHCPGHQKGNHAEARGNRMADQAAREVATRETPETSTLLAGKRTADGSEFEKRTADGSEFESPKKKAKVE

SEQ ID NO: 2438 - protein, 2094 aa, synthetic construct
MPAAKRVKLDGGDKKYSIGLDIGTNSVGWAVITDEYKVPSKKFKVLGNTDRHSIKKNLIGALLFDSGETAEATRLKRTARRRYTRRKNRICYLQEIFSNEMAKVDDSFFHRLEESFLVEEDKKHERHPIFGNIVDEVAYHEKYPTIYHLRKKLVDSTDKADLRLIYLALAHMIKFRGHFLIEGDLNPDNSDVDKLFIQLVQTYNQLFEENPINASGVDAKAILSARLSKSRRLENLIAQLPGEKKNGLFGNLIALSLGLTPNFKSNFDLAEDAKLQLSKDTYDDDLDNLLAQIGDQYADLFLAAKNLSDAILLSDILRVNTEITKAPLSASMIKRYDEHHQDLTLLKALVRQQLPEKYKEIFFDQSKNGYAGYIDGGASQEEFYKFIKPILEKMDGTEELLVKLNREDLLRKQRTFDNGSIPHQIHLGELHAILRRQEDFYPFLKDNREKIEKILTFRIPYYVGPLARGNSRFAWMTRKSEETITPWNFEEVVDKGASAQSFIERMTNFDKNLPNEKVLPKHSLLYEYFTVYNELTKVKYVTEGMRKPAFLSGEQKKAIVDLLFKTNRKVTVKQLKEDYFKKIECFDSVEISGVEDRFNASLGTYHDLLKIIKDKDFLDNEENEDILEDIVLTLTLFEDREMIEERLKTYAHLFDDKVMKQLKRRRYTGWGRLSRKLINGIRDKQSGKTILDFLKSDGFANRNFMQLIHDDSLTFKEDIQKAQVSGQGDSLHEHIANLAGSPAIKKGILQTVKVVDELVKVMGRHKPENIVIEMARENQTTQKGQKNSRERMKRIEEGIKELGSQILKEHPVENTQLQNEKLYLYYLQNGRDMYVDQELDINRLSDYDVDHIVPQSFLKDDSIDNKVLTRSDKARGKSDNVPSEEVVKKMKNYWRQLLNAKLITQRKFDNLTKAERGGLSELDKAGFIKRQLVETRQITKHVAQILDSRMNTKYDENDKLIREVKVITLKSKLVSDFRKDFQFYKVREINNYHHAHDAYLNAVVGTALIKKYPKLESEFVYGDYKVYDVRKMIAKSEQEIGKATAKYFFYSNIMNFFKTEITLANGEIRKRPLIETNGETGEIVWDKGRDFATVRKVLSMPQVNIVKKTEVQTGGFSKESILPKRNSDKLIARKKDWDPKKYGGFDSPTVAYSVLVVAKVEKGKSKKLKSVKELLGITIMERSSFEKNPIDFLEAKGYKEVKKDLIIKLPKYSLFELENGRKRMLASAGELQKGNELALPSKYVNFLYLASHYEKLKGSPEDNEQKQLFVEQHKHYLDEIIEQISEFSKRVILADANLDKVLSAYNKHRDKPIREQAENIIHLFTLTNLGAPAAFKYFDTTIDRKRYTSTKEVLDATLIHQSITGLYETRIDLSQLGGDGGGSSGGGGGSGGTLNIEDEYRLHETSKGPDVPLGSTWLSDFPQAWAETGGMGLAFRQAPLIISLKATSTPVSIKQYPMSQEARLGIKPHIQRLLDQGILVPCQSPWNTPLLPVKKPGTNDYRPVQDLREVNKRVEDIHPTVPNPYNLLSGLPPSHQWYTVLDLKDAFFCLRLHPTSQSLFAFEWKDPEMGISGQLTWTRLPQGFKNSPTLFNEALHRDLADFRIQHPDLILLQYVDDLLLAATSELDCQQGTRALLQTLGDLGYRASAKKAQICQKQVKYLGYLLKEGQRWLTEARKETVMGQPTPKTPRQLREFLGKAGLCRLFIPGFAEMAAPLYPLTKPGTLFKWGPDQQKAYQEIKQALLTAPALGLPDLTKPFELFVDEKQGYAKGVLTQKLGPWRRPVAYLSKKLDPVAAGWPPCLRMVAAIAVLTKDVGKLTMGQPLVILAPHAVEALVKQPPDRWLSNARMTHYQALLLDTDRVQFGPIVALNPATLLPLPEEGLQHDCLDILAEAHGTRPDLTDQPLPDADHTWYTDGSSFLQEGQRRAGAAVTTETEVIWAKALPAGTSAQRAELIALTQALKMAAGKKLNVYTDSRYAFATAHIHGEIYRRRGWLTSEGKEIKNKDEILALLKALFLPKRLSIIHCPGHQKGNHAEARGNRMADQAAREVATRETPETSTLLAGKRTADGSEFEKRTADGSEFESPKKKAKVE

SEQ ID NO: 2439 - protein, 2091 aa, synthetic construct
MPAAKRVKLDGGDKKYSIGLDIGTNSVGWAVITDEYKVPSKKFKVLGNTDRHSIKKNLIGALLFDSGETAEATRLKRTARRRYTRRKNRICYLQEIFSNEMAKVDDSFFHRLEESFLVEEDKKHERHPIFGNIVDEVAYHEKYPTIYHLRKKLVDSTDKADLRLIYLALAHMIKFRGHFLIEGDLNPDNSDVDKLFIQLVQTYNQLFEENPINASGVDAKAILSARLSKSRRLENLIAQLPGEKKNGLFGNLIALSLGLTPNFKSNFDLAEDAKLQLSKDTYDDDLDNLLAQIGDQYADLFLAAKNLSDAILLSDILRVNTEITKAPLSASMIKRYDEHHQDLTLLKALVRQQLPEKYKEIFFDQSKNGYAGYIDGGASQEEFYKFIKPILEKMDGTEELLVKLNREDLLRKQRTFDNGSIPHQIHLGELHAILRRQEDFYPFLKDNREKIEKILTFRIPYYVGPLARGNSRFAWMTRKSEETITPWNFEEVVDKGASAQSFIERMTNFDKNLPNEKVLPKHSLLYEYFTVYNELTKVKYVTEGMRKPAFLSGEQKKAIVDLLFKTNRKVTVKQLKEDYFKKIECFDSVEISGVEDRFNASLGTYHDLLKIIKDKDFLDNEENEDILEDIVLTLTLFEDREMIEERLKTYAHLFDDKVMKQLKRRRYTGWGRLSRKLINGIRDKQSGKTILDFLKSDGFANRNFMQLIHDDSLTFKEDIQKAQVSGQGDSLHEHIANLAGSPAIKKGILQTVKVVDELVKVMGRHKPENIVIEMARENQTTQKGQKNSRERMKRIEEGIKELGSQILKEHPVENTQLQNEKLYLYYLQNGRDMYVDQELDINRLSDYDVDHIVPQSFLKDDSIDNKVLTRSDKARGKSDNVPSEEVVKKMKNYWRQLLNAKLITQRKFDNLTKAERGGLSELDKAGFIKRQLVETRQITKHVAQILDSRMNTKYDENDKLIREVKVITLKSKLVSDFRKDFQFYKVREINNYHHAHDAYLNAVVGTALIKKYPKLESEFVYGDYKVYDVRKMIAKSEQEIGKATAKYFFYSNIMNFFKTEITLANGEIRKRPLIETNGETGEIVWDKGRDFATVRKVLSMPQVNIVKKTEVQTGGFSKESILPKRNSDKLIARKKDWDPKKYGGFDSPTVAYSVLVVAKVEKGKSKKLKSVKELLGITIMERSSFEKNPIDFLEAKGYKEVKKDLIIKLPKYSLFELENGRKRMLASAGELQKGNELALPSKYVNFLYLASHYEKLKGSPEDNEQKQLFVEQHKHYLDEIIEQISEFSKRVILADANLDKVLSAYNKHRDKPIREQAENIIHLFTLTNLGAPAAFKYFDTTIDRKRYTSTKEVLDATLIHQSITGLYETRIDLSQLGGDGGGGSGSSGGTLNIEDEYRLHETSKGPDVPLGSTWLSDFPQAWAETGGMGLAFRQAPLIISLKATSTPVSIKQYPMSQEARLGIKPHIQRLLDQGILVPCQSPWNTPLLPVKKPGTNDYRPVQDLREVNKRVEDIHPTVPNPYNLLSGLPPSHQWYTVLDLKDAFFCLRLHPTSQSLFAFEWKDPEMGISGQLTWTRLPQGFKNSPTLFNEALHRDLADFRIQHPDLILLQYVDDLLLAATSELDCQQGTRALLQTLGDLGYRASAKKAQICQKQVKYLGYLLKEGQRWLTEARKETVMGQPTPKTPRQLREFLGKAGLCRLFIPGFAEMAAPLYPLTKPGTLFKWGPDQQKAYQEIKQALLTAPALGLPDLTKPFELFVDEKQGYAKGVLTQKLGPWRRPVAYLSKKLDPVAAGWPPCLRMVAAIAVLTKDVGKLTMGQPLVILAPHAVEALVKQPPDRWLSNARMTHYQALLLDTDRVQFGPIVALNPATLLPLPEEGLQHDCLDILAEAHGTRPDLTDQPLPDADHTWYTDGSSFLQEGQRRAGAAVTTETEVIWAKALPAGTSAQRAELIALTQALKMAAGKKLNVYTDSRYAFATAHIHGEIYRRRGWLTSEGKEIKNKDEILALLKALFLPKRLSIIHCPGHQKGNHAEARGNRMADQAAREVATRETPETSTLLAGKRTADGSEFEKRTADGSEFESPKKKAKVE

SEQ ID NO: 2440 - protein, 2096 aa, synthetic construct
MPAAKRVKLDGGDKKYSIGLDIGTNSVGWAVITDEYKVPSKKFKVLGNTDRHSIKKNLIGALLFDSGETAEATRLKRTARRRYTRRKNRICYLQEIFSNEMAKVDDSFFHRLEESFLVEEDKKHERHPIFGNIVDEVAYHEKYPTIYHLRKKLVDSTDKADLRLIYLALAHMIKFRGHFLIEGDLNPDNSDVDKLFIQLVQTYNQLFEENPINASGVDAKAILSARLSKSRRLENLIAQLPGEKKNGLFGNLIALSLGLTPNFKSNFDLAEDAKLQLSKDTYDDDLDNLLAQIGDQYADLFLAAKNLSDAILLSDILRVNTEITKAPLSASMIKRYDEHHQDLTLLKALVRQQLPEKYKEIFFDQSKNGYAGYIDGGASQEEFYKFIKPILEKMDGTEELLVKLNREDLLRKQRTFDNGSIPHQIHLGELHAILRRQEDFYPFLKDNREKIEKILTFRIPYYVGPLARGNSRFAWMTRKSEETITPWNFEEVVDKGASAQSFIERMTNFDKNLPNEKVLPKHSLLYEYFTVYNELTKVKYVTEGMRKPAFLSGEQKKAIVDLLFKTNRKVTVKQLKEDYFKKIECFDSVEISGVEDRFNASLGTYHDLLKIIKDKDFLDNEENEDILEDIVLTLTLFEDREMIEERLKTYAHLFDDKVMKQLKRRRYTGWGRLSRKLINGIRDKQSGKTILDFLKSDGFANRNFMQLIHDDSLTFKEDIQKAQVSGQGDSLHEHIANLAGSPAIKKGILQTVKVVDELVKVMGRHKPENIVIEMARENQTTQKGQKNSRERMKRIEEGIKELGSQILKEHPVENTQLQNEKLYLYYLQNGRDMYVDQELDINRLSDYDVDHIVPQSFLKDDSIDNKVLTRSDKARGKSDNVPSEEVVKKMKNYWRQLLNAKLITQRKFDNLTKAERGGLSELDKAGFIKRQLVETRQITKHVAQILDSRMNTKYDENDKLIREVKVITLKSKLVSDFRKDFQFYKVREINNYHHAHDAYLNAVVGTALIKKYPKLESEFVYGDYKVYDVRKMIAKSEQEIGKATAKYFFYSNIMNFFKTEITLANGEIRKRPLIETNGETGEIVWDKGRDFATVRKVLSMPQVNIVKKTEVQTGGFSKESILPKRNSDKLIARKKDWDPKKYGGFDSPTVAYSVLVVAKVEKGKSKKLKSVKELLGITIMERSSFEKNPIDFLEAKGYKEVKKDLIIKLPKYSLFELENGRKRMLASAGELQKGNELALPSKYVNFLYLASHYEKLKGSPEDNEQKQLFVEQHKHYLDEIIEQISEFSKRVILADANLDKVLSAYNKHRDKPIREQAENIIHLFTLTNLGAPAAFKYFDTTIDRKRYTSTKEVLDATLIHQSITGLYETRIDLSQLGGDGGPAPGGGEAAAKGGTLNIEDEYRLHETSKGPDVPLGSTWLSDFPQAWAETGGMGLAVRQAPLIIPLKATSTPVSIKQYPMSQEARLGIKPHIQRLLDQGILVPCQSPWNTPLLPVKKPGTNDYRPVQDLREVNKRVEDIHPTVPNPYNLLSGLPPSHQWYTVLDLKDAFFCLRLHPTSQSLFAFEWRDPEMGISGQLTWTRLPQGFKNSPTLFNEALHRDLADFRIQHPDLILLQYVDDLLLAATSELDCQQGTRALLQTLGDLGYRASAKKAQICQKQVKYLGYLLKEGQRWLTEARKETVMGQPTPKTPRQLREFLGTAGFCRLWIPGFAEMAAPLYPLTKPGTLFEWGPDQQKAYQEIKQALLTAPALGLPDLTKPFELFVDEKQGYAKGVLTQKLGPWRRPVAYLSKKLDPVAAGWPPCLRMVAAIAVLTKDAGKLTMGQPLVILAPHAVEALVKQPPDRWLSNARMTHYQALLLDTDRVQFGPIVALNPATLLPLPEEGLQHDCLDILAEAHGTRPDLTDQPLPDADHTWYTDGSSFLQEGQRKAGAAVTTETEVVWAKALPAGTSAQRAELIALTQALKMAEGKKLNVYTDSRYAFATAHIHGEIYRRRGWLTSEGKEIKNKDEILALLKALFLPKRLSIIHCPGHQKGNRAEARGNRMADQAAREVATRETPETSTLLAGKRTADGSEFEKRTADGSEFESPKKKAKVE

SEQ ID NO: 2441 - protein, 2110 aa, synthetic construct
MPAAKRVKLDGGDKKYSIGLDIGTNSVGWAVITDEYKVPSKKFKVLGNTDRHSIKKNLIGALLFDSGETAEATRLKRTARRRYTRRKNRICYLQEIFSNEMAKVDDSFFHRLEESFLVEEDKKHERHPIFGNIVDEVAYHEKYPTIYHLRKKLVDSTDKADLRLIYLALAHMIKFRGHFLIEGDLNPDNSDVDKLFIQLVQTYNQLFEENPINASGVDAKAILSARLSKSRRLENLIAQLPGEKKNGLFGNLIALSLGLTPNFKSNFDLAEDAKLQLSKDTYDDDLDNLLAQIGDQYADLFLAAKNLSDAILLSDILRVNTEITKAPLSASMIKRYDEHHQDLTLLKALVRQQLPEKYKEIFFDQSKNGYAGYIDGGASQEEFYKFIKPILEKMDGTEELLVKLNREDLLRKQRTFDNGSIPHQIHLGELHAILRRQEDFYPFLKDNREKIEKILTFRIPYYVGPLARGNSRFAWMTRKSEETITPWNFEEVVDKGASAQSFIERMTNFDKNLPNEKVLPKHSLLYEYFTVYNELTKVKYVTEGMRKPAFLSGEQKKAIVDLLFKTNRKVTVKQLKEDYFKKIECFDSVEISGVEDRFNASLGTYHDLLKIIKDKDFLDNEENEDILEDIVLTLTLFEDREMIEERLKTYAHLFDDKVMKQLKRRRYTGWGRLSRKLINGIRDKQSGKTILDFLKSDGFANRNFMQLIHDDSLTFKEDIQKAQVSGQGDSLHEHIANLAGSPAIKKGILQTVKVVDELVKVMGRHKPENIVIEMARENQTTQKGQKNSRERMKRIEEGIKELGSQILKEHPVENTQLQNEKLYLYYLQNGRDMYVDQELDINRLSDYDVDHIVPQSFLKDDSIDNKVLTRSDKARGKSDNVPSEEVVKKMKNYWRQLLNAKLITQRKFDNLTKAERGGLSELDKAGFIKRQLVETRQITKHVAQILDSRMNTKYDENDKLIREVKVITLKSKLVSDFRKDFQFYKVREINNYHHAHDAYLNAVVGTALIKKYPKLESEFVYGDYKVYDVRKMIAKSEQEIGKATAKYFFYSNIMNFFKTEITLANGEIRKRPLIETNGETGEIVWDKGRDFATVRKVLSMPQVNIVKKTEVQTGGFSKESILPKRNSDKLIARKKDWDPKKYGGFDSPTVAYSVLVVAKVEKGKSKKLKSVKELLGITIMERSSFEKNPIDFLEAKGYKEVKKDLIIKLPKYSLFELENGRKRMLASAGELQKGNELALPSKYVNFLYLASHYEKLKGSPEDNEQKQLFVEQHKHYLDEIIEQISEFSKRVILADANLDKVLSAYNKHRDKPIREQAENIIHLFTLTNLGAPAAFKYFDTTIDRKRYTSTKEVLDATLIHQSITGLYETRIDLSQLGGDGGGGGGSGGGGSGGGGSGGGGSGGGGSGGTLNIEDEYRLHETSKGPDVPLGSTWLSDFPQAWAETGGMGLAVRQAPLIIPLKATSTPVSIKQYPMSQEARLGIKPHIQRLLDQGILVPCQSPWNTPLLPVKKPGTNDYRPVQDLREVNKRVEDIHPTVPNPYNLLSGLPPSHQWYTVLDLKDAFFCLRLHPTSQSLFAFEWRDPEMGISGQLTWTRLPQGFKNSPTLFNEALHRDLADFRIQHPDLILLQYVDDLLLAATSELDCQQGTRALLQTLGDLGYRASAKKAQICQKQVKYLGYLLKEGQRWLTEARKETVMGQPTPKTPRQLREFLGTAGFCRLWIPGFAEMAAPLYPLTKPGTLFEWGPDQQKAYQEIKQALLTAPALGLPDLTKPFELFVDEKQGYAKGVLTQKLGPWRRPVAYLSKKLDPVAAGWPPCLRMVAAIAVLTKDAGKLTMGQPLVILAPHAVEALVKQPPDRWLSNARMTHYQALLLDTDRVQFGPIVALNPATLLPLPEEGLQHDCLDILAEAHGTRPDLTDQPLPDADHTWYTDGSSFLQEGQRKAGAAVTTETEVVWAKALPAGTSAQRAELIALTQALKMAEGKKLNVYTDSRYAFATAHIHGEIYRRRGWLTSEGKEIKNKDEILALLKALFLPKRLSIIHCPGHQKGNRAEARGNRMADQAAREVATRETPETSTLLAGKRTADGSEFEKRTADGSEFESPKKKAKVE

SEQ ID NO: 2442 - protein, 2088 aa, synthetic construct
MPAAKRVKLDGGDKKYSIGLDIGTNSVGWAVITDEYKVPSKKFKVLGNTDRHSIKKNLIGALLFDSGETAEATRLKRTARRRYTRRKNRICYLQEIFSNEMAKVDDSFFHRLEESFLVEEDKKHERHPIFGNIVDEVAYHEKYPTIYHLRKKLVDSTDKADLRLIYLALAHMIKFRGHFLIEGDLNPDNSDVDKLFIQLVQTYNQLFEENPINASGVDAKAILSARLSKSRRLENLIAQLPGEKKNGLFGNLIALSLGLTPNFKSNFDLAEDAKLQLSKDTYDDDLDNLLAQIGDQYADLFLAAKNLSDAILLSDILRVNTEITKAPLSASMIKRYDEHHQDLTLLKALVRQQLPEKYKEIFFDQSKNGYAGYIDGGASQEEFYKFIKPILEKMDGTEELLVKLNREDLLRKQRTFDNGSIPHQIHLGELHAILRRQEDFYPFLKDNREKIEKILTFRIPYYVGPLARGNSRFAWMTRKSEETITPWNFEEVVDKGASAQSFIERMTNFDKNLPNEKVLPKHSLLYEYFTVYNELTKVKYVTEGMRKPAFLSGEQKKAIVDLLFKTNRKVTVKQLKEDYFKKIECFDSVEISGVEDRFNASLGTYHDLLKIIKDKDFLDNEENEDILEDIVLTLTLFEDREMIEERLKTYAHLFDDKVMKQLKRRRYTGWGRLSRKLINGIRDKQSGKTILDFLKSDGFANRNFMQLIHDDSLTFKEDIQKAQVSGQGDSLHEHIANLAGSPAIKKGILQTVKVVDELVKVMGRHKPENIVIEMARENQTTQKGQKNSRERMKRIEEGIKELGSQILKEHPVENTQLQNEKLYLYYLQNGRDMYVDQELDINRLSDYDVDHIVPQSFLKDDSIDNKVLTRSDKARGKSDNVPSEEVVKKMKNYWRQLLNAKLITQRKFDNLTKAERGGLSELDKAGFIKRQLVETRQITKHVAQILDSRMNTKYDENDKLIREVKVITLKSKLVSDFRKDFQFYKVREINNYHHAHDAYLNAVVGTALIKKYPKLESEFVYGDYKVYDVRKMIAKSEQEIGKATAKYFFYSNIMNFFKTEITLANGEIRKRPLIETNGETGEIVWDKGRDFATVRKVLSMPQVNIVKKTEVQTGGFSKESILPKRNSDKLIARKKDWDPKKYGGFDSPTVAYSVLVVAKVEKGKSKKLKSVKELLGITIMERSSFEKNPIDFLEAKGYKEVKKDLIIKLPKYSLFELENGRKRMLASAGELQKGNELALPSKYVNFLYLASHYEKLKGSPEDNEQKQLFVEQHKHYLDEIIEQISEFSKRVILADANLDKVLSAYNKHRDKPIREQAENIIHLFTLTNLGAPAAFKYFDTTIDRKRYTSTKEVLDATLIHQSITGLYETRIDLSQLGGDGGPAPGGTLNIEDEYRLHETSKGPDVPLGSTWLSDFPQAWAETGGMGLAVRQAPLIIPLKATSTPVSIKQYPMSQEARLGIKPHIQRLLDQGILVPCQSPWNTPLLPVKKPGTNDYRPVQDLREVNKRVEDIHPTVPNPYNLLSGLPPSHQWYTVLDLKDAFFCLRLHPTSQSLFAFEWRDPEMGISGQLTWTRLPQGFKNSPTLFNEALHRDLADFRIQHPDLILLQYVDDLLLAATSELDCQQGTRALLQTLGDLGYRASAKKAQICQKQVKYLGYLLKEGQRWLTEARKETVMGQPTPKTPRQLREFLGTAGFCRLWIPGFAEMAAPLYPLTKPGTLFEWGPDQQKAYQEIKQALLTAPALGLPDLTKPFELFVDEKQGYAKGVLTQKLGPWRRPVAYLSKKLDPVAAGWPPCLRMVAAIAVLTKDAGKLTMGQPLVILAPHAVEALVKQPPDRWLSNARMTHYQALLLDTDRVQFGPIVALNPATLLPLPEEGLQHDCLDILAEAHGTRPDLTDQPLPDADHTWYTDGSSFLQEGQRKAGAAVTTETEVVWAKALPAGTSAQRAELIALTQALKMAEGKKLNVYTDSRYAFATAHIHGEIYRRRGWLTSEGKEIKNKDEILALLKALFLPKRLSIIHCPGHQKGNRAEARGNRMADQAAREVATRETPETSTLLAGKRTADGSEFEKRTADGSEFESPKKKAKVE

SEQ ID NO: 2443 - protein, 2100 aa, synthetic construct
MPAAKRVKLDGGDKKYSIGLDIGTNSVGWAVITDEYKVPSKKFKVLGNTDRHSIKKNLIGALLFDSGETAEATRLKRTARRRYTRRKNRICYLQEIFSNEMAKVDDSFFHRLEESFLVEEDKKHERHPIFGNIVDEVAYHEKYPTIYHLRKKLVDSTDKADLRLIYLALAHMIKFRGHFLIEGDLNPDNSDVDKLFIQLVQTYNQLFEENPINASGVDAKAILSARLSKSRRLENLIAQLPGEKKNGLFGNLIALSLGLTPNFKSNFDLAEDAKLQLSKDTYDDDLDNLLAQIGDQYADLFLAAKNLSDAILLSDILRVNTEITKAPLSASMIKRYDEHHQDLTLLKALVRQQLPEKYKEIFFDQSKNGYAGYIDGGASQEEFYKFIKPILEKMDGTEELLVKLNREDLLRKQRTFDNGSIPHQIHLGELHAILRRQEDFYPFLKDNREKIEKILTFRIPYYVGPLARGNSRFAWMTRKSEETITPWNFEEVVDKGASAQSFIERMTNFDKNLPNEKVLPKHSLLYEYFTVYNELTKVKYVTEGMRKPAFLSGEQKKAIVDLLFKTNRKVTVKQLKEDYFKKIECFDSVEISGVEDRFNASLGTYHDLLKIIKDKDFLDNEENEDILEDIVLTLTLFEDREMIEERLKTYAHLFDDKVMKQLKRRRYTGWGRLSRKLINGIRDKQSGKTILDFLKSDGFANRNFMQLIHDDSLTFKEDIQKAQVSGQGDSLHEHIANLAGSPAIKKGILQTVKVVDELVKVMGRHKPENIVIEMARENQTTQKGQKNSRERMKRIEEGIKELGSQILKEHPVENTQLQNEKLYLYYLQNGRDMYVDQELDINRLSDYDVDHIVPQSFLKDDSIDNKVLTRSDKARGKSDNVPSEEVVKKMKNYWRQLLNAKLITQRKFDNLTKAERGGLSELDKAGFIKRQLVETRQITKHVAQILDSRMNTKYDENDKLIREVKVITLKSKLVSDFRKDFQFYKVREINNYHHAHDAYLNAVVGTALIKKYPKLESEFVYGDYKVYDVRKMIAKSEQEIGKATAKYFFYSNIMNFFKTEITLANGEIRKRPLIETNGETGEIVWDKGRDFATVRKVLSMPQVNIVKKTEVQTGGFSKESILPKRNSDKLIARKKDWDPKKYGGFDSPTVAYSVLVVAKVEKGKSKKLKSVKELLGITIMERSSFEKNPIDFLEAKGYKEVKKDLIIKLPKYSLFELENGRKRMLASAGELQKGNELALPSKYVNFLYLASHYEKLKGSPEDNEQKQLFVEQHKHYLDEIIEQISEFSKRVILADANLDKVLSAYNKHRDKPIREQAENIIHLFTLTNLGAPAAFKYFDTTIDRKRYTSTKEVLDATLIHQSITGLYETRIDLSQLGGDGGGSSGSSGSSGSSGSSGGTLNIEDEYRLHETSKGPDVPLGSTWLSDFPQAWAETGGMGLAVRQAPLIIPLKATSTPVSIKQYPMSQEARLGIKPHIQRLLDQGILVPCQSPWNTPLLPVKKPGTNDYRPVQDLREVNKRVEDIHPTVPNPYNLLSGLPPSHQWYTVLDLKDAFFCLRLHPTSQSLFAFEWRDPEMGISGQLTWTRLPQGFKNSPTLFNEALHRDLADFRIQHPDLILLQYVDDLLLAATSELDCQQGTRALLQTLGDLGYRASAKKAQICQKQVKYLGYLLKEGQRWLTEARKETVMGQPTPKTPRQLREFLGTAGFCRLWIPGFAEMAAPLYPLTKPGTLFEWGPDQQKAYQEIKQALLTAPALGLPDLTKPFELFVDEKQGYAKGVLTQKLGPWRRPVAYLSKKLDPVAAGWPPCLRMVAAIAVLTKDAGKLTMGQPLVILAPHAVEALVKQPPDRWLSNARMTHYQALLLDTDRVQFGPIVALNPATLLPLPEEGLQHDCLDILAEAHGTRPDLTDQPLPDADHTWYTDGSSFLQEGQRKAGAAVTTETEVVWAKALPAGTSAQRAELIALTQALKMAEGKKLNVYTDSRYAFATAHIHGEIYRRRGWLTSEGKEIKNKDEILALLKALFLPKRLSIIHCPGHQKGNRAEARGNRMADQAAREVATRETPETSTLLAGKRTADGSEFEKRTADGSEFESPKKKAKVE

SEQ ID NO: 2444 - protein, 2096 aa, synthetic construct
MPAAKRVKLDGGDKKYSIGLDIGTNSVGWAVITDEYKVPSKKFKVLGNTDRHSIKKNLIGALLFDSGETAEATRLKRTARRRYTRRKNRICYLQEIFSNEMAKVDDSFFHRLEESFLVEEDKKHERHPIFGNIVDEVAYHEKYPTIYHLRKKLVDSTDKADLRLIYLALAHMIKFRGHFLIEGDLNPDNSDVDKLFIQLVQTYNQLFEENPINASGVDAKAILSARLSKSRRLENLIAQLPGEKKNGLFGNLIALSLGLTPNFKSNFDLAEDAKLQLSKDTYDDDLDNLLAQIGDQYADLFLAAKNLSDAILLSDILRVNTEITKAPLSASMIKRYDEHHQDLTLLKALVRQQLPEKYKEIFFDQSKNGYAGYIDGGASQEEFYKFIKPILEKMDGTEELLVKLNREDLLRKQRTFDNGSIPHQIHLGELHAILRRQEDFYPFLKDNREKIEKILTFRIPYYVGPLARGNSRFAWMTRKSEETITPWNFEEVVDKGASAQSFIERMTNFDKNLPNEKVLPKHSLLYEYFTVYNELTKVKYVTEGMRKPAFLSGEQKKAIVDLLFKTNRKVTVKQLKEDYFKKIECFDSVEISGVEDRFNASLGTYHDLLKIIKDKDFLDNEENEDILEDIVLTLTLFEDREMIEERLKTYAHLFDDKVMKQLKRRRYTGWGRLSRKLINGIRDKQSGKTILDFLKSDGFANRNFMQLIHDDSLTFKEDIQKAQVSGQGDSLHEHIANLAGSPAIKKGILQTVKVVDELVKVMGRHKPENIVIEMARENQTTQKGQKNSRERMKRIEEGIKELGSQILKEHPVENTQLQNEKLYLYYLQNGRDMYVDQELDINRLSDYDVDHIVPQSFLKDDSIDNKVLTRSDKARGKSDNVPSEEVVKKMKNYWRQLLNAKLITQRKFDNLTKAERGGLSELDKAGFIKRQLVETRQITKHVAQILDSRMNTKYDENDKLIREVKVITLKSKLVSDFRKDFQFYKVREINNYHHAHDAYLNAVVGTALIKKYPKLESEFVYGDYKVYDVRKMIAKSEQEIGKATAKYFFYSNIMNFFKTEITLANGEIRKRPLIETNGETGEIVWDKGRDFATVRKVLSMPQVNIVKKTEVQTGGFSKESILPKRNSDKLIARKKDWDPKKYGGFDSPTVAYSVLVVAKVEKGKSKKLKSVKELLGITIMERSSFEKNPIDFLEAKGYKEVKKDLIIKLPKYSLFELENGRKRMLASAGELQKGNELALPSKYVNFLYLASHYEKLKGSPEDNEQKQLFVEQHKHYLDEIIEQISEFSKRVILADANLDKVLSAYNKHRDKPIREQAENIIHLFTLTNLGAPAAFKYFDTTIDRKRYTSTKEVLDATLIHQSITGLYETRIDLSQLGGDGGEAAAKGSSGGSGGTLNIEDEYRLHETSKGPDVPLGSTWLSDFPQAWAETGGMGLAVRQAPLIIPLKATSTPVSIKQYPMSQEARLGIKPHIQRLLDQGILVPCQSPWNTPLLPVKKPGTNDYRPVQDLREVNKRVEDIHPTVPNPYNLLSGLPPSHQWYTVLDLKDAFFCLRLHPTSQSLFAFEWRDPEMGISGQLTWTRLPQGFKNSPTLFNEALHRDLADFRIQHPDLILLQYVDDLLLAATSELDCQQGTRALLQTLGDLGYRASAKKAQICQKQVKYLGYLLKEGQRWLTEARKETVMGQPTPKTPRQLREFLGTAGFCRLWIPGFAEMAAPLYPLTKPGTLFEWGPDQQKAYQEIKQALLTAPALGLPDLTKPFELFVDEKQGYAKGVLTQKLGPWRRPVAYLSKKLDPVAAGWPPCLRMVAAIAVLTKDAGKLTMGQPLVILAPHAVEALVKQPPDRWLSNARMTHYQALLLDTDRVQFGPIVALNPATLLPLPEEGLQHDCLDILAEAHGTRPDLTDQPLPDADHTWYTDGSSFLQEGQRKAGAAVTTETEVVWAKALPAGTSAQRAELIALTQALKMAEGKKLNVYTDSRYAFATAHIHGEIYRRRGWLTSEGKEIKNKDEILALLKALFLPKRLSIIHCPGHQKGNRAEARGNRMADQAAREVATRETPETSTLLAGKRTADGSEFEKRTADGSEFESPKKKAKVE

SEQ ID NO: 2445 - protein, 2091 aa, synthetic construct
MPAAKRVKLDGGDKKYSIGLDIGTNSVGWAVITDEYKVPSKKFKVLGNTDRHSIKKNLIGALLFDSGETAEATRLKRTARRRYTRRKNRICYLQEIFSNEMAKVDDSFFHRLEESFLVEEDKKHERHPIFGNIVDEVAYHEKYPTIYHLRKKLVDSTDKADLRLIYLALAHMIKFRGHFLIEGDLNPDNSDVDKLFIQLVQTYNQLFEENPINASGVDAKAILSARLSKSRRLENLIAQLPGEKKNGLFGNLIALSLGLTPNFKSNFDLAEDAKLQLSKDTYDDDLDNLLAQIGDQYADLFLAAKNLSDAILLSDILRVNTEITKAPLSASMIKRYDEHHQDLTLLKALVRQQLPEKYKEIFFDQSKNGYAGYIDGGASQEEFYKFIKPILEKMDGTEELLVKLNREDLLRKQRTFDNGSIPHQIHLGELHAILRRQEDFYPFLKDNREKIEKILTFRIPYYVGPLARGNSRFAWMTRKSEETITPWNFEEVVDKGASAQSFIERMTNFDKNLPNEKVLPKHSLLYEYFTVYNELTKVKYVTEGMRKPAFLSGEQKKAIVDLLFKTNRKVTVKQLKEDYFKKIECFDSVEISGVEDRFNASLGTYHDLLKIIKDKDFLDNEENEDILEDIVLTLTLFEDREMIEERLKTYAHLFDDKVMKQLKRRRYTGWGRLSRKLINGIRDKQSGKTILDFLKSDGFANRNFMQLIHDDSLTFKEDIQKAQVSGQGDSLHEHIANLAGSPAIKKGILQTVKVVDELVKVMGRHKPENIVIEMARENQTTQKGQKNSRERMKRIEEGIKELGSQILKEHPVENTQLQNEKLYLYYLQNGRDMYVDQELDINRLSDYDVDHIVPQSFLKDDSIDNKVLTRSDKARGKSDNVPSEEVVKKMKNYWRQLLNAKLITQRKFDNLTKAERGGLSELDKAGFIKRQLVETRQITKHVAQILDSRMNTKYDENDKLIREVKVITLKSKLVSDFRKDFQFYKVREINNYHHAHDAYLNAVVGTALIKKYPKLESEFVYGDYKVYDVRKMIAKSEQEIGKATAKYFFYSNIMNFFKTEITLANGEIRKRPLIETNGETGEIVWDKGRDFATVRKVLSMPQVNIVKKTEVQTGGFSKESILPKRNSDKLIARKKDWDPKKYGGFDSPTVAYSVLVVAKVEKGKSKKLKSVKELLGITIMERSSFEKNPIDFLEAKGYKEVKKDLIIKLPKYSLFELENGRKRMLASAGELQKGNELALPSKYVNFLYLASHYEKLKGSPEDNEQKQLFVEQHKHYLDEIIEQISEFSKRVILADANLDKVLSAYNKHRDKPIREQAENIIHLFTLTNLGAPAAFKYFDTTIDRKRYTSTKEVLDATLIHQSITGLYETRIDLSQLGGDGGGGGPAPGGTLNIEDEYRLHETSKGPDVPLGSTWLSDFPQAWAETGGMGLAVRQAPLIIPLKATSTPVSIKQYPMSQEARLGIKPHIQRLLDQGILVPCQSPWNTPLLPVKKPGTNDYRPVQDLREVNKRVEDIHPTVPNPYNLLSGLPPSHQWYTVLDLKDAFFCLRLHPTSQSLFAFEWRDPEMGISGQLTWTRLPQGFKNSPTLFNEALHRDLADFRIQHPDLILLQYVDDLLLAATSELDCQQGTRALLQTLGDLGYRASAKKAQICQKQVKYLGYLLKEGQRWLTEARKETVMGQPTPKTPRQLREFLGTAGFCRLWIPGFAEMAAPLYPLTKPGTLFEWGPDQQKAYQEIKQALLTAPALGLPDLTKPFELFVDEKQGYAKGVLTQKLGPWRRPVAYLSKKLDPVAAGWPPCLRMVAAIAVLTKDAGKLTMGQPLVILAPHAVEALVKQPPDRWLSNARMTHYQALLLDTDRVQFGPIVALNPATLLPLPEEGLQHDCLDILAEAHGTRPDLTDQPLPDADHTWYTDGSSFLQEGQRKAGAAVTTETEVVWAKALPAGTSAQRAELIALTQALKMAEGKKLNVYTDSRYAFATAHIHGEIYRRRGWLTSEGKEIKNKDEILALLKALFLPKRLSIIHCPGHQKGNRAEARGNRMADQAAREVATRETPETSTLLAGKRTADGSEFEKRTADGSEFESPKKKAKVE

SEQ ID NO: 2446 - protein, 2105 aa, synthetic construct
MPAAKRVKLDGGDKKYSIGLDIGTNSVGWAVITDEYKVPSKKFKVLGNTDRHSIKKNLIGALLFDSGETAEATRLKRTARRRYTRRKNRICYLQEIFSNEMAKVDDSFFHRLEESFLVEEDKKHERHPIFGNIVDEVAYHEKYPTIYHLRKKLVDSTDKADLRLIYLALAHMIKFRGHFLIEGDLNPDNSDVDKLFIQLVQTYNQLFEENPINASGVDAKAILSARLSKSRRLENLIAQLPGEKKNGLFGNLIALSLGLTPNFKSNFDLAEDAKLQLSKDTYDDDLDNLLAQIGDQYADLFLAAKNLSDAILLSDILRVNTEITKAPLSASMIKRYDEHHQDLTLLKALVRQQLPEKYKEIFFDQSKNGYAGYIDGGASQEEFYKFIKPILEKMDGTEELLVKLNREDLLRKQRTFDNGSIPHQIHLGELHAILRRQEDFYPFLKDNREKIEKILTFRIPYYVGPLARGNSRFAWMTRKSEETITPWNFEEVVDKGASAQSFIERMTNFDKNLPNEKVLPKHSLLYEYFTVYNELTKVKYVTEGMRKPAFLSGEQKKAIVDLLFKTNRKVTVKQLKEDYFKKIECFDSVEISGVEDRFNASLGTYHDLLKIIKDKDFLDNEENEDILEDIVLTLTLFEDREMIEERLKTYAHLFDDKVMKQLKRRRYTGWGRLSRKLINGIRDKQSGKTILDFLKSDGFANRNFMQLIHDDSLTFKEDIQKAQVSGQGDSLHEHIANLAGSPAIKKGILQTVKVVDELVKVMGRHKPENIVIEMARENQTTQKGQKNSRERMKRIEEGIKELGSQILKEHPVENTQLQNEKLYLYYLQNGRDMYVDQELDINRLSDYDVDHIVPQSFLKDDSIDNKVLTRSDKARGKSDNVPSEEVVKKMKNYWRQLLNAKLITQRKFDNLTKAERGGLSELDKAGFIKRQLVETRQITKHVAQILDSRMNTKYDENDKLIREVKVITLKSKLVSDFRKDFQFYKVREINNYHHAHDAYLNAVVGTALIKKYPKLESEFVYGDYKVYDVRKMIAKSEQEIGKATAKYFFYSNIMNFFKTEITLANGEIRKRPLIETNGETGEIVWDKGRDFATVRKVLSMPQVNIVKKTEVQTGGFSKESILPKRNSDKLIARKKDWDPKKYGGFDSPTVAYSVLVVAKVEKGKSKKLKSVKELLGITIMERSSFEKNPIDFLEAKGYKEVKKDLIIKLPKYSLFELENGRKRMLASAGELQKGNELALPSKYVNFLYLASHYEKLKGSPEDNEQKQLFVEQHKHYLDEIIEQISEFSKRVILADANLDKVLSAYNKHRDKPIREQAENIIHLFTLTNLGAPAAFKYFDTTIDRKRYTSTKEVLDATLIHQSITGLYETRIDLSQLGGDGGEAAAKEAAAKEAAAKEAAAKGGTLNIEDEYRLHETSKGPDVPLGSTWLSDFPQAWAETGGMGLAVRQAPLIIPLKATSTPVSIKQYPMSQEARLGIKPHIQRLLDQGILVPCQSPWNTPLLPVKKPGTNDYRPVQDLREVNKRVEDIHPTVPNPYNLLSGLPPSHQWYTVLDLKDAFFCLRLHPTSQSLFAFEWRDPEMGISGQLTWTRLPQGFKNSPTLFNEALHRDLADFRIQHPDLILLQYVDDLLLAATSELDCQQGTRALLQTLGDLGYRASAKKAQICQKQVKYLGYLLKEGQRWLTEARKETVMGQPTPKTPRQLREFLGTAGFCRLWIPGFAEMAAPLYPLTKPGTLFEWGPDQQKAYQEIKQALLTAPALGLPDLTKPFELFVDEKQGYAKGVLTQKLGPWRRPVAYLSKKLDPVAAGWPPCLRMVAAIAVLTKDAGKLTMGQPLVILAPHAVEALVKQPPDRWLSNARMTHYQALLLDTDRVQFGPIVALNPATLLPLPEEGLQHDCLDILAEAHGTRPDLTDQPLPDADHTWYTDGSSFLQEGQRKAGAAVTTETEVVWAKALPAGTSAQRAELIALTQALKMAEGKKLNVYTDSRYAFATAHIHGEIYRRRGWLTSEGKEIKNKDEILALLKALFLPKRLSIIHCPGHQKGNRAEARGNRMADQAAREVATRETPETSTLLAGKRTADGSEFEKRTADGSEFESPKKKAKVE

SEQ ID NO: 2447 - protein, 2096 aa, synthetic construct
MPAAKRVKLDGGDKKYSIGLDIGTNSVGWAVITDEYKVPSKKFKVLGNTDRHSIKKNLIGALLFDSGETAEATRLKRTARRRYTRRKNRICYLQEIFSNEMAKVDDSFFHRLEESFLVEEDKKHERHPIFGNIVDEVAYHEKYPTIYHLRKKLVDSTDKADLRLIYLALAHMIKFRGHFLIEGDLNPDNSDVDKLFIQLVQTYNQLFEENPINASGVDAKAILSARLSKSRRLENLIAQLPGEKKNGLFGNLIALSLGLTPNFKSNFDLAEDAKLQLSKDTYDDDLDNLLAQIGDQYADLFLAAKNLSDAILLSDILRVNTEITKAPLSASMIKRYDEHHQDLTLLKALVRQQLPEKYKEIFFDQSKNGYAGYIDGGASQEEFYKFIKPILEKMDGTEELLVKLNREDLLRKQRTFDNGSIPHQIHLGELHAILRRQEDFYPFLKDNREKIEKILTFRIPYYVGPLARGNSRFAWMTRKSEETITPWNFEEVVDKGASAQSFIERMTNFDKNLPNEKVLPKHSLLYEYFTVYNELTKVKYVTEGMRKPAFLSGEQKKAIVDLLFKTNRKVTVKQLKEDYFKKIECFDSVEISGVEDRFNASLGTYHDLLKIIKDKDFLDNEENEDILEDIVLTLTLFEDREMIEERLKTYAHLFDDKVMKQLKRRRYTGWGRLSRKLINGIRDKQSGKTILDFLKSDGFANRNFMQLIHDDSLTFKEDIQKAQVSGQGDSLHEHIANLAGSPAIKKGILQTVKVVDELVKVMGRHKPENIVIEMARENQTTQKGQKNSRERMKRIEEGIKELGSQILKEHPVENTQLQNEKLYLYYLQNGRDMYVDQELDINRLSDYDVDHIVPQSFLKDDSIDNKVLTRSDKARGKSDNVPSEEVVKKMKNYWRQLLNAKLITQRKFDNLTKAERGGLSELDKAGFIKRQLVETRQITKHVAQILDSRMNTKYDENDKLIREVKVITLKSKLVSDFRKDFQFYKVREINNYHHAHDAYLNAVVGTALIKKYPKLESEFVYGDYKVYDVRKMIAKSEQEIGKATAKYFFYSNIMNFFKTEITLANGEIRKRPLIETNGETGEIVWDKGRDFATVRKVLSMPQVNIVKKTEVQTGGFSKESILPKRNSDKLIARKKDWDPKKYGGFDSPTVAYSVLVVAKVEKGKSKKLKSVKELLGITIMERSSFEKNPIDFLEAKGYKEVKKDLIIKLPKYSLFELENGRKRMLASAGELQKGNELALPSKYVNFLYLASHYEKLKGSPEDNEQKQLFVEQHKHYLDEIIEQISEFSKRVILADANLDKVLSAYNKHRDKPIREQAENIIHLFTLTNLGAPAAFKYFDTTIDRKRYTSTKEVLDATLIHQSITGLYETRIDLSQLGGDGGGGSPAPEAAAKGGTLNIEDEYRLHETSKGPDVPLGSTWLSDFPQAWAETGGMGLAVRQAPLIIPLKATSTPVSIKQYPMSQEARLGIKPHIQRLLDQGILVPCQSPWNTPLLPVKKPGTNDYRPVQDLREVNKRVEDIHPTVPNPYNLLSGLPPSHQWYTVLDLKDAFFCLRLHPTSQSLFAFEWRDPEMGISGQLTWTRLPQGFKNSPTLFNEALHRDLADFRIQHPDLILLQYVDDLLLAATSELDCQQGTRALLQTLGDLGYRASAKKAQICQKQVKYLGYLLKEGQRWLTEARKETVMGQPTPKTPRQLREFLGTAGFCRLWIPGFAEMAAPLYPLTKPGTLFEWGPDQQKAYQEIKQALLTAPALGLPDLTKPFELFVDEKQGYAKGVLTQKLGPWRRPVAYLSKKLDPVAAGWPPCLRMVAAIAVLTKDAGKLTMGQPLVILAPHAVEALVKQPPDRWLSNARMTHYQALLLDTDRVQFGPIVALNPATLLPLPEEGLQHDCLDILAEAHGTRPDLTDQPLPDADHTWYTDGSSFLQEGQRKAGAAVTTETEVVWAKALPAGTSAQRAELIALTQALKMAEGKKLNVYTDSRYAFATAHIHGEIYRRRGWLTSEGKEIKNKDEILALLKALFLPKRLSIIHCPGHQKGNRAEARGNRMADQAAREVATRETPETSTLLAGKRTADGSEFEKRTADGSEFESPKKKAKVE

SEQ ID NO: 2448 - protein, 2090 aa, synthetic construct
MPAAKRVKLDGGDKKYSIGLDIGTNSVGWAVITDEYKVPSKKFKVLGNTDRHSIKKNLIGALLFDSGETAEATRLKRTARRRYTRRKNRICYLQEIFSNEMAKVDDSFFHRLEESFLVEEDKKHERHPIFGNIVDEVAYHEKYPTIYHLRKKLVDSTDKADLRLIYLALAHMIKFRGHFLIEGDLNPDNSDVDKLFIQLVQTYNQLFEENPINASGVDAKAILSARLSKSRRLENLIAQLPGEKKNGLFGNLIALSLGLTPNFKSNFDLAEDAKLQLSKDTYDDDLDNLLAQIGDQYADLFLAAKNLSDAILLSDILRVNTEITKAPLSASMIKRYDEHHQDLTLLKALVRQQLPEKYKEIFFDQSKNGYAGYIDGGASQEEFYKFIKPILEKMDGTEELLVKLNREDLLRKQRTFDNGSIPHQIHLGELHAILRRQEDFYPFLKDNREKIEKILTFRIPYYVGPLARGNSRFAWMTRKSEETITPWNFEEVVDKGASAQSFIERMTNFDKNLPNEKVLPKHSLLYEYFTVYNELTKVKYVTEGMRKPAFLSGEQKKAIVDLLFKTNRKVTVKQLKEDYFKKIECFDSVEISGVEDRFNASLGTYHDLLKIIKDKDFLDNEENEDILEDIVLTLTLFEDREMIEERLKTYAHLFDDKVMKQLKRRRYTGWGRLSRKLINGIRDKQSGKTILDFLKSDGFANRNFMQLIHDDSLTFKEDIQKAQVSGQGDSLHEHIANLAGSPAIKKGILQTVKVVDELVKVMGRHKPENIVIEMARENQTTQKGQKNSRERMKRIEEGIKELGSQILKEHPVENTQLQNEKLYLYYLQNGRDMYVDQELDINRLSDYDVDHIVPQSFLKDDSIDNKVLTRSDKARGKSDNVPSEEVVKKMKNYWRQLLNAKLITQRKFDNLTKAERGGLSELDKAGFIKRQLVETRQITKHVAQILDSRMNTKYDENDKLIREVKVITLKSKLVSDFRKDFQFYKVREINNYHHAHDAYLNAVVGTALIKKYPKLESEFVYGDYKVYDVRKMIAKSEQEIGKATAKYFFYSNIMNFFKTEITLANGEIRKRPLIETNGETGEIVWDKGRDFATVRKVLSMPQVNIVKKTEVQTGGFSKESILPKRNSDKLIARKKDWDPKKYGGFDSPTVAYSVLVVAKVEKGKSKKLKSVKELLGITIMERSSFEKNPIDFLEAKGYKEVKKDLIIKLPKYSLFELENGRKRMLASAGELQKGNELALPSKYVNFLYLASHYEKLKGSPEDNEQKQLFVEQHKHYLDEIIEQISEFSKRVILADANLDKVLSAYNKHRDKPIREQAENIIHLFTLTNLGAPAAFKYFDTTIDRKRYTSTKEVLDATLIHQSITGLYETRIDLSQLGGDGGPAPAPGGTLNIEDEYRLHETSKGPDVPLGSTWLSDFPQAWAETGGMGLAVRQAPLIIPLKATSTPVSIKQYPMSQEARLGIKPHIQRLLDQGILVPCQSPWNTPLLPVKKPGTNDYRPVQDLREVNKRVEDIHPTVPNPYNLLSGLPPSHQWYTVLDLKDAFFCLRLHPTSQSLFAFEWRDPEMGISGQLTWTRLPQGFKNSPTLFNEALHRDLADFRIQHPDLILLQYVDDLLLAATSELDCQQGTRALLQTLGDLGYRASAKKAQICQKQVKYLGYLLKEGQRWLTEARKETVMGQPTPKTPRQLREFLGTAGFCRLWIPGFAEMAAPLYPLTKPGTLFEWGPDQQKAYQEIKQALLTAPALGLPDLTKPFELFVDEKQGYAKGVLTQKLGPWRRPVAYLSKKLDPVAAGWPPCLRMVAAIAVLTKDAGKLTMGQPLVILAPHAVEALVKQPPDRWLSNARMTHYQALLLDTDRVQFGPIVALNPATLLPLPEEGLQHDCLDILAEAHGTRPDLTDQPLPDADHTWYTDGSSFLQEGQRKAGAAVTTETEVVWAKALPAGTSAQRAELIALTQALKMAEGKKLNVYTDSRYAFATAHIHGEIYRRRGWLTSEGKEIKNKDEILALLKALFLPKRLSIIHCPGHQKGNRAEARGNRMADQAAREVATRETPETSTLLAGKRTADGSEFEKRTADGSEFESPKKKAKVE

SEQ ID NO: 2449 - protein, 2098 aa, synthetic construct
MPAAKRVKLDGGDKKYSIGLDIGTNSVGWAVITDEYKVPSKKFKVLGNTDRHSIKKNLIGALLFDSGETAEATRLKRTARRRYTRRKNRICYLQEIFSNEMAKVDDSFFHRLEESFLVEEDKKHERHPIFGNIVDEVAYHEKYPTIYHLRKKLVDSTDKADLRLIYLALAHMIKFRGHFLIEGDLNPDNSDVDKLFIQLVQTYNQLFEENPINASGVDAKAILSARLSKSRRLENLIAQLPGEKKNGLFGNLIALSLGLTPNFKSNFDLAEDAKLQLSKDTYDDDLDNLLAQIGDQYADLFLAAKNLSDAILLSDILRVNTEITKAPLSASMIKRYDEHHQDLTLLKALVRQQLPEKYKEIFFDQSKNGYAGYIDGGASQEEFYKFIKPILEKMDGTEELLVKLNREDLLRKQRTFDNGSIPHQIHLGELHAILRRQEDFYPFLKDNREKIEKILTFRIPYYVGPLARGNSRFAWMTRKSEETITPWNFEEVVDKGASAQSFIERMTNFDKNLPNEKVLPKHSLLYEYFTVYNELTKVKYVTEGMRKPAFLSGEQKKAIVDLLFKTNRKVTVKQLKEDYFKKIECFDSVEISGVEDRFNASLGTYHDLLKIIKDKDFLDNEENEDILEDIVLTLTLFEDREMIEERLKTYAHLFDDKVMKQLKRRRYTGWGRLSRKLINGIRDKQSGKTILDFLKSDGFANRNFMQLIHDDSLTFKEDIQKAQVSGQGDSLHEHIANLAGSPAIKKGILQTVKVVDELVKVMGRHKPENIVIEMARENQTTQKGQKNSRERMKRIEEGIKELGSQILKEHPVENTQLQNEKLYLYYLQNGRDMYVDQELDINRLSDYDVDHIVPQSFLKDDSIDNKVLTRSDKARGKSDNVPSEEVVKKMKNYWRQLLNAKLITQRKFDNLTKAERGGLSELDKAGFIKRQLVETRQITKHVAQILDSRMNTKYDENDKLIREVKVITLKSKLVSDFRKDFQFYKVREINNYHHAHDAYLNAVVGTALIKKYPKLESEFVYGDYKVYDVRKMIAKSEQEIGKATAKYFFYSNIMNFFKTEITLANGEIRKRPLIETNGETGEIVWDKGRDFATVRKVLSMPQVNIVKKTEVQTGGFSKESILPKRNSDKLIARKKDWDPKKYGGFDSPTVAYSVLVVAKVEKGKSKKLKSVKELLGITIMERSSFEKNPIDFLEAKGYKEVKKDLIIKLPKYSLFELENGRKRMLASAGELQKGNELALPSKYVNFLYLASHYEKLKGSPEDNEQKQLFVEQHKHYLDEIIEQISEFSKRVILADANLDKVLSAYNKHRDKPIREQAENIIHLFTLTNLGAPAAFKYFDTTIDRKRYTSTKEVLDATLIHQSITGLYETRIDLSQLGGDGGPAPAPAPAPAPAPGGTLNIEDEYRLHETSKGPDVPLGSTWLSDFPQAWAETGGMGLAVRQAPLIIPLKATSTPVSIKQYPMSQEARLGIKPHIQRLLDQGILVPCQSPWNTPLLPVKKPGTNDYRPVQDLREVNKRVEDIHPTVPNPYNLLSGLPPSHQWYTVLDLKDAFFCLRLHPTSQSLFAFEWRDPEMGISGQLTWTRLPQGFKNSPTLFNEALHRDLADFRIQHPDLILLQYVDDLLLAATSELDCQQGTRALLQTLGDLGYRASAKKAQICQKQVKYLGYLLKEGQRWLTEARKETVMGQPTPKTPRQLREFLGTAGFCRLWIPGFAEMAAPLYPLTKPGTLFEWGPDQQKAYQEIKQALLTAPALGLPDLTKPFELFVDEKQGYAKGVLTQKLGPWRRPVAYLSKKLDPVAAGWPPCLRMVAAIAVLTKDAGKLTMGQPLVILAPHAVEALVKQPPDRWLSNARMTHYQALLLDTDRVQFGPIVALNPATLLPLPEEGLQHDCLDILAEAHGTRPDLTDQPLPDADHTWYTDGSSFLQEGQRKAGAAVTTETEVVWAKALPAGTSAQRAELIALTQALKMAEGKKLNVYTDSRYAFATAHIHGEIYRRRGWLTSEGKEIKNKDEILALLKALFLPKRLSIIHCPGHQKGNRAEARGNRMADQAAREVATRETPETSTLLAGKRTADGSEFEKRTADGSEFESPKKKAKVE

SEQ ID NO: 2450 - protein, 2092 aa, synthetic construct
MPAAKRVKLDGGDKKYSIGLDIGTNSVGWAVITDEYKVPSKKFKVLGNTDRHSIKKNLIGALLFDSGETAEATRLKRTARRRYTRRKNRICYLQEIFSNEMAKVDDSFFHRLEESFLVEEDKKHERHPIFGNIVDEVAYHEKYPTIYHLRKKLVDSTDKADLRLIYLALAHMIKFRGHFLIEGDLNPDNSDVDKLFIQLVQTYNQLFEENPINASGVDAKAILSARLSKSRRLENLIAQLPGEKKNGLFGNLIALSLGLTPNFKSNFDLAEDAKLQLSKDTYDDDLDNLLAQIGDQYADLFLAAKNLSDAILLSDILRVNTEITKAPLSASMIKRYDEHHQDLTLLKALVRQQLPEKYKEIFFDQSKNGYAGYIDGGASQEEFYKFIKPILEKMDGTEELLVKLNREDLLRKQRTFDNGSIPHQIHLGELHAILRRQEDFYPFLKDNREKIEKILTFRIPYYVGPLARGNSRFAWMTRKSEETITPWNFEEVVDKGASAQSFIERMTNFDKNLPNEKVLPKHSLLYEYFTVYNELTKVKYVTEGMRKPAFLSGEQKKAIVDLLFKTNRKVTVKQLKEDYFKKIECFDSVEISGVEDRFNASLGTYHDLLKIIKDKDFLDNEENEDILEDIVLTLTLFEDREMIEERLKTYAHLFDDKVMKQLKRRRYTGWGRLSRKLINGIRDKQSGKTILDFLKSDGFANRNFMQLIHDDSLTFKEDIQKAQVSGQGDSLHEHIANLAGSPAIKKGILQTVKVVDELVKVMGRHKPENIVIEMARENQTTQKGQKNSRERMKRIEEGIKELGSQILKEHPVENTQLQNEKLYLYYLQNGRDMYVDQELDINRLSDYDVDHIVPQSFLKDDSIDNKVLTRSDKARGKSDNVPSEEVVKKMKNYWRQLLNAKLITQRKFDNLTKAERGGLSELDKAGFIKRQLVETRQITKHVAQILDSRMNTKYDENDKLIREVKVITLKSKLVSDFRKDFQFYKVREINNYHHAHDAYLNAVVGTALIKKYPKLESEFVYGDYKVYDVRKMIAKSEQEIGKATAKYFFYSNIMNFFKTEITLANGEIRKRPLIETNGETGEIVWDKGRDFATVRKVLSMPQVNIVKKTEVQTGGFSKESILPKRNSDKLIARKKDWDPKKYGGFDSPTVAYSVLVVAKVEKGKSKKLKSVKELLGITIMERSSFEKNPIDFLEAKGYKEVKKDLIIKLPKYSLFELENGRKRMLASAGELQKGNELALPSKYVNFLYLASHYEKLKGSPEDNEQKQLFVEQHKHYLDEIIEQISEFSKRVILADANLDKVLSAYNKHRDKPIREQAENIIHLFTLTNLGAPAAFKYFDTTIDRKRYTSTKEVLDATLIHQSITGLYETRIDLSQLGGDGGGGGGGGGGGTLNIEDEYRLHETSKGPDVPLGSTWLSDFPQAWAETGGMGLAVRQAPLIIPLKATSTPVSIKQYPMSQEARLGIKPHIQRLLDQGILVPCQSPWNTPLLPVKKPGTNDYRPVQDLREVNKRVEDIHPTVPNPYNLLSGLPPSHQWYTVLDLKDAFFCLRLHPTSQSLFAFEWRDPEMGISGQLTWTRLPQGFKNSPTLFNEALHRDLADFRIQHPDLILLQYVDDLLLAATSELDCQQGTRALLQTLGDLGYRASAKKAQICQKQVKYLGYLLKEGQRWLTEARKETVMGQPTPKTPRQLREFLGTAGFCRLWIPGFAEMAAPLYPLTKPGTLFEWGPDQQKAYQEIKQALLTAPALGLPDLTKPFELFVDEKQGYAKGVLTQKLGPWRRPVAYLSKKLDPVAAGWPPCLRMVAAIAVLTKDAGKLTMGQPLVILAPHAVEALVKQPPDRWLSNARMTHYQALLLDTDRVQFGPIVALNPATLLPLPEEGLQHDCLDILAEAHGTRPDLTDQPLPDADHTWYTDGSSFLQEGQRKAGAAVTTETEVVWAKALPAGTSAQRAELIALTQALKMAEGKKLNVYTDSRYAFATAHIHGEIYRRRGWLTSEGKEIKNKDEILALLKALFLPKRLSIIHCPGHQKGNRAEARGNRMADQAAREVATRETPETSTLLAGKRTADGSEFEKRTADGSEFESPKKKAKVE

SEQ ID NO: 2451 - protein, 2093 aa, synthetic construct
MPAAKRVKLDGGDKKYSIGLDIGTNSVGWAVITDEYKVPSKKFKVLGNTDRHSIKKNLIGALLFDSGETAEATRLKRTARRRYTRRKNRICYLQEIFSNEMAKVDDSFFHRLEESFLVEEDKKHERHPIFGNIVDEVAYHEKYPTIYHLRKKLVDSTDKADLRLIYLALAHMIKFRGHFLIEGDLNPDNSDVDKLFIQLVQTYNQLFEENPINASGVDAKAILSARLSKSRRLENLIAQLPGEKKNGLFGNLIALSLGLTPNFKSNFDLAEDAKLQLSKDTYDDDLDNLLAQIGDQYADLFLAAKNLSDAILLSDILRVNTEITKAPLSASMIKRYDEHHQDLTLLKALVRQQLPEKYKEIFFDQSKNGYAGYIDGGASQEEFYKFIKPILEKMDGTEELLVKLNREDLLRKQRTFDNGSIPHQIHLGELHAILRRQEDFYPFLKDNREKIEKILTFRIPYYVGPLARGNSRFAWMTRKSEETITPWNFEEVVDKGASAQSFIERMTNFDKNLPNEKVLPKHSLLYEYFTVYNELTKVKYVTEGMRKPAFLSGEQKKAIVDLLFKTNRKVTVKQLKEDYFKKIECFDSVEISGVEDRFNASLGTYHDLLKIIKDKDFLDNEENEDILEDIVLTLTLFEDREMIEERLKTYAHLFDDKVMKQLKRRRYTGWGRLSRKLINGIRDKQSGKTILDFLKSDGFANRNFMQLIHDDSLTFKEDIQKAQVSGQGDSLHEHIANLAGSPAIKKGILQTVKVVDELVKVMGRHKPENIVIEMARENQTTQKGQKNSRERMKRIEEGIKELGSQILKEHPVENTQLQNEKLYLYYLQNGRDMYVDQELDINRLSDYDVDHIVPQSFLKDDSIDNKVLTRSDKARGKSDNVPSEEVVKKMKNYWRQLLNAKLITQRKFDNLTKAERGGLSELDKAGFIKRQLVETRQITKHVAQILDSRMNTKYDENDKLIREVKVITLKSKLVSDFRKDFQFYKVREINNYHHAHDAYLNAVVGTALIKKYPKLESEFVYGDYKVYDVRKMIAKSEQEIGKATAKYFFYSNIMNFFKTEITLANGEIRKRPLIETNGETGEIVWDKGRDFATVRKVLSMPQVNIVKKTEVQTGGFSKESILPKRNSDKLIARKKDWDPKKYGGFDSPTVAYSVLVVAKVEKGKSKKLKSVKELLGITIMERSSFEKNPIDFLEAKGYKEVKKDLIIKLPKYSLFELENGRKRMLASAGELQKGNELALPSKYVNFLYLASHYEKLKGSPEDNEQKQLFVEQHKHYLDEIIEQISEFSKRVILADANLDKVLSAYNKHRDKPIREQAENIIHLFTLTNLGAPAAFKYFDTTIDRKRYTSTKEVLDATLIHQSITGLYETRIDLSQLGGDGGEAAAKGSSGGTLNIEDEYRLHETSKGPDVPLGSTWLSDFPQAWAETGGMGLAVRQAPLIIPLKATSTPVSIKQYPMSQEARLGIKPHIQRLLDQGILVPCQSPWNTPLLPVKKPGTNDYRPVQDLREVNKRVEDIHPTVPNPYNLLSGLPPSHQWYTVLDLKDAFFCLRLHPTSQSLFAFEWRDPEMGISGQLTWTRLPQGFKNSPTLFNEALHRDLADFRIQHPDLILLQYVDDLLLAATSELDCQQGTRALLQTLGDLGYRASAKKAQICQKQVKYLGYLLKEGQRWLTEARKETVMGQPTPKTPRQLREFLGTAGFCRLWIPGFAEMAAPLYPLTKPGTLFEWGPDQQKAYQEIKQALLTAPALGLPDLTKPFELFVDEKQGYAKGVLTQKLGPWRRPVAYLSKKLDPVAAGWPPCLRMVAAIAVLTKDAGKLTMGQPLVILAPHAVEALVKQPPDRWLSNARMTHYQALLLDTDRVQFGPIVALNPATLLPLPEEGLQHDCLDILAEAHGTRPDLTDQPLPDADHTWYTDGSSFLQEGQRKAGAAVTTETEVVWAKALPAGTSAQRAELIALTQALKMAEGKKLNVYTDSRYAFATAHIHGEIYRRRGWLTSEGKEIKNKDEILALLKALFLPKRLSIIHCPGHQKGNRAEARGNRMADQAAREVATRETPETSTLLAGKRTADGSEFEKRTADGSEFESPKKKAKVE

SEQ ID NO: 2452 - protein, 2096 aa, synthetic construct
MPAAKRVKLDGGDKKYSIGLDIGTNSVGWAVITDEYKVPSKKFKVLGNTDRHSIKKNLIGALLFDSGETAEATRLKRTARRRYTRRKNRICYLQEIFSNEMAKVDDSFFHRLEESFLVEEDKKHERHPIFGNIVDEVAYHEKYPTIYHLRKKLVDSTDKADLRLIYLALAHMIKFRGHFLIEGDLNPDNSDVDKLFIQLVQTYNQLFEENPINASGVDAKAILSARLSKSRRLENLIAQLPGEKKNGLFGNLIALSLGLTPNFKSNFDLAEDAKLQLSKDTYDDDLDNLLAQIGDQYADLFLAAKNLSDAILLSDILRVNTEITKAPLSASMIKRYDEHHQDLTLLKALVRQQLPEKYKEIFFDQSKNGYAGYIDGGASQEEFYKFIKPILEKMDGTEELLVKLNREDLLRKQRTFDNGSIPHQIHLGELHAILRRQEDFYPFLKDNREKIEKILTFRIPYYVGPLARGNSRFAWMTRKSEETITPWNFEEVVDKGASAQSFIERMTNFDKNLPNEKVLPKHSLLYEYFTVYNELTKVKYVTEGMRKPAFLSGEQKKAIVDLLFKTNRKVTVKQLKEDYFKKIECFDSVEISGVEDRFNASLGTYHDLLKIIKDKDFLDNEENEDILEDIVLTLTLFEDREMIEERLKTYAHLFDDKVMKQLKRRRYTGWGRLSRKLINGIRDKQSGKTILDFLKSDGFANRNFMQLIHDDSLTFKEDIQKAQVSGQGDSLHEHIANLAGSPAIKKGILQTVKVVDELVKVMGRHKPENIVIEMARENQTTQKGQKNSRERMKRIEEGIKELGSQILKEHPVENTQLQNEKLYLYYLQNGRDMYVDQELDINRLSDYDVDHIVPQSFLKDDSIDNKVLTRSDKARGKSDNVPSEEVVKKMKNYWRQLLNAKLITQRKFDNLTKAERGGLSELDKAGFIKRQLVETRQITKHVAQILDSRMNTKYDENDKLIREVKVITLKSKLVSDFRKDFQFYKVREINNYHHAHDAYLNAVVGTALIKKYPKLESEFVYGDYKVYDVRKMIAKSEQEIGKATAKYFFYSNIMNFFKTEITLANGEIRKRPLIETNGETGEIVWDKGRDFATVRKVLSMPQVNIVKKTEVQTGGFSKESILPKRNSDKLIARKKDWDPKKYGGFDSPTVAYSVLVVAKVEKGKSKKLKSVKELLGITIMERSSFEKNPIDFLEAKGYKEVKKDLIIKLPKYSLFELENGRKRMLASAGELQKGNELALPSKYVNFLYLASHYEKLKGSPEDNEQKQLFVEQHKHYLDEIIEQISEFSKRVILADANLDKVLSAYNKHRDKPIREQAENIIHLFTLTNLGAPAAFKYFDTTIDRKRYTSTKEVLDATLIHQSITGLYETRIDLSQLGGDGGEAAAKGSSGGGGGTLNIEDEYRLHETSKGPDVPLGSTWLSDFPQAWAETGGMGLAVRQAPLIIPLKATSTPVSIKQYPMSQEARLGIKPHIQRLLDQGILVPCQSPWNTPLLPVKKPGTNDYRPVQDLREVNKRVEDIHPTVPNPYNLLSGLPPSHQWYTVLDLKDAFFCLRLHPTSQSLFAFEWRDPEMGISGQLTWTRLPQGFKNSPTLFNEALHRDLADFRIQHPDLILLQYVDDLLLAATSELDCQQGTRALLQTLGDLGYRASAKKAQICQKQVKYLGYLLKEGQRWLTEARKETVMGQPTPKTPRQLREFLGTAGFCRLWIPGFAEMAAPLYPLTKPGTLFEWGPDQQKAYQEIKQALLTAPALGLPDLTKPFELFVDEKQGYAKGVLTQKLGPWRRPVAYLSKKLDPVAAGWPPCLRMVAAIAVLTKDAGKLTMGQPLVILAPHAVEALVKQPPDRWLSNARMTHYQALLLDTDRVQFGPIVALNPATLLPLPEEGLQHDCLDILAEAHGTRPDLTDQPLPDADHTWYTDGSSFLQEGQRKAGAAVTTETEVVWAKALPAGTSAQRAELIALTQALKMAEGKKLNVYTDSRYAFATAHIHGEIYRRRGWLTSEGKEIKNKDEILALLKALFLPKRLSIIHCPGHQKGNRAEARGNRMADQAAREVATRETPETSTLLAGKRTADGSEFEKRTADGSEFESPKKKAKVE

SEQ ID NO: 2453 - protein, 2096 aa, synthetic construct
MPAAKRVKLDGGDKKYSIGLDIGTNSVGWAVITDEYKVPSKKFKVLGNTDRHSIKKNLIGALLFDSGETAEATRLKRTARRRYTRRKNRICYLQEIFSNEMAKVDDSFFHRLEESFLVEEDKKHERHPIFGNIVDEVAYHEKYPTIYHLRKKLVDSTDKADLRLIYLALAHMIKFRGHFLIEGDLNPDNSDVDKLFIQLVQTYNQLFEENPINASGVDAKAILSARLSKSRRLENLIAQLPGEKKNGLFGNLIALSLGLTPNFKSNFDLAEDAKLQLSKDTYDDDLDNLLAQIGDQYADLFLAAKNLSDAILLSDILRVNTEITKAPLSASMIKRYDEHHQDLTLLKALVRQQLPEKYKEIFFDQSKNGYAGYIDGGASQEEFYKFIKPILEKMDGTEELLVKLNREDLLRKQRTFDNGSIPHQIHLGELHAILRRQEDFYPFLKDNREKIEKILTFRIPYYVGPLARGNSRFAWMTRKSEETITPWNFEEVVDKGASAQSFIERMTNFDKNLPNEKVLPKHSLLYEYFTVYNELTKVKYVTEGMRKPAFLSGEQKKAIVDLLFKTNRKVTVKQLKEDYFKKIECFDSVEISGVEDRFNASLGTYHDLLKIIKDKDFLDNEENEDILEDIVLTLTLFEDREMIEERLKTYAHLFDDKVMKQLKRRRYTGWGRLSRKLINGIRDKQSGKTILDFLKSDGFANRNFMQLIHDDSLTFKEDIQKAQVSGQGDSLHEHIANLAGSPAIKKGILQTVKVVDELVKVMGRHKPENIVIEMARENQTTQKGQKNSRERMKRIEEGIKELGSQILKEHPVENTQLQNEKLYLYYLQNGRDMYVDQELDINRLSDYDVDHIVPQSFLKDDSIDNKVLTRSDKARGKSDNVPSEEVVKKMKNYWRQLLNAKLITQRKFDNLTKAERGGLSELDKAGFIKRQLVETRQITKHVAQILDSRMNTKYDENDKLIREVKVITLKSKLVSDFRKDFQFYKVREINNYHHAHDAYLNAVVGTALIKKYPKLESEFVYGDYKVYDVRKMIAKSEQEIGKATAKYFFYSNIMNFFKTEITLANGEIRKRPLIETNGETGEIVWDKGRDFATVRKVLSMPQVNIVKKTEVQTGGFSKESILPKRNSDKLIARKKDWDPKKYGGFDSPTVAYSVLVVAKVEKGKSKKLKSVKELLGITIMERSSFEKNPIDFLEAKGYKEVKKDLIIKLPKYSLFELENGRKRMLASAGELQKGNELALPSKYVNFLYLASHYEKLKGSPEDNEQKQLFVEQHKHYLDEIIEQISEFSKRVILADANLDKVLSAYNKHRDKPIREQAENIIHLFTLTNLGAPAAFKYFDTTIDRKRYTSTKEVLDATLIHQSITGLYETRIDLSQLGGDGGPAPGSSEAAAKGGTLNIEDEYRLHETSKGPDVPLGSTWLSDFPQAWAETGGMGLAVRQAPLIIPLKATSTPVSIKQYPMSQEARLGIKPHIQRLLDQGILVPCQSPWNTPLLPVKKPGTNDYRPVQDLREVNKRVEDIHPTVPNPYNLLSGLPPSHQWYTVLDLKDAFFCLRLHPTSQSLFAFEWRDPEMGISGQLTWTRLPQGFKNSPTLFNEALHRDLADFRIQHPDLILLQYVDDLLLAATSELDCQQGTRALLQTLGDLGYRASAKKAQICQKQVKYLGYLLKEGQRWLTEARKETVMGQPTPKTPRQLREFLGTAGFCRLWIPGFAEMAAPLYPLTKPGTLFEWGPDQQKAYQEIKQALLTAPALGLPDLTKPFELFVDEKQGYAKGVLTQKLGPWRRPVAYLSKKLDPVAAGWPPCLRMVAAIAVLTKDAGKLTMGQPLVILAPHAVEALVKQPPDRWLSNARMTHYQALLLDTDRVQFGPIVALNPATLLPLPEEGLQHDCLDILAEAHGTRPDLTDQPLPDADHTWYTDGSSFLQEGQRKAGAAVTTETEVVWAKALPAGTSAQRAELIALTQALKMAEGKKLNVYTDSRYAFATAHIHGEIYRRRGWLTSEGKEIKNKDEILALLKALFLPKRLSIIHCPGHQKGNRAEARGNRMADQAAREVATRETPETSTLLAGKRTADGSEFEKRTADGSEFESPKKKAKVE

SEQ ID NO: 2454 - protein, 2110 aa, synthetic construct
MPAAKRVKLDGGDKKYSIGLDIGTNSVGWAVITDEYKVPSKKFKVLGNTDRHSIKKNLIGALLFDSGETAEATRLKRTARRRYTRRKNRICYLQEIFSNEMAKVDDSFFHRLEESFLVEEDKKHERHPIFGNIVDEVAYHEKYPTIYHLRKKLVDSTDKADLRLIYLALAHMIKFRGHFLIEGDLNPDNSDVDKLFIQLVQTYNQLFEENPINASGVDAKAILSARLSKSRRLENLIAQLPGEKKNGLFGNLIALSLGLTPNFKSNFDLAEDAKLQLSKDTYDDDLDNLLAQIGDQYADLFLAAKNLSDAILLSDILRVNTEITKAPLSASMIKRYDEHHQDLTLLKALVRQQLPEKYKEIFFDQSKNGYAGYIDGGASQEEFYKFIKPILEKMDGTEELLVKLNREDLLRKQRTFDNGSIPHQIHLGELHAILRRQEDFYPFLKDNREKIEKILTFRIPYYVGPLARGNSRFAWMTRKSEETITPWNFEEVVDKGASAQSFIERMTNFDKNLPNEKVLPKHSLLYEYFTVYNELTKVKYVTEGMRKPAFLSGEQKKAIVDLLFKTNRKVTVKQLKEDYFKKIECFDSVEISGVEDRFNASLGTYHDLLKIIKDKDFLDNEENEDILEDIVLTLTLFEDREMIEERLKTYAHLFDDKVMKQLKRRRYTGWGRLSRKLINGIRDKQSGKTILDFLKSDGFANRNFMQLIHDDSLTFKEDIQKAQVSGQGDSLHEHIANLAGSPAIKKGILQTVKVVDELVKVMGRHKPENIVIEMARENQTTQKGQKNSRERMKRIEEGIKELGSQILKEHPVENTQLQNEKLYLYYLQNGRDMYVDQELDINRLSDYDVDHIVPQSFLKDDSIDNKVLTRSDKARGKSDNVPSEEVVKKMKNYWRQLLNAKLITQRKFDNLTKAERGGLSELDKAGFIKRQLVETRQITKHVAQILDSRMNTKYDENDKLIREVKVITLKSKLVSDFRKDFQFYKVREINNYHHAHDAYLNAVVGTALIKKYPKLESEFVYGDYKVYDVRKMIAKSEQEIGKATAKYFFYSNIMNFFKTEITLANGEIRKRPLIETNGETGEIVWDKGRDFATVRKVLSMPQVNIVKKTEVQTGGFSKESILPKRNSDKLIARKKDWDPKKYGGFDSPTVAYSVLVVAKVEKGKSKKLKSVKELLGITIMERSSFEKNPIDFLEAKGYKEVKKDLIIKLPKYSLFELENGRKRMLASAGELQKGNELALPSKYVNFLYLASHYEKLKGSPEDNEQKQLFVEQHKHYLDEIIEQISEFSKRVILADANLDKVLSAYNKHRDKPIREQAENIIHLFTLTNLGAPAAFKYFDTTIDRKRYTSTKEVLDATLIHQSITGLYETRIDLSQLGGDGGEAAAKEAAAKEAAAKEAAAKEAAAKGGTLNIEDEYRLHETSKGPDVPLGSTWLSDFPQAWAETGGMGLAVRQAPLIIPLKATSTPVSIKQYPMSQEARLGIKPHIQRLLDQGILVPCQSPWNTPLLPVKKPGTNDYRPVQDLREVNKRVEDIHPTVPNPYNLLSGLPPSHQWYTVLDLKDAFFCLRLHPTSQSLFAFEWRDPEMGISGQLTWTRLPQGFKNSPTLFNEALHRDLADFRIQHPDLILLQYVDDLLLAATSELDCQQGTRALLQTLGDLGYRASAKKAQICQKQVKYLGYLLKEGQRWLTEARKETVMGQPTPKTPRQLREFLGTAGFCRLWIPGFAEMAAPLYPLTKPGTLFEWGPDQQKAYQEIKQALLTAPALGLPDLTKPFELFVDEKQGYAKGVLTQKLGPWRRPVAYLSKKLDPVAAGWPPCLRMVAAIAVLTKDAGKLTMGQPLVILAPHAVEALVKQPPDRWLSNARMTHYQALLLDTDRVQFGPIVALNPATLLPLPEEGLQHDCLDILAEAHGTRPDLTDQPLPDADHTWYTDGSSFLQEGQRKAGAAVTTETEVVWAKALPAGTSAQRAELIALTQALKMAEGKKLNVYTDSRYAFATAHIHGEIYRRRGWLTSEGKEIKNKDEILALLKALFLPKRLSIIHCPGHQKGNRAEARGNRMADQAAREVATRETPETSTLLAGKRTADGSEFEKRTADGSEFESPKKKAKVE

SEQ ID NO: 2455 - protein, 2115 aa, synthetic construct
MPAAKRVKLDGGDKKYSIGLDIGTNSVGWAVITDEYKVPSKKFKVLGNTDRHSIKKNLIGALLFDSGETAEATRLKRTARRRYTRRKNRICYLQEIFSNEMAKVDDSFFHRLEESFLVEEDKKHERHPIFGNIVDEVAYHEKYPTIYHLRKKLVDSTDKADLRLIYLALAHMIKFRGHFLIEGDLNPDNSDVDKLFIQLVQTYNQLFEENPINASGVDAKAILSARLSKSRRLENLIAQLPGEKKNGLFGNLIALSLGLTPNFKSNFDLAEDAKLQLSKDTYDDDLDNLLAQIGDQYADLFLAAKNLSDAILLSDILRVNTEITKAPLSASMIKRYDEHHQDLTLLKALVRQQLPEKYKEIFFDQSKNGYAGYIDGGASQEEFYKFIKPILEKMDGTEELLVKLNREDLLRKQRTFDNGSIPHQIHLGELHAILRRQEDFYPFLKDNREKIEKILTFRIPYYVGPLARGNSRFAWMTRKSEETITPWNFEEVVDKGASAQSFIERMTNFDKNLPNEKVLPKHSLLYEYFTVYNELTKVKYVTEGMRKPAFLSGEQKKAIVDLLFKTNRKVTVKQLKEDYFKKIECFDSVEISGVEDRFNASLGTYHDLLKIIKDKDFLDNEENEDILEDIVLTLTLFEDREMIEERLKTYAHLFDDKVMKQLKRRRYTGWGRLSRKLINGIRDKQSGKTILDFLKSDGFANRNFMQLIHDDSLTFKEDIQKAQVSGQGDSLHEHIANLAGSPAIKKGILQTVKVVDELVKVMGRHKPENIVIEMARENQTTQKGQKNSRERMKRIEEGIKELGSQILKEHPVENTQLQNEKLYLYYLQNGRDMYVDQELDINRLSDYDVDHIVPQSFLKDDSIDNKVLTRSDKARGKSDNVPSEEVVKKMKNYWRQLLNAKLITQRKFDNLTKAERGGLSELDKAGFIKRQLVETRQITKHVAQILDSRMNTKYDENDKLIREVKVITLKSKLVSDFRKDFQFYKVREINNYHHAHDAYLNAVVGTALIKKYPKLESEFVYGDYKVYDVRKMIAKSEQEIGKATAKYFFYSNIMNFFKTEITLANGEIRKRPLIETNGETGEIVWDKGRDFATVRKVLSMPQVNIVKKTEVQTGGFSKESILPKRNSDKLIARKKDWDPKKYGGFDSPTVAYSVLVVAKVEKGKSKKLKSVKELLGITIMERSSFEKNPIDFLEAKGYKEVKKDLIIKLPKYSLFELENGRKRMLASAGELQKGNELALPSKYVNFLYLASHYEKLKGSPEDNEQKQLFVEQHKHYLDEIIEQISEFSKRVILADANLDKVLSAYNKHRDKPIREQAENIIHLFTLTNLGAPAAFKYFDTTIDRKRYTSTKEVLDATLIHQSITGLYETRIDLSQLGGDGGEAAAKEAAAKEAAAKEAAAKEAAAKEAAAKGGTLNIEDEYRLHETSKGPDVPLGSTWLSDFPQAWAETGGMGLAVRQAPLIIPLKATSTPVSIKQYPMSQEARLGIKPHIQRLLDQGILVPCQSPWNTPLLPVKKPGTNDYRPVQDLREVNKRVEDIHPTVPNPYNLLSGLPPSHQWYTVLDLKDAFFCLRLHPTSQSLFAFEWRDPEMGISGQLTWTRLPQGFKNSPTLFNEALHRDLADFRIQHPDLILLQYVDDLLLAATSELDCQQGTRALLQTLGDLGYRASAKKAQICQKQVKYLGYLLKEGQRWLTEARKETVMGQPTPKTPRQLREFLGTAGFCRLWIPGFAEMAAPLYPLTKPGTLFEWGPDQQKAYQEIKQALLTAPALGLPDLTKPFELFVDEKQGYAKGVLTQKLGPWRRPVAYLSKKLDPVAAGWPPCLRMVAAIAVLTKDAGKLTMGQPLVILAPHAVEALVKQPPDRWLSNARMTHYQALLLDTDRVQFGPIVALNPATLLPLPEEGLQHDCLDILAEAHGTRPDLTDQPLPDADHTWYTDGSSFLQEGQRKAGAAVTTETEVVWAKALPAGTSAQRAELIALTQALKMAEGKKLNVYTDSRYAFATAHIHGEIYRRRGWLTSEGKEIKNKDEILALLKALFLPKRLSIIHCPGHQKGNRAEARGNRMADQAAREVATRETPETSTLLAGKRTADGSEFEKRTADGSEFESPKKKAKVE

SEQ ID NO: 2456 - protein, 2093 aa, synthetic construct
MPAAKRVKLDGGDKKYSIGLDIGTNSVGWAVITDEYKVPSKKFKVLGNTDRHSIKKNLIGALLFDSGETAEATRLKRTARRRYTRRKNRICYLQEIFSNEMAKVDDSFFHRLEESFLVEEDKKHERHPIFGNIVDEVAYHEKYPTIYHLRKKLVDSTDKADLRLIYLALAHMIKFRGHFLIEGDLNPDNSDVDKLFIQLVQTYNQLFEENPINASGVDAKAILSARLSKSRRLENLIAQLPGEKKNGLFGNLIALSLGLTPNFKSNFDLAEDAKLQLSKDTYDDDLDNLLAQIGDQYADLFLAAKNLSDAILLSDILRVNTEITKAPLSASMIKRYDEHHQDLTLLKALVRQQLPEKYKEIFFDQSKNGYAGYIDGGASQEEFYKFIKPILEKMDGTEELLVKLNREDLLRKQRTFDNGSIPHQIHLGELHAILRRQEDFYPFLKDNREKIEKILTFRIPYYVGPLARGNSRFAWMTRKSEETITPWNFEEVVDKGASAQSFIERMTNFDKNLPNEKVLPKHSLLYEYFTVYNELTKVKYVTEGMRKPAFLSGEQKKAIVDLLFKTNRKVTVKQLKEDYFKKIECFDSVEISGVEDRFNASLGTYHDLLKIIKDKDFLDNEENEDILEDIVLTLTLFEDREMIEERLKTYAHLFDDKVMKQLKRRRYTGWGRLSRKLINGIRDKQSGKTILDFLKSDGFANRNFMQLIHDDSLTFKEDIQKAQVSGQGDSLHEHIANLAGSPAIKKGILQTVKVVDELVKVMGRHKPENIVIEMARENQTTQKGQKNSRERMKRIEEGIKELGSQILKEHPVENTQLQNEKLYLYYLQNGRDMYVDQELDINRLSDYDVDHIVPQSFLKDDSIDNKVLTRSDKARGKSDNVPSEEVVKKMKNYWRQLLNAKLITQRKFDNLTKAERGGLSELDKAGFIKRQLVETRQITKHVAQILDSRMNTKYDENDKLIREVKVITLKSKLVSDFRKDFQFYKVREINNYHHAHDAYLNAVVGTALIKKYPKLESEFVYGDYKVYDVRKMIAKSEQEIGKATAKYFFYSNIMNFFKTEITLANGEIRKRPLIETNGETGEIVWDKGRDFATVRKVLSMPQVNIVKKTEVQTGGFSKESILPKRNSDKLIARKKDWDPKKYGGFDSPTVAYSVLVVAKVEKGKSKKLKSVKELLGITIMERSSFEKNPIDFLEAKGYKEVKKDLIIKLPKYSLFELENGRKRMLASAGELQKGNELALPSKYVNFLYLASHYEKLKGSPEDNEQKQLFVEQHKHYLDEIIEQISEFSKRVILADANLDKVLSAYNKHRDKPIREQAENIIHLFTLTNLGAPAAFKYFDTTIDRKRYTSTKEVLDATLIHQSITGLYETRIDLSQLGGDGGEAAAKGGSGGTLNIEDEYRLHETSKGPDVPLGSTWLSDFPQAWAETGGMGLAVRQAPLIIPLKATSTPVSIKQYPMSQEARLGIKPHIQRLLDQGILVPCQSPWNTPLLPVKKPGTNDYRPVQDLREVNKRVEDIHPTVPNPYNLLSGLPPSHQWYTVLDLKDAFFCLRLHPTSQSLFAFEWRDPEMGISGQLTWTRLPQGFKNSPTLFNEALHRDLADFRIQHPDLILLQYVDDLLLAATSELDCQQGTRALLQTLGDLGYRASAKKAQICQKQVKYLGYLLKEGQRWLTEARKETVMGQPTPKTPRQLREFLGTAGFCRLWIPGFAEMAAPLYPLTKPGTLFEWGPDQQKAYQEIKQALLTAPALGLPDLTKPFELFVDEKQGYAKGVLTQKLGPWRRPVAYLSKKLDPVAAGWPPCLRMVAAIAVLTKDAGKLTMGQPLVILAPHAVEALVKQPPDRWLSNARMTHYQALLLDTDRVQFGPIVALNPATLLPLPEEGLQHDCLDILAEAHGTRPDLTDQPLPDADHTWYTDGSSFLQEGQRKAGAAVTTETEVVWAKALPAGTSAQRAELIALTQALKMAEGKKLNVYTDSRYAFATAHIHGEIYRRRGWLTSEGKEIKNKDEILALLKALFLPKRLSIIHCPGHQKGNRAEARGNRMADQAAREVATRETPETSTLLAGKRTADGSEFEKRTADGSEFESPKKKAKVE

SEQ ID NO: 2457 - protein, 2096 aa, synthetic construct
MPAAKRVKLDGGDKKYSIGLDIGTNSVGWAVITDEYKVPSKKFKVLGNTDRHSIKKNLIGALLFDSGETAEATRLKRTARRRYTRRKNRICYLQEIFSNEMAKVDDSFFHRLEESFLVEEDKKHERHPIFGNIVDEVAYHEKYPTIYHLRKKLVDSTDKADLRLIYLALAHMIKFRGHFLIEGDLNPDNSDVDKLFIQLVQTYNQLFEENPINASGVDAKAILSARLSKSRRLENLIAQLPGEKKNGLFGNLIALSLGLTPNFKSNFDLAEDAKLQLSKDTYDDDLDNLLAQIGDQYADLFLAAKNLSDAILLSDILRVNTEITKAPLSASMIKRYDEHHQDLTLLKALVRQQLPEKYKEIFFDQSKNGYAGYIDGGASQEEFYKFIKPILEKMDGTEELLVKLNREDLLRKQRTFDNGSIPHQIHLGELHAILRRQEDFYPFLKDNREKIEKILTFRIPYYVGPLARGNSRFAWMTRKSEETITPWNFEEVVDKGASAQSFIERMTNFDKNLPNEKVLPKHSLLYEYFTVYNELTKVKYVTEGMRKPAFLSGEQKKAIVDLLFKTNRKVTVKQLKEDYFKKIECFDSVEISGVEDRFNASLGTYHDLLKIIKDKDFLDNEENEDILEDIVLTLTLFEDREMIEERLKTYAHLFDDKVMKQLKRRRYTGWGRLSRKLINGIRDKQSGKTILDFLKSDGFANRNFMQLIHDDSLTFKEDIQKAQVSGQGDSLHEHIANLAGSPAIKKGILQTVKVVDELVKVMGRHKPENIVIEMARENQTTQKGQKNSRERMKRIEEGIKELGSQILKEHPVENTQLQNEKLYLYYLQNGRDMYVDQELDINRLSDYDVDHIVPQSFLKDDSIDNKVLTRSDKARGKSDNVPSEEVVKKMKNYWRQLLNAKLITQRKFDNLTKAERGGLSELDKAGFIKRQLVETRQITKHVAQILDSRMNTKYDENDKLIREVKVITLKSKLVSDFRKDFQFYKVREINNYHHAHDAYLNAVVGTALIKKYPKLESEFVYGDYKVYDVRKMIAKSEQEIGKATAKYFFYSNIMNFFKTEITLANGEIRKRPLIETNGETGEIVWDKGRDFATVRKVLSMPQVNIVKKTEVQTGGFSKESILPKRNSDKLIARKKDWDPKKYGGFDSPTVAYSVLVVAKVEKGKSKKLKSVKELLGITIMERSSFEKNPIDFLEAKGYKEVKKDLIIKLPKYSLFELENGRKRMLASAGELQKGNELALPSKYVNFLYLASHYEKLKGSPEDNEQKQLFVEQHKHYLDEIIEQISEFSKRVILADANLDKVLSAYNKHRDKPIREQAENIIHLFTLTNLGAPAAFKYFDTTIDRKRYTSTKEVLDATLIHQSITGLYETRIDLSQLGGDGGEAAAKGGGPAPGGTLNIEDEYRLHETSKGPDVPLGSTWLSDFPQAWAETGGMGLAVRQAPLIIPLKATSTPVSIKQYPMSQEARLGIKPHIQRLLDQGILVPCQSPWNTPLLPVKKPGTNDYRPVQDLREVNKRVEDIHPTVPNPYNLLSGLPPSHQWYTVLDLKDAFFCLRLHPTSQSLFAFEWRDPEMGISGQLTWTRLPQGFKNSPTLFNEALHRDLADFRIQHPDLILLQYVDDLLLAATSELDCQQGTRALLQTLGDLGYRASAKKAQICQKQVKYLGYLLKEGQRWLTEARKETVMGQPTPKTPRQLREFLGTAGFCRLWIPGFAEMAAPLYPLTKPGTLFEWGPDQQKAYQEIKQALLTAPALGLPDLTKPFELFVDEKQGYAKGVLTQKLGPWRRPVAYLSKKLDPVAAGWPPCLRMVAAIAVLTKDAGKLTMGQPLVILAPHAVEALVKQPPDRWLSNARMTHYQALLLDTDRVQFGPIVALNPATLLPLPEEGLQHDCLDILAEAHGTRPDLTDQPLPDADHTWYTDGSSFLQEGQRKAGAAVTTETEVVWAKALPAGTSAQRAELIALTQALKMAEGKKLNVYTDSRYAFATAHIHGEIYRRRGWLTSEGKEIKNKDEILALLKALFLPKRLSIIHCPGHQKGNRAEARGNRMADQAAREVATRETPETSTLLAGKRTADGSEFEKRTADGSEFESPKKKAKVE

SEQ ID NO: 2458 - protein, 2096 aa, synthetic construct
MPAAKRVKLDGGDKKYSIGLDIGTNSVGWAVITDEYKVPSKKFKVLGNTDRHSIKKNLIGALLFDSGETAEATRLKRTARRRYTRRKNRICYLQEIFSNEMAKVDDSFFHRLEESFLVEEDKKHERHPIFGNIVDEVAYHEKYPTIYHLRKKLVDSTDKADLRLIYLALAHMIKFRGHFLIEGDLNPDNSDVDKLFIQLVQTYNQLFEENPINASGVDAKAILSARLSKSRRLENLIAQLPGEKKNGLFGNLIALSLGLTPNFKSNFDLAEDAKLQLSKDTYDDDLDNLLAQIGDQYADLFLAAKNLSDAILLSDILRVNTEITKAPLSASMIKRYDEHHQDLTLLKALVRQQLPEKYKEIFFDQSKNGYAGYIDGGASQEEFYKFIKPILEKMDGTEELLVKLNREDLLRKQRTFDNGSIPHQIHLGELHAILRRQEDFYPFLKDNREKIEKILTFRIPYYVGPLARGNSRFAWMTRKSEETITPWNFEEVVDKGASAQSFIERMTNFDKNLPNEKVLPKHSLLYEYFTVYNELTKVKYVTEGMRKPAFLSGEQKKAIVDLLFKTNRKVTVKQLKEDYFKKIECFDSVEISGVEDRFNASLGTYHDLLKIIKDKDFLDNEENEDILEDIVLTLTLFEDREMIEERLKTYAHLFDDKVMKQLKRRRYTGWGRLSRKLINGIRDKQSGKTILDFLKSDGFANRNFMQLIHDDSLTFKEDIQKAQVSGQGDSLHEHIANLAGSPAIKKGILQTVKVVDELVKVMGRHKPENIVIEMARENQTTQKGQKNSRERMKRIEEGIKELGSQILKEHPVENTQLQNEKLYLYYLQNGRDMYVDQELDINRLSDYDVDHIVPQSFLKDDSIDNKVLTRSDKARGKSDNVPSEEVVKKMKNYWRQLLNAKLITQRKFDNLTKAERGGLSELDKAGFIKRQLVETRQITKHVAQILDSRMNTKYDENDKLIREVKVITLKSKLVSDFRKDFQFYKVREINNYHHAHDAYLNAVVGTALIKKYPKLESEFVYGDYKVYDVRKMIAKSEQEIGKATAKYFFYSNIMNFFKTEITLANGEIRKRPLIETNGETGEIVWDKGRDFATVRKVLSMPQVNIVKKTEVQTGGFSKESILPKRNSDKLIARKKDWDPKKYGGFDSPTVAYSVLVVAKVEKGKSKKLKSVKELLGITIMERSSFEKNPIDFLEAKGYKEVKKDLIIKLPKYSLFELENGRKRMLASAGELQKGNELALPSKYVNFLYLASHYEKLKGSPEDNEQKQLFVEQHKHYLDEIIEQISEFSKRVILADANLDKVLSAYNKHRDKPIREQAENIIHLFTLTNLGAPAAFKYFDTTIDRKRYTSTKEVLDATLIHQSITGLYETRIDLSQLGGDGGGSSEAAAKGGGGGTLNIEDEYRLHETSKGPDVPLGSTWLSDFPQAWAETGGMGLAVRQAPLIIPLKATSTPVSIKQYPMSQEARLGIKPHIQRLLDQGILVPCQSPWNTPLLPVKKPGTNDYRPVQDLREVNKRVEDIHPTVPNPYNLLSGLPPSHQWYTVLDLKDAFFCLRLHPTSQSLFAFEWRDPEMGISGQLTWTRLPQGFKNSPTLFNEALHRDLADFRIQHPDLILLQYVDDLLLAATSELDCQQGTRALLQTLGDLGYRASAKKAQICQKQVKYLGYLLKEGQRWLTEARKETVMGQPTPKTPRQLREFLGTAGFCRLWIPGFAEMAAPLYPLTKPGTLFEWGPDQQKAYQEIKQALLTAPALGLPDLTKPFELFVDEKQGYAKGVLTQKLGPWRRPVAYLSKKLDPVAAGWPPCLRMVAAIAVLTKDAGKLTMGQPLVILAPHAVEALVKQPPDRWLSNARMTHYQALLLDTDRVQFGPIVALNPATLLPLPEEGLQHDCLDILAEAHGTRPDLTDQPLPDADHTWYTDGSSFLQEGQRKAGAAVTTETEVVWAKALPAGTSAQRAELIALTQALKMAEGKKLNVYTDSRYAFATAHIHGEIYRRRGWLTSEGKEIKNKDEILALLKALFLPKRLSIIHCPGHQKGNRAEARGNRMADQAAREVATRETPETSTLLAGKRTADGSEFEKRTADGSEFESPKKKAKVE

SEQ ID NO: 2459 - protein, 2096 aa, synthetic construct
MPAAKRVKLDGGDKKYSIGLDIGTNSVGWAVITDEYKVPSKKFKVLGNTDRHSIKKNLIGALLFDSGETAEATRLKRTARRRYTRRKNRICYLQEIFSNEMAKVDDSFFHRLEESFLVEEDKKHERHPIFGNIVDEVAYHEKYPTIYHLRKKLVDSTDKADLRLIYLALAHMIKFRGHFLIEGDLNPDNSDVDKLFIQLVQTYNQLFEENPINASGVDAKAILSARLSKSRRLENLIAQLPGEKKNGLFGNLIALSLGLTPNFKSNFDLAEDAKLQLSKDTYDDDLDNLLAQIGDQYADLFLAAKNLSDAILLSDILRVNTEITKAPLSASMIKRYDEHHQDLTLLKALVRQQLPEKYKEIFFDQSKNGYAGYIDGGASQEEFYKFIKPILEKMDGTEELLVKLNREDLLRKQRTFDNGSIPHQIHLGELHAILRRQEDFYPFLKDNREKIEKILTFRIPYYVGPLARGNSRFAWMTRKSEETITPWNFEEVVDKGASAQSFIERMTNFDKNLPNEKVLPKHSLLYEYFTVYNELTKVKYVTEGMRKPAFLSGEQKKAIVDLLFKTNRKVTVKQLKEDYFKKIECFDSVEISGVEDRFNASLGTYHDLLKIIKDKDFLDNEENEDILEDIVLTLTLFEDREMIEERLKTYAHLFDDKVMKQLKRRRYTGWGRLSRKLINGIRDKQSGKTILDFLKSDGFANRNFMQLIHDDSLTFKEDIQKAQVSGQGDSLHEHIANLAGSPAIKKGILQTVKVVDELVKVMGRHKPENIVIEMARENQTTQKGQKNSRERMKRIEEGIKELGSQILKEHPVENTQLQNEKLYLYYLQNGRDMYVDQELDINRLSDYDVDHIVPQSFLKDDSIDNKVLTRSDKARGKSDNVPSEEVVKKMKNYWRQLLNAKLITQRKFDNLTKAERGGLSELDKAGFIKRQLVETRQITKHVAQILDSRMNTKYDENDKLIREVKVITLKSKLVSDFRKDFQFYKVREINNYHHAHDAYLNAVVGTALIKKYPKLESEFVYGDYKVYDVRKMIAKSEQEIGKATAKYFFYSNIMNFFKTEITLANGEIRKRPLIETNGETGEIVWDKGRDFATVRKVLSMPQVNIVKKTEVQTGGFSKESILPKRNSDKLIARKKDWDPKKYGGFDSPTVAYSVLVVAKVEKGKSKKLKSVKELLGITIMERSSFEKNPIDFLEAKGYKEVKKDLIIKLPKYSLFELENGRKRMLASAGELQKGNELALPSKYVNFLYLASHYEKLKGSPEDNEQKQLFVEQHKHYLDEIIEQISEFSKRVILADANLDKVLSAYNKHRDKPIREQAENIIHLFTLTNLGAPAAFKYFDTTIDRKRYTSTKEVLDATLIHQSITGLYETRIDLSQLGGDGGGGSGGGEAAAKGGTLNIEDEYRLHETSKGPDVPLGSTWLSDFPQAWAETGGMGLAVRQAPLIIPLKATSTPVSIKQYPMSQEARLGIKPHIQRLLDQGILVPCQSPWNTPLLPVKKPGTNDYRPVQDLREVNKRVEDIHPTVPNPYNLLSGLPPSHQWYTVLDLKDAFFCLRLHPTSQSLFAFEWRDPEMGISGQLTWTRLPQGFKNSPTLFNEALHRDLADFRIQHPDLILLQYVDDLLLAATSELDCQQGTRALLQTLGDLGYRASAKKAQICQKQVKYLGYLLKEGQRWLTEARKETVMGQPTPKTPRQLREFLGTAGFCRLWIPGFAEMAAPLYPLTKPGTLFEWGPDQQKAYQEIKQALLTAPALGLPDLTKPFELFVDEKQGYAKGVLTQKLGPWRRPVAYLSKKLDPVAAGWPPCLRMVAAIAVLTKDAGKLTMGQPLVILAPHAVEALVKQPPDRWLSNARMTHYQALLLDTDRVQFGPIVALNPATLLPLPEEGLQHDCLDILAEAHGTRPDLTDQPLPDADHTWYTDGSSFLQEGQRKAGAAVTTETEVVWAKALPAGTSAQRAELIALTQALKMAEGKKLNVYTDSRYAFATAHIHGEIYRRRGWLTSEGKEIKNKDEILALLKALFLPKRLSIIHCPGHQKGNRAEARGNRMADQAAREVATRETPETSTLLAGKRTADGSEFEKRTADGSEFESPKKKAKVE

SEQ ID NO: 2460 - protein, 2096 aa, synthetic construct
MPAAKRVKLDGGDKKYSIGLDIGTNSVGWAVITDEYKVPSKKFKVLGNTDRHSIKKNLIGALLFDSGETAEATRLKRTARRRYTRRKNRICYLQEIFSNEMAKVDDSFFHRLEESFLVEEDKKHERHPIFGNIVDEVAYHEKYPTIYHLRKKLVDSTDKADLRLIYLALAHMIKFRGHFLIEGDLNPDNSDVDKLFIQLVQTYNQLFEENPINASGVDAKAILSARLSKSRRLENLIAQLPGEKKNGLFGNLIALSLGLTPNFKSNFDLAEDAKLQLSKDTYDDDLDNLLAQIGDQYADLFLAAKNLSDAILLSDILRVNTEITKAPLSASMIKRYDEHHQDLTLLKALVRQQLPEKYKEIFFDQSKNGYAGYIDGGASQEEFYKFIKPILEKMDGTEELLVKLNREDLLRKQRTFDNGSIPHQIHLGELHAILRRQEDFYPFLKDNREKIEKILTFRIPYYVGPLARGNSRFAWMTRKSEETITPWNFEEVVDKGASAQSFIERMTNFDKNLPNEKVLPKHSLLYEYFTVYNELTKVKYVTEGMRKPAFLSGEQKKAIVDLLFKTNRKVTVKQLKEDYFKKIECFDSVEISGVEDRFNASLGTYHDLLKIIKDKDFLDNEENEDILEDIVLTLTLFEDREMIEERLKTYAHLFDDKVMKQLKRRRYTGWGRLSRKLINGIRDKQSGKTILDFLKSDGFANRNFMQLIHDDSLTFKEDIQKAQVSGQGDSLHEHIANLAGSPAIKKGILQTVKVVDELVKVMGRHKPENIVIEMARENQTTQKGQKNSRERMKRIEEGIKELGSQILKEHPVENTQLQNEKLYLYYLQNGRDMYVDQELDINRLSDYDVDHIVPQSFLKDDSIDNKVLTRSDKARGKSDNVPSEEVVKKMKNYWRQLLNAKLITQRKFDNLTKAERGGLSELDKAGFIKRQLVETRQITKHVAQILDSRMNTKYDENDKLIREVKVITLKSKLVSDFRKDFQFYKVREINNYHHAHDAYLNAVVGTALIKKYPKLESEFVYGDYKVYDVRKMIAKSEQEIGKATAKYFFYSNIMNFFKTEITLANGEIRKRPLIETNGETGEIVWDKGRDFATVRKVLSMPQVNIVKKTEVQTGGFSKESILPKRNSDKLIARKKDWDPKKYGGFDSPTVAYSVLVVAKVEKGKSKKLKSVKELLGITIMERSSFEKNPIDFLEAKGYKEVKKDLIIKLPKYSLFELENGRKRMLASAGELQKGNELALPSKYVNFLYLASHYEKLKGSPEDNEQKQLFVEQHKHYLDEIIEQISEFSKRVILADANLDKVLSAYNKHRDKPIREQAENIIHLFTLTNLGAPAAFKYFDTTIDRKRYTSTKEVLDATLIHQSITGLYETRIDLSQLGGDGGEAAAKGGSGSSGGTLNIEDEYRLHETSKGPDVPLGSTWLSDFPQAWAETGGMGLAVRQAPLIIPLKATSTPVSIKQYPMSQEARLGIKPHIQRLLDQGILVPCQSPWNTPLLPVKKPGTNDYRPVQDLREVNKRVEDIHPTVPNPYNLLSGLPPSHQWYTVLDLKDAFFCLRLHPTSQSLFAFEWRDPEMGISGQLTWTRLPQGFKNSPTLFNEALHRDLADFRIQHPDLILLQYVDDLLLAATSELDCQQGTRALLQTLGDLGYRASAKKAQICQKQVKYLGYLLKEGQRWLTEARKETVMGQPTPKTPRQLREFLGTAGFCRLWIPGFAEMAAPLYPLTKPGTLFEWGPDQQKAYQEIKQALLTAPALGLPDLTKPFELFVDEKQGYAKGVLTQKLGPWRRPVAYLSKKLDPVAAGWPPCLRMVAAIAVLTKDAGKLTMGQPLVILAPHAVEALVKQPPDRWLSNARMTHYQALLLDTDRVQFGPIVALNPATLLPLPEEGLQHDCLDILAEAHGTRPDLTDQPLPDADHTWYTDGSSFLQEGQRKAGAAVTTETEVVWAKALPAGTSAQRAELIALTQALKMAEGKKLNVYTDSRYAFATAHIHGEIYRRRGWLTSEGKEIKNKDEILALLKALFLPKRLSIIHCPGHQKGNRAEARGNRMADQAAREVATRETPETSTLLAGKRTADGSEFEKRTADGSEFESPKKKAKVE

SEQ ID NO: 2461 - protein, 2096 aa, synthetic construct
MPAAKRVKLDGGDKKYSIGLDIGTNSVGWAVITDEYKVPSKKFKVLGNTDRHSIKKNLIGALLFDSGETAEATRLKRTARRRYTRRKNRICYLQEIFSNEMAKVDDSFFHRLEESFLVEEDKKHERHPIFGNIVDEVAYHEKYPTIYHLRKKLVDSTDKADLRLIYLALAHMIKFRGHFLIEGDLNPDNSDVDKLFIQLVQTYNQLFEENPINASGVDAKAILSARLSKSRRLENLIAQLPGEKKNGLFGNLIALSLGLTPNFKSNFDLAEDAKLQLSKDTYDDDLDNLLAQIGDQYADLFLAAKNLSDAILLSDILRVNTEITKAPLSASMIKRYDEHHQDLTLLKALVRQQLPEKYKEIFFDQSKNGYAGYIDGGASQEEFYKFIKPILEKMDGTEELLVKLNREDLLRKQRTFDNGSIPHQIHLGELHAILRRQEDFYPFLKDNREKIEKILTFRIPYYVGPLARGNSRFAWMTRKSEETITPWNFEEVVDKGASAQSFIERMTNFDKNLPNEKVLPKHSLLYEYFTVYNELTKVKYVTEGMRKPAFLSGEQKKAIVDLLFKTNRKVTVKQLKEDYFKKIECFDSVEISGVEDRFNASLGTYHDLLKIIKDKDFLDNEENEDILEDIVLTLTLFEDREMIEERLKTYAHLFDDKVMKQLKRRRYTGWGRLSRKLINGIRDKQSGKTILDFLKSDGFANRNFMQLIHDDSLTFKEDIQKAQVSGQGDSLHEHIANLAGSPAIKKGILQTVKVVDELVKVMGRHKPENIVIEMARENQTTQKGQKNSRERMKRIEEGIKELGSQILKEHPVENTQLQNEKLYLYYLQNGRDMYVDQELDINRLSDYDVDHIVPQSFLKDDSIDNKVLTRSDKARGKSDNVPSEEVVKKMKNYWRQLLNAKLITQRKFDNLTKAERGGLSELDKAGFIKRQLVETRQITKHVAQILDSRMNTKYDENDKLIREVKVITLKSKLVSDFRKDFQFYKVREINNYHHAHDAYLNAVVGTALIKKYPKLESEFVYGDYKVYDVRKMIAKSEQEIGKATAKYFFYSNIMNFFKTEITLANGEIRKRPLIETNGETGEIVWDKGRDFATVRKVLSMPQVNIVKKTEVQTGGFSKESILPKRNSDKLIARKKDWDPKKYGGFDSPTVAYSVLVVAKVEKGKSKKLKSVKELLGITIMERSSFEKNPIDFLEAKGYKEVKKDLIIKLPKYSLFELENGRKRMLASAGELQKGNELALPSKYVNFLYLASHYEKLKGSPEDNEQKQLFVEQHKHYLDEIIEQISEFSKRVILADANLDKVLSAYNKHRDKPIREQAENIIHLFTLTNLGAPAAFKYFDTTIDRKRYTSTKEVLDATLIHQSITGLYETRIDLSQLGGDGGGGGGSSEAAAKGGTLNIEDEYRLHETSKGPDVPLGSTWLSDFPQAWAETGGMGLAVRQAPLIIPLKATSTPVSIKQYPMSQEARLGIKPHIQRLLDQGILVPCQSPWNTPLLPVKKPGTNDYRPVQDLREVNKRVEDIHPTVPNPYNLLSGLPPSHQWYTVLDLKDAFFCLRLHPTSQSLFAFEWRDPEMGISGQLTWTRLPQGFKNSPTLFNEALHRDLADFRIQHPDLILLQYVDDLLLAATSELDCQQGTRALLQTLGDLGYRASAKKAQICQKQVKYLGYLLKEGQRWLTEARKETVMGQPTPKTPRQLREFLGTAGFCRLWIPGFAEMAAPLYPLTKPGTLFEWGPDQQKAYQEIKQALLTAPALGLPDLTKPFELFVDEKQGYAKGVLTQKLGPWRRPVAYLSKKLDPVAAGWPPCLRMVAAIAVLTKDAGKLTMGQPLVILAPHAVEALVKQPPDRWLSNARMTHYQALLLDTDRVQFGPIVALNPATLLPLPEEGLQHDCLDILAEAHGTRPDLTDQPLPDADHTWYTDGSSFLQEGQRKAGAAVTTETEVVWAKALPAGTSAQRAELIALTQALKMAEGKKLNVYTDSRYAFATAHIHGEIYRRRGWLTSEGKEIKNKDEILALLKALFLPKRLSIIHCPGHQKGNRAEARGNRMADQAAREVATRETPETSTLLAGKRTADGSEFEKRTADGSEFESPKKKAKVE

SEQ ID NO: 2462 - protein, 2096 aa, synthetic construct
MPAAKRVKLDGGDKKYSIGLDIGTNSVGWAVITDEYKVPSKKFKVLGNTDRHSIKKNLIGALLFDSGETAEATRLKRTARRRYTRRKNRICYLQEIFSNEMAKVDDSFFHRLEESFLVEEDKKHERHPIFGNIVDEVAYHEKYPTIYHLRKKLVDSTDKADLRLIYLALAHMIKFRGHFLIEGDLNPDNSDVDKLFIQLVQTYNQLFEENPINASGVDAKAILSARLSKSRRLENLIAQLPGEKKNGLFGNLIALSLGLTPNFKSNFDLAEDAKLQLSKDTYDDDLDNLLAQIGDQYADLFLAAKNLSDAILLSDILRVNTEITKAPLSASMIKRYDEHHQDLTLLKALVRQQLPEKYKEIFFDQSKNGYAGYIDGGASQEEFYKFIKPILEKMDGTEELLVKLNREDLLRKQRTFDNGSIPHQIHLGELHAILRRQEDFYPFLKDNREKIEKILTFRIPYYVGPLARGNSRFAWMTRKSEETITPWNFEEVVDKGASAQSFIERMTNFDKNLPNEKVLPKHSLLYEYFTVYNELTKVKYVTEGMRKPAFLSGEQKKAIVDLLFKTNRKVTVKQLKEDYFKKIECFDSVEISGVEDRFNASLGTYHDLLKIIKDKDFLDNEENEDILEDIVLTLTLFEDREMIEERLKTYAHLFDDKVMKQLKRRRYTGWGRLSRKLINGIRDKQSGKTILDFLKSDGFANRNFMQLIHDDSLTFKEDIQKAQVSGQGDSLHEHIANLAGSPAIKKGILQTVKVVDELVKVMGRHKPENIVIEMARENQTTQKGQKNSRERMKRIEEGIKELGSQILKEHPVENTQLQNEKLYLYYLQNGRDMYVDQELDINRLSDYDVDHIVPQSFLKDDSIDNKVLTRSDKARGKSDNVPSEEVVKKMKNYWRQLLNAKLITQRKFDNLTKAERGGLSELDKAGFIKRQLVETRQITKHVAQILDSRMNTKYDENDKLIREVKVITLKSKLVSDFRKDFQFYKVREINNYHHAHDAYLNAVVGTALIKKYPKLESEFVYGDYKVYDVRKMIAKSEQEIGKATAKYFFYSNIMNFFKTEITLANGEIRKRPLIETNGETGEIVWDKGRDFATVRKVLSMPQVNIVKKTEVQTGGFSKESILPKRNSDKLIARKKDWDPKKYGGFDSPTVAYSVLVVAKVEKGKSKKLKSVKELLGITIMERSSFEKNPIDFLEAKGYKEVKKDLIIKLPKYSLFELENGRKRMLASAGELQKGNELALPSKYVNFLYLASHYEKLKGSPEDNEQKQLFVEQHKHYLDEIIEQISEFSKRVILADANLDKVLSAYNKHRDKPIREQAENIIHLFTLTNLGAPAAFKYFDTTIDRKRYTSTKEVLDATLIHQSITGLYETRIDLSQLGGDGGEAAAKGGGGSSGGTLNIEDEYRLHETSKGPDVPLGSTWLSDFPQAWAETGGMGLAVRQAPLIIPLKATSTPVSIKQYPMSQEARLGIKPHIQRLLDQGILVPCQSPWNTPLLPVKKPGTNDYRPVQDLREVNKRVEDIHPTVPNPYNLLSGLPPSHQWYTVLDLKDAFFCLRLHPTSQSLFAFEWRDPEMGISGQLTWTRLPQGFKNSPTLFNEALHRDLADFRIQHPDLILLQYVDDLLLAATSELDCQQGTRALLQTLGDLGYRASAKKAQICQKQVKYLGYLLKEGQRWLTEARKETVMGQPTPKTPRQLREFLGTAGFCRLWIPGFAEMAAPLYPLTKPGTLFEWGPDQQKAYQEIKQALLTAPALGLPDLTKPFELFVDEKQGYAKGVLTQKLGPWRRPVAYLSKKLDPVAAGWPPCLRMVAAIAVLTKDAGKLTMGQPLVILAPHAVEALVKQPPDRWLSNARMTHYQALLLDTDRVQFGPIVALNPATLLPLPEEGLQHDCLDILAEAHGTRPDLTDQPLPDADHTWYTDGSSFLQEGQRKAGAAVTTETEVVWAKALPAGTSAQRAELIALTQALKMAEGKKLNVYTDSRYAFATAHIHGEIYRRRGWLTSEGKEIKNKDEILALLKALFLPKRLSIIHCPGHQKGNRAEARGNRMADQAAREVATRETPETSTLLAGKRTADGSEFEKRTADGSEFESPKKKAKVE

SEQ ID NO: 2463 - protein, 2094 aa, synthetic construct
MPAAKRVKLDGGDKKYSIGLDIGTNSVGWAVITDEYKVPSKKFKVLGNTDRHSIKKNLIGALLFDSGETAEATRLKRTARRRYTRRKNRICYLQEIFSNEMAKVDDSFFHRLEESFLVEEDKKHERHPIFGNIVDEVAYHEKYPTIYHLRKKLVDSTDKADLRLIYLALAHMIKFRGHFLIEGDLNPDNSDVDKLFIQLVQTYNQLFEENPINASGVDAKAILSARLSKSRRLENLIAQLPGEKKNGLFGNLIALSLGLTPNFKSNFDLAEDAKLQLSKDTYDDDLDNLLAQIGDQYADLFLAAKNLSDAILLSDILRVNTEITKAPLSASMIKRYDEHHQDLTLLKALVRQQLPEKYKEIFFDQSKNGYAGYIDGGASQEEFYKFIKPILEKMDGTEELLVKLNREDLLRKQRTFDNGSIPHQIHLGELHAILRRQEDFYPFLKDNREKIEKILTFRIPYYVGPLARGNSRFAWMTRKSEETITPWNFEEVVDKGASAQSFIERMTNFDKNLPNEKVLPKHSLLYEYFTVYNELTKVKYVTEGMRKPAFLSGEQKKAIVDLLFKTNRKVTVKQLKEDYFKKIECFDSVEISGVEDRFNASLGTYHDLLKIIKDKDFLDNEENEDILEDIVLTLTLFEDREMIEERLKTYAHLFDDKVMKQLKRRRYTGWGRLSRKLINGIRDKQSGKTILDFLKSDGFANRNFMQLIHDDSLTFKEDIQKAQVSGQGDSLHEHIANLAGSPAIKKGILQTVKVVDELVKVMGRHKPENIVIEMARENQTTQKGQKNSRERMKRIEEGIKELGSQILKEHPVENTQLQNEKLYLYYLQNGRDMYVDQELDINRLSDYDVDHIVPQSFLKDDSIDNKVLTRSDKARGKSDNVPSEEVVKKMKNYWRQLLNAKLITQRKFDNLTKAERGGLSELDKAGFIKRQLVETRQITKHVAQILDSRMNTKYDENDKLIREVKVITLKSKLVSDFRKDFQFYKVREINNYHHAHDAYLNAVVGTALIKKYPKLESEFVYGDYKVYDVRKMIAKSEQEIGKATAKYFFYSNIMNFFKTEITLANGEIRKRPLIETNGETGEIVWDKGRDFATVRKVLSMPQVNIVKKTEVQTGGFSKESILPKRNSDKLIARKKDWDPKKYGGFDSPTVAYSVLVVAKVEKGKSKKLKSVKELLGITIMERSSFEKNPIDFLEAKGYKEVKKDLIIKLPKYSLFELENGRKRMLASAGELQKGNELALPSKYVNFLYLASHYEKLKGSPEDNEQKQLFVEQHKHYLDEIIEQISEFSKRVILADANLDKVLSAYNKHRDKPIREQAENIIHLFTLTNLGAPAAFKYFDTTIDRKRYTSTKEVLDATLIHQSITGLYETRIDLSQLGGDGGGSSGGSGGGGGTLNIEDEYRLHETSKGPDVPLGSTWLSDFPQAWAETGGMGLAVRQAPLIIPLKATSTPVSIKQYPMSQEARLGIKPHIQRLLDQGILVPCQSPWNTPLLPVKKPGTNDYRPVQDLREVNKRVEDIHPTVPNPYNLLSGLPPSHQWYTVLDLKDAFFCLRLHPTSQSLFAFEWRDPEMGISGQLTWTRLPQGFKNSPTLFNEALHRDLADFRIQHPDLILLQYVDDLLLAATSELDCQQGTRALLQTLGDLGYRASAKKAQICQKQVKYLGYLLKEGQRWLTEARKETVMGQPTPKTPRQLREFLGTAGFCRLWIPGFAEMAAPLYPLTKPGTLFEWGPDQQKAYQEIKQALLTAPALGLPDLTKPFELFVDEKQGYAKGVLTQKLGPWRRPVAYLSKKLDPVAAGWPPCLRMVAAIAVLTKDAGKLTMGQPLVILAPHAVEALVKQPPDRWLSNARMTHYQALLLDTDRVQFGPIVALNPATLLPLPEEGLQHDCLDILAEAHGTRPDLTDQPLPDADHTWYTDGSSFLQEGQRKAGAAVTTETEVVWAKALPAGTSAQRAELIALTQALKMAEGKKLNVYTDSRYAFATAHIHGEIYRRRGWLTSEGKEIKNKDEILALLKALFLPKRLSIIHCPGHQKGNRAEARGNRMADQAAREVATRETPETSTLLAGKRTADGSEFEKRTADGSEFESPKKKAKVE

SEQ ID NO: 2464 - protein, 2105 aa, synthetic construct
MPAAKRVKLDGGDKKYSIGLDIGTNSVGWAVITDEYKVPSKKFKVLGNTDRHSIKKNLIGALLFDSGETAEATRLKRTARRRYTRRKNRICYLQEIFSNEMAKVDDSFFHRLEESFLVEEDKKHERHPIFGNIVDEVAYHEKYPTIYHLRKKLVDSTDKADLRLIYLALAHMIKFRGHFLIEGDLNPDNSDVDKLFIQLVQTYNQLFEENPINASGVDAKAILSARLSKSRRLENLIAQLPGEKKNGLFGNLIALSLGLTPNFKSNFDLAEDAKLQLSKDTYDDDLDNLLAQIGDQYADLFLAAKNLSDAILLSDILRVNTEITKAPLSASMIKRYDEHHQDLTLLKALVRQQLPEKYKEIFFDQSKNGYAGYIDGGASQEEFYKFIKPILEKMDGTEELLVKLNREDLLRKQRTFDNGSIPHQIHLGELHAILRRQEDFYPFLKDNREKIEKILTFRIPYYVGPLARGNSRFAWMTRKSEETITPWNFEEVVDKGASAQSFIERMTNFDKNLPNEKVLPKHSLLYEYFTVYNELTKVKYVTEGMRKPAFLSGEQKKAIVDLLFKTNRKVTVKQLKEDYFKKIECFDSVEISGVEDRFNASLGTYHDLLKIIKDKDFLDNEENEDILEDIVLTLTLFEDREMIEERLKTYAHLFDDKVMKQLKRRRYTGWGRLSRKLINGIRDKQSGKTILDFLKSDGFANRNFMQLIHDDSLTFKEDIQKAQVSGQGDSLHEHIANLAGSPAIKKGILQTVKVVDELVKVMGRHKPENIVIEMARENQTTQKGQKNSRERMKRIEEGIKELGSQILKEHPVENTQLQNEKLYLYYLQNGRDMYVDQELDINRLSDYDVDHIVPQSFLKDDSIDNKVLTRSDKARGKSDNVPSEEVVKKMKNYWRQLLNAKLITQRKFDNLTKAERGGLSELDKAGFIKRQLVETRQITKHVAQILDSRMNTKYDENDKLIREVKVITLKSKLVSDFRKDFQFYKVREINNYHHAHDAYLNAVVGTALIKKYPKLESEFVYGDYKVYDVRKMIAKSEQEIGKATAKYFFYSNIMNFFKTEITLANGEIRKRPLIETNGETGEIVWDKGRDFATVRKVLSMPQVNIVKKTEVQTGGFSKESILPKRNSDKLIARKKDWDPKKYGGFDSPTVAYSVLVVAKVEKGKSKKLKSVKELLGITIMERSSFEKNPIDFLEAKGYKEVKKDLIIKLPKYSLFELENGRKRMLASAGELQKGNELALPSKYVNFLYLASHYEKLKGSPEDNEQKQLFVEQHKHYLDEIIEQISEFSKRVILADANLDKVLSAYNKHRDKPIREQAENIIHLFTLTNLGAPAAFKYFDTTIDRKRYTSTKEVLDATLIHQSITGLYETRIDLSQLGGDGGGGGGSGGGGSGGGGSGGGGSGGTLNIEDEYRLHETSKGPDVPLGSTWLSDFPQAWAETGGMGLAVRQAPLIIPLKATSTPVSIKQYPMSQEARLGIKPHIQRLLDQGILVPCQSPWNTPLLPVKKPGTNDYRPVQDLREVNKRVEDIHPTVPNPYNLLSGLPPSHQWYTVLDLKDAFFCLRLHPTSQSLFAFEWRDPEMGISGQLTWTRLPQGFKNSPTLFNEALHRDLADFRIQHPDLILLQYVDDLLLAATSELDCQQGTRALLQTLGDLGYRASAKKAQICQKQVKYLGYLLKEGQRWLTEARKETVMGQPTPKTPRQLREFLGTAGFCRLWIPGFAEMAAPLYPLTKPGTLFEWGPDQQKAYQEIKQALLTAPALGLPDLTKPFELFVDEKQGYAKGVLTQKLGPWRRPVAYLSKKLDPVAAGWPPCLRMVAAIAVLTKDAGKLTMGQPLVILAPHAVEALVKQPPDRWLSNARMTHYQALLLDTDRVQFGPIVALNPATLLPLPEEGLQHDCLDILAEAHGTRPDLTDQPLPDADHTWYTDGSSFLQEGQRKAGAAVTTETEVVWAKALPAGTSAQRAELIALTQALKMAEGKKLNVYTDSRYAFATAHIHGEIYRRRGWLTSEGKEIKNKDEILALLKALFLPKRLSIIHCPGHQKGNRAEARGNRMADQAAREVATRETPETSTLLAGKRTADGSEFEKRTADGSEFESPKKKAKVE

SEQ ID NO: 2465 - protein, 2100 aa, synthetic construct
MPAAKRVKLDGGDKKYSIGLDIGTNSVGWAVITDEYKVPSKKFKVLGNTDRHSIKKNLIGALLFDSGETAEATRLKRTARRRYTRRKNRICYLQEIFSNEMAKVDDSFFHRLEESFLVEEDKKHERHPIFGNIVDEVAYHEKYPTIYHLRKKLVDSTDKADLRLIYLALAHMIKFRGHFLIEGDLNPDNSDVDKLFIQLVQTYNQLFEENPINASGVDAKAILSARLSKSRRLENLIAQLPGEKKNGLFGNLIALSLGLTPNFKSNFDLAEDAKLQLSKDTYDDDLDNLLAQIGDQYADLFLAAKNLSDAILLSDILRVNTEITKAPLSASMIKRYDEHHQDLTLLKALVRQQLPEKYKEIFFDQSKNGYAGYIDGGASQEEFYKFIKPILEKMDGTEELLVKLNREDLLRKQRTFDNGSIPHQIHLGELHAILRRQEDFYPFLKDNREKIEKILTFRIPYYVGPLARGNSRFAWMTRKSEETITPWNFEEVVDKGASAQSFIERMTNFDKNLPNEKVLPKHSLLYEYFTVYNELTKVKYVTEGMRKPAFLSGEQKKAIVDLLFKTNRKVTVKQLKEDYFKKIECFDSVEISGVEDRFNASLGTYHDLLKIIKDKDFLDNEENEDILEDIVLTLTLFEDREMIEERLKTYAHLFDDKVMKQLKRRRYTGWGRLSRKLINGIRDKQSGKTILDFLKSDGFANRNFMQLIHDDSLTFKEDIQKAQVSGQGDSLHEHIANLAGSPAIKKGILQTVKVVDELVKVMGRHKPENIVIEMARENQTTQKGQKNSRERMKRIEEGIKELGSQILKEHPVENTQLQNEKLYLYYLQNGRDMYVDQELDINRLSDYDVDHIVPQSFLKDDSIDNKVLTRSDKARGKSDNVPSEEVVKKMKNYWRQLLNAKLITQRKFDNLTKAERGGLSELDKAGFIKRQLVETRQITKHVAQILDSRMNTKYDENDKLIREVKVITLKSKLVSDFRKDFQFYKVREINNYHHAHDAYLNAVVGTALIKKYPKLESEFVYGDYKVYDVRKMIAKSEQEIGKATAKYFFYSNIMNFFKTEITLANGEIRKRPLIETNGETGEIVWDKGRDFATVRKVLSMPQVNIVKKTEVQTGGFSKESILPKRNSDKLIARKKDWDPKKYGGFDSPTVAYSVLVVAKVEKGKSKKLKSVKELLGITIMERSSFEKNPIDFLEAKGYKEVKKDLIIKLPKYSLFELENGRKRMLASAGELQKGNELALPSKYVNFLYLASHYEKLKGSPEDNEQKQLFVEQHKHYLDEIIEQISEFSKRVILADANLDKVLSAYNKHRDKPIREQAENIIHLFTLTNLGAPAAFKYFDTTIDRKRYTSTKEVLDATLIHQSITGLYETRIDLSQLGGDGGGGSGGSGGSGGSGGSGGTLNIEDEYRLHETSKGPDVPLGSTWLSDFPQAWAETGGMGLAVRQAPLIIPLKATSTPVSIKQYPMSQEARLGIKPHIQRLLDQGILVPCQSPWNTPLLPVKKPGTNDYRPVQDLREVNKRVEDIHPTVPNPYNLLSGLPPSHQWYTVLDLKDAFFCLRLHPTSQSLFAFEWRDPEMGISGQLTWTRLPQGFKNSPTLFNEALHRDLADFRIQHPDLILLQYVDDLLLAATSELDCQQGTRALLQTLGDLGYRASAKKAQICQKQVKYLGYLLKEGQRWLTEARKETVMGQPTPKTPRQLREFLGTAGFCRLWIPGFAEMAAPLYPLTKPGTLFEWGPDQQKAYQEIKQALLTAPALGLPDLTKPFELFVDEKQGYAKGVLTQKLGPWRRPVAYLSKKLDPVAAGWPPCLRMVAAIAVLTKDAGKLTMGQPLVILAPHAVEALVKQPPDRWLSNARMTHYQALLLDTDRVQFGPIVALNPATLLPLPEEGLQHDCLDILAEAHGTRPDLTDQPLPDADHTWYTDGSSFLQEGQRKAGAAVTTETEVVWAKALPAGTSAQRAELIALTQALKMAEGKKLNVYTDSRYAFATAHIHGEIYRRRGWLTSEGKEIKNKDEILALLKALFLPKRLSIIHCPGHQKGNRAEARGNRMADQAAREVATRETPETSTLLAGKRTADGSEFEKRTADGSEFESPKKKAKVE

SEQ ID NO: 2466 - protein, 2096 aa, synthetic construct
MPAAKRVKLDGGDKKYSIGLDIGTNSVGWAVITDEYKVPSKKFKVLGNTDRHSIKKNLIGALLFDSGETAEATRLKRTARRRYTRRKNRICYLQEIFSNEMAKVDDSFFHRLEESFLVEEDKKHERHPIFGNIVDEVAYHEKYPTIYHLRKKLVDSTDKADLRLIYLALAHMIKFRGHFLIEGDLNPDNSDVDKLFIQLVQTYNQLFEENPINASGVDAKAILSARLSKSRRLENLIAQLPGEKKNGLFGNLIALSLGLTPNFKSNFDLAEDAKLQLSKDTYDDDLDNLLAQIGDQYADLFLAAKNLSDAILLSDILRVNTEITKAPLSASMIKRYDEHHQDLTLLKALVRQQLPEKYKEIFFDQSKNGYAGYIDGGASQEEFYKFIKPILEKMDGTEELLVKLNREDLLRKQRTFDNGSIPHQIHLGELHAILRRQEDFYPFLKDNREKIEKILTFRIPYYVGPLARGNSRFAWMTRKSEETITPWNFEEVVDKGASAQSFIERMTNFDKNLPNEKVLPKHSLLYEYFTVYNELTKVKYVTEGMRKPAFLSGEQKKAIVDLLFKTNRKVTVKQLKEDYFKKIECFDSVEISGVEDRFNASLGTYHDLLKIIKDKDFLDNEENEDILEDIVLTLTLFEDREMIEERLKTYAHLFDDKVMKQLKRRRYTGWGRLSRKLINGIRDKQSGKTILDFLKSDGFANRNFMQLIHDDSLTFKEDIQKAQVSGQGDSLHEHIANLAGSPAIKKGILQTVKVVDELVKVMGRHKPENIVIEMARENQTTQKGQKNSRERMKRIEEGIKELGSQILKEHPVENTQLQNEKLYLYYLQNGRDMYVDQELDINRLSDYDVDHIVPQSFLKDDSIDNKVLTRSDKARGKSDNVPSEEVVKKMKNYWRQLLNAKLITQRKFDNLTKAERGGLSELDKAGFIKRQLVETRQITKHVAQILDSRMNTKYDENDKLIREVKVITLKSKLVSDFRKDFQFYKVREINNYHHAHDAYLNAVVGTALIKKYPKLESEFVYGDYKVYDVRKMIAKSEQEIGKATAKYFFYSNIMNFFKTEITLANGEIRKRPLIETNGETGEIVWDKGRDFATVRKVLSMPQVNIVKKTEVQTGGFSKESILPKRNSDKLIARKKDWDPKKYGGFDSPTVAYSVLVVAKVEKGKSKKLKSVKELLGITIMERSSFEKNPIDFLEAKGYKEVKKDLIIKLPKYSLFELENGRKRMLASAGELQKGNELALPSKYVNFLYLASHYEKLKGSPEDNEQKQLFVEQHKHYLDEIIEQISEFSKRVILADANLDKVLSAYNKHRDKPIREQAENIIHLFTLTNLGAPAAFKYFDTTIDRKRYTSTKEVLDATLIHQSITGLYETRIDLSQLGGDGGPAPEAAAKGSSGGTLNIEDEYRLHETSKGPDVPLGSTWLSDFPQAWAETGGMGLAVRQAPLIIPLKATSTPVSIKQYPMSQEARLGIKPHIQRLLDQGILVPCQSPWNTPLLPVKKPGTNDYRPVQDLREVNKRVEDIHPTVPNPYNLLSGLPPSHQWYTVLDLKDAFFCLRLHPTSQSLFAFEWRDPEMGISGQLTWTRLPQGFKNSPTLFNEALHRDLADFRIQHPDLILLQYVDDLLLAATSELDCQQGTRALLQTLGDLGYRASAKKAQICQKQVKYLGYLLKEGQRWLTEARKETVMGQPTPKTPRQLREFLGTAGFCRLWIPGFAEMAAPLYPLTKPGTLFEWGPDQQKAYQEIKQALLTAPALGLPDLTKPFELFVDEKQGYAKGVLTQKLGPWRRPVAYLSKKLDPVAAGWPPCLRMVAAIAVLTKDAGKLTMGQPLVILAPHAVEALVKQPPDRWLSNARMTHYQALLLDTDRVQFGPIVALNPATLLPLPEEGLQHDCLDILAEAHGTRPDLTDQPLPDADHTWYTDGSSFLQEGQRKAGAAVTTETEVVWAKALPAGTSAQRAELIALTQALKMAEGKKLNVYTDSRYAFATAHIHGEIYRRRGWLTSEGKEIKNKDEILALLKALFLPKRLSIIHCPGHQKGNRAEARGNRMADQAAREVATRETPETSTLLAGKRTADGSEFEKRTADGSEFESPKKKAKVE

SEQ ID NO: 2467 - protein, 2094 aa, synthetic construct
MPAAKRVKLDGGDKKYSIGLDIGTNSVGWAVITDEYKVPSKKFKVLGNTDRHSIKKNLIGALLFDSGETAEATRLKRTARRRYTRRKNRICYLQEIFSNEMAKVDDSFFHRLEESFLVEEDKKHERHPIFGNIVDEVAYHEKYPTIYHLRKKLVDSTDKADLRLIYLALAHMIKFRGHFLIEGDLNPDNSDVDKLFIQLVQTYNQLFEENPINASGVDAKAILSARLSKSRRLENLIAQLPGEKKNGLFGNLIALSLGLTPNFKSNFDLAEDAKLQLSKDTYDDDLDNLLAQIGDQYADLFLAAKNLSDAILLSDILRVNTEITKAPLSASMIKRYDEHHQDLTLLKALVRQQLPEKYKEIFFDQSKNGYAGYIDGGASQEEFYKFIKPILEKMDGTEELLVKLNREDLLRKQRTFDNGSIPHQIHLGELHAILRRQEDFYPFLKDNREKIEKILTFRIPYYVGPLARGNSRFAWMTRKSEETITPWNFEEVVDKGASAQSFIERMTNFDKNLPNEKVLPKHSLLYEYFTVYNELTKVKYVTEGMRKPAFLSGEQKKAIVDLLFKTNRKVTVKQLKEDYFKKIECFDSVEISGVEDRFNASLGTYHDLLKIIKDKDFLDNEENEDILEDIVLTLTLFEDREMIEERLKTYAHLFDDKVMKQLKRRRYTGWGRLSRKLINGIRDKQSGKTILDFLKSDGFANRNFMQLIHDDSLTFKEDIQKAQVSGQGDSLHEHIANLAGSPAIKKGILQTVKVVDELVKVMGRHKPENIVIEMARENQTTQKGQKNSRERMKRIEEGIKELGSQILKEHPVENTQLQNEKLYLYYLQNGRDMYVDQELDINRLSDYDVDHIVPQSFLKDDSIDNKVLTRSDKARGKSDNVPSEEVVKKMKNYWRQLLNAKLITQRKFDNLTKAERGGLSELDKAGFIKRQLVETRQITKHVAQILDSRMNTKYDENDKLIREVKVITLKSKLVSDFRKDFQFYKVREINNYHHAHDAYLNAVVGTALIKKYPKLESEFVYGDYKVYDVRKMIAKSEQEIGKATAKYFFYSNIMNFFKTEITLANGEIRKRPLIETNGETGEIVWDKGRDFATVRKVLSMPQVNIVKKTEVQTGGFSKESILPKRNSDKLIARKKDWDPKKYGGFDSPTVAYSVLVVAKVEKGKSKKLKSVKELLGITIMERSSFEKNPIDFLEAKGYKEVKKDLIIKLPKYSLFELENGRKRMLASAGELQKGNELALPSKYVNFLYLASHYEKLKGSPEDNEQKQLFVEQHKHYLDEIIEQISEFSKRVILADANLDKVLSAYNKHRDKPIREQAENIIHLFTLTNLGAPAAFKYFDTTIDRKRYTSTKEVLDATLIHQSITGLYETRIDLSQLGGDGGPAPGGSGSSGGTLNIEDEYRLHETSKGPDVPLGSTWLSDFPQAWAETGGMGLAVRQAPLIIPLKATSTPVSIKQYPMSQEARLGIKPHIQRLLDQGILVPCQSPWNTPLLPVKKPGTNDYRPVQDLREVNKRVEDIHPTVPNPYNLLSGLPPSHQWYTVLDLKDAFFCLRLHPTSQSLFAFEWRDPEMGISGQLTWTRLPQGFKNSPTLFNEALHRDLADFRIQHPDLILLQYVDDLLLAATSELDCQQGTRALLQTLGDLGYRASAKKAQICQKQVKYLGYLLKEGQRWLTEARKETVMGQPTPKTPRQLREFLGTAGFCRLWIPGFAEMAAPLYPLTKPGTLFEWGPDQQKAYQEIKQALLTAPALGLPDLTKPFELFVDEKQGYAKGVLTQKLGPWRRPVAYLSKKLDPVAAGWPPCLRMVAAIAVLTKDAGKLTMGQPLVILAPHAVEALVKQPPDRWLSNARMTHYQALLLDTDRVQFGPIVALNPATLLPLPEEGLQHDCLDILAEAHGTRPDLTDQPLPDADHTWYTDGSSFLQEGQRKAGAAVTTETEVVWAKALPAGTSAQRAELIALTQALKMAEGKKLNVYTDSRYAFATAHIHGEIYRRRGWLTSEGKEIKNKDEILALLKALFLPKRLSIIHCPGHQKGNRAEARGNRMADQAAREVATRETPETSTLLAGKRTADGSEFEKRTADGSEFESPKKKAKVE

SEQ ID NO: 2468 - protein, 2091 aa, synthetic construct
MPAAKRVKLDGGDKKYSIGLDIGTNSVGWAVITDEYKVPSKKFKVLGNTDRHSIKKNLIGALLFDSGETAEATRLKRTARRRYTRRKNRICYLQEIFSNEMAKVDDSFFHRLEESFLVEEDKKHERHPIFGNIVDEVAYHEKYPTIYHLRKKLVDSTDKADLRLIYLALAHMIKFRGHFLIEGDLNPDNSDVDKLFIQLVQTYNQLFEENPINASGVDAKAILSARLSKSRRLENLIAQLPGEKKNGLFGNLIALSLGLTPNFKSNFDLAEDAKLQLSKDTYDDDLDNLLAQIGDQYADLFLAAKNLSDAILLSDILRVNTEITKAPLSASMIKRYDEHHQDLTLLKALVRQQLPEKYKEIFFDQSKNGYAGYIDGGASQEEFYKFIKPILEKMDGTEELLVKLNREDLLRKQRTFDNGSIPHQIHLGELHAILRRQEDFYPFLKDNREKIEKILTFRIPYYVGPLARGNSRFAWMTRKSEETITPWNFEEVVDKGASAQSFIERMTNFDKNLPNEKVLPKHSLLYEYFTVYNELTKVKYVTEGMRKPAFLSGEQKKAIVDLLFKTNRKVTVKQLKEDYFKKIECFDSVEISGVEDRFNASLGTYHDLLKIIKDKDFLDNEENEDILEDIVLTLTLFEDREMIEERLKTYAHLFDDKVMKQLKRRRYTGWGRLSRKLINGIRDKQSGKTILDFLKSDGFANRNFMQLIHDDSLTFKEDIQKAQVSGQGDSLHEHIANLAGSPAIKKGILQTVKVVDELVKVMGRHKPENIVIEMARENQTTQKGQKNSRERMKRIEEGIKELGSQILKEHPVENTQLQNEKLYLYYLQNGRDMYVDQELDINRLSDYDVDHIVPQSFLKDDSIDNKVLTRSDKARGKSDNVPSEEVVKKMKNYWRQLLNAKLITQRKFDNLTKAERGGLSELDKAGFIKRQLVETRQITKHVAQILDSRMNTKYDENDKLIREVKVITLKSKLVSDFRKDFQFYKVREINNYHHAHDAYLNAVVGTALIKKYPKLESEFVYGDYKVYDVRKMIAKSEQEIGKATAKYFFYSNIMNFFKTEITLANGEIRKRPLIETNGETGEIVWDKGRDFATVRKVLSMPQVNIVKKTEVQTGGFSKESILPKRNSDKLIARKKDWDPKKYGGFDSPTVAYSVLVVAKVEKGKSKKLKSVKELLGITIMERSSFEKNPIDFLEAKGYKEVKKDLIIKLPKYSLFELENGRKRMLASAGELQKGNELALPSKYVNFLYLASHYEKLKGSPEDNEQKQLFVEQHKHYLDEIIEQISEFSKRVILADANLDKVLSAYNKHRDKPIREQAENIIHLFTLTNLGAPAAFKYFDTTIDRKRYTSTKEVLDATLIHQSITGLYETRIDLSQLGGDGGGGGGSSGGTLNIEDEYRLHETSKGPDVPLGSTWLSDFPQAWAETGGMGLAVRQAPLIIPLKATSTPVSIKQYPMSQEARLGIKPHIQRLLDQGILVPCQSPWNTPLLPVKKPGTNDYRPVQDLREVNKRVEDIHPTVPNPYNLLSGLPPSHQWYTVLDLKDAFFCLRLHPTSQSLFAFEWRDPEMGISGQLTWTRLPQGFKNSPTLFNEALHRDLADFRIQHPDLILLQYVDDLLLAATSELDCQQGTRALLQTLGDLGYRASAKKAQICQKQVKYLGYLLKEGQRWLTEARKETVMGQPTPKTPRQLREFLGTAGFCRLWIPGFAEMAAPLYPLTKPGTLFEWGPDQQKAYQEIKQALLTAPALGLPDLTKPFELFVDEKQGYAKGVLTQKLGPWRRPVAYLSKKLDPVAAGWPPCLRMVAAIAVLTKDAGKLTMGQPLVILAPHAVEALVKQPPDRWLSNARMTHYQALLLDTDRVQFGPIVALNPATLLPLPEEGLQHDCLDILAEAHGTRPDLTDQPLPDADHTWYTDGSSFLQEGQRKAGAAVTTETEVVWAKALPAGTSAQRAELIALTQALKMAEGKKLNVYTDSRYAFATAHIHGEIYRRRGWLTSEGKEIKNKDEILALLKALFLPKRLSIIHCPGHQKGNRAEARGNRMADQAAREVATRETPETSTLLAGKRTADGSEFEKRTADGSEFESPKKKAKVE

SEQ ID NO: 2469 - protein, 2096 aa, synthetic construct
MPAAKRVKLDGGDKKYSIGLDIGTNSVGWAVITDEYKVPSKKFKVLGNTDRHSIKKNLIGALLFDSGETAEATRLKRTARRRYTRRKNRICYLQEIFSNEMAKVDDSFFHRLEESFLVEEDKKHERHPIFGNIVDEVAYHEKYPTIYHLRKKLVDSTDKADLRLIYLALAHMIKFRGHFLIEGDLNPDNSDVDKLFIQLVQTYNQLFEENPINASGVDAKAILSARLSKSRRLENLIAQLPGEKKNGLFGNLIALSLGLTPNFKSNFDLAEDAKLQLSKDTYDDDLDNLLAQIGDQYADLFLAAKNLSDAILLSDILRVNTEITKAPLSASMIKRYDEHHQDLTLLKALVRQQLPEKYKEIFFDQSKNGYAGYIDGGASQEEFYKFIKPILEKMDGTEELLVKLNREDLLRKQRTFDNGSIPHQIHLGELHAILRRQEDFYPFLKDNREKIEKILTFRIPYYVGPLARGNSRFAWMTRKSEETITPWNFEEVVDKGASAQSFIERMTNFDKNLPNEKVLPKHSLLYEYFTVYNELTKVKYVTEGMRKPAFLSGEQKKAIVDLLFKTNRKVTVKQLKEDYFKKIECFDSVEISGVEDRFNASLGTYHDLLKIIKDKDFLDNEENEDILEDIVLTLTLFEDREMIEERLKTYAHLFDDKVMKQLKRRRYTGWGRLSRKLINGIRDKQSGKTILDFLKSDGFANRNFMQLIHDDSLTFKEDIQKAQVSGQGDSLHEHIANLAGSPAIKKGILQTVKVVDELVKVMGRHKPENIVIEMARENQTTQKGQKNSRERMKRIEEGIKELGSQILKEHPVENTQLQNEKLYLYYLQNGRDMYVDQELDINRLSDYDVDHIVPQSFLKDDSIDNKVLTRSDKARGKSDNVPSEEVVKKMKNYWRQLLNAKLITQRKFDNLTKAERGGLSELDKAGFIKRQLVETRQITKHVAQILDSRMNTKYDENDKLIREVKVITLKSKLVSDFRKDFQFYKVREINNYHHAHDAYLNAVVGTALIKKYPKLESEFVYGDYKVYDVRKMIAKSEQEIGKATAKYFFYSNIMNFFKTEITLANGEIRKRPLIETNGETGEIVWDKGRDFATVRKVLSMPQVNIVKKTEVQTGGFSKESILPKRNSDKLIARKKDWDPKKYGGFDSPTVAYSVLVVAKVEKGKSKKLKSVKELLGITIMERSSFEKNPIDFLEAKGYKEVKKDLIIKLPKYSLFELENGRKRMLASAGELQKGNELALPSKYVNFLYLASHYEKLKGSPEDNEQKQLFVEQHKHYLDEIIEQISEFSKRVILADANLDKVLSAYNKHRDKPIREQAENIIHLFTLTNLGAPAAFKYFDTTIDRKRYTSTKEVLDATLIHQSITGLYETRIDLSQLGGDGGEAAAKGSSPAPGGTLNIEDEYRLHETSKGPDVPLGSTWLSDFPQAWAETGGMGLAVRQAPLIIPLKATSTPVSIKQYPMSQEARLGIKPHIQRLLDQGILVPCQSPWNTPLLPVKKPGTNDYRPVQDLREVNKRVEDIHPTVPNPYNLLSGLPPSHQWYTVLDLKDAFFCLRLHPTSQSLFAFEWRDPEMGISGQLTWTRLPQGFKNSPTLFNEALHRDLADFRIQHPDLILLQYVDDLLLAATSELDCQQGTRALLQTLGDLGYRASAKKAQICQKQVKYLGYLLKEGQRWLTEARKETVMGQPTPKTPRQLREFLGTAGFCRLWIPGFAEMAAPLYPLTKPGTLFEWGPDQQKAYQEIKQALLTAPALGLPDLTKPFELFVDEKQGYAKGVLTQKLGPWRRPVAYLSKKLDPVAAGWPPCLRMVAAIAVLTKDAGKLTMGQPLVILAPHAVEALVKQPPDRWLSNARMTHYQALLLDTDRVQFGPIVALNPATLLPLPEEGLQHDCLDILAEAHGTRPDLTDQPLPDADHTWYTDGSSFLQEGQRKAGAAVTTETEVVWAKALPAGTSAQRAELIALTQALKMAEGKKLNVYTDSRYAFATAHIHGEIYRRRGWLTSEGKEIKNKDEILALLKALFLPKRLSIIHCPGHQKGNRAEARGNRMADQAAREVATRETPETSTLLAGKRTADGSEFEKRTADGSEFESPKKKAKVE

SEQ ID NO: 2470 - protein, 2096 aa, synthetic construct
MPAAKRVKLDGGDKKYSIGLDIGTNSVGWAVITDEYKVPSKKFKVLGNTDRHSIKKNLIGALLFDSGETAEATRLKRTARRRYTRRKNRICYLQEIFSNEMAKVDDSFFHRLEESFLVEEDKKHERHPIFGNIVDEVAYHEKYPTIYHLRKKLVDSTDKADLRLIYLALAHMIKFRGHFLIEGDLNPDNSDVDKLFIQLVQTYNQLFEENPINASGVDAKAILSARLSKSRRLENLIAQLPGEKKNGLFGNLIALSLGLTPNFKSNFDLAEDAKLQLSKDTYDDDLDNLLAQIGDQYADLFLAAKNLSDAILLSDILRVNTEITKAPLSASMIKRYDEHHQDLTLLKALVRQQLPEKYKEIFFDQSKNGYAGYIDGGASQEEFYKFIKPILEKMDGTEELLVKLNREDLLRKQRTFDNGSIPHQIHLGELHAILRRQEDFYPFLKDNREKIEKILTFRIPYYVGPLARGNSRFAWMTRKSEETITPWNFEEVVDKGASAQSFIERMTNFDKNLPNEKVLPKHSLLYEYFTVYNELTKVKYVTEGMRKPAFLSGEQKKAIVDLLFKTNRKVTVKQLKEDYFKKIECFDSVEISGVEDRFNASLGTYHDLLKIIKDKDFLDNEENEDILEDIVLTLTLFEDREMIEERLKTYAHLFDDKVMKQLKRRRYTGWGRLSRKLINGIRDKQSGKTILDFLKSDGFANRNFMQLIHDDSLTFKEDIQKAQVSGQGDSLHEHIANLAGSPAIKKGILQTVKVVDELVKVMGRHKPENIVIEMARENQTTQKGQKNSRERMKRIEEGIKELGSQILKEHPVENTQLQNEKLYLYYLQNGRDMYVDQELDINRLSDYDVDHIVPQSFLKDDSIDNKVLTRSDKARGKSDNVPSEEVVKKMKNYWRQLLNAKLITQRKFDNLTKAERGGLSELDKAGFIKRQLVETRQITKHVAQILDSRMNTKYDENDKLIREVKVITLKSKLVSDFRKDFQFYKVREINNYHHAHDAYLNAVVGTALIKKYPKLESEFVYGDYKVYDVRKMIAKSEQEIGKATAKYFFYSNIMNFFKTEITLANGEIRKRPLIETNGETGEIVWDKGRDFATVRKVLSMPQVNIVKKTEVQTGGFSKESILPKRNSDKLIARKKDWDPKKYGGFDSPTVAYSVLVVAKVEKGKSKKLKSVKELLGITIMERSSFEKNPIDFLEAKGYKEVKKDLIIKLPKYSLFELENGRKRMLASAGELQKGNELALPSKYVNFLYLASHYEKLKGSPEDNEQKQLFVEQHKHYLDEIIEQISEFSKRVILADANLDKVLSAYNKHRDKPIREQAENIIHLFTLTNLGAPAAFKYFDTTIDRKRYTSTKEVLDATLIHQSITGLYETRIDLSQLGGDGGGGSGSSEAAAKGGTLNIEDEYRLHETSKGPDVPLGSTWLSDFPQAWAETGGMGLAVRQAPLIIPLKATSTPVSIKQYPMSQEARLGIKPHIQRLLDQGILVPCQSPWNTPLLPVKKPGTNDYRPVQDLREVNKRVEDIHPTVPNPYNLLSGLPPSHQWYTVLDLKDAFFCLRLHPTSQSLFAFEWRDPEMGISGQLTWTRLPQGFKNSPTLFNEALHRDLADFRIQHPDLILLQYVDDLLLAATSELDCQQGTRALLQTLGDLGYRASAKKAQICQKQVKYLGYLLKEGQRWLTEARKETVMGQPTPKTPRQLREFLGTAGFCRLWIPGFAEMAAPLYPLTKPGTLFEWGPDQQKAYQEIKQALLTAPALGLPDLTKPFELFVDEKQGYAKGVLTQKLGPWRRPVAYLSKKLDPVAAGWPPCLRMVAAIAVLTKDAGKLTMGQPLVILAPHAVEALVKQPPDRWLSNARMTHYQALLLDTDRVQFGPIVALNPATLLPLPEEGLQHDCLDILAEAHGTRPDLTDQPLPDADHTWYTDGSSFLQEGQRKAGAAVTTETEVVWAKALPAGTSAQRAELIALTQALKMAEGKKLNVYTDSRYAFATAHIHGEIYRRRGWLTSEGKEIKNKDEILALLKALFLPKRLSIIHCPGHQKGNRAEARGNRMADQAAREVATRETPETSTLLAGKRTADGSEFEKRTADGSEFESPKKKAKVE

SEQ ID NO: 2471 - protein, 2094 aa, synthetic construct
MPAAKRVKLDGGDKKYSIGLDIGTNSVGWAVITDEYKVPSKKFKVLGNTDRHSIKKNLIGALLFDSGETAEATRLKRTARRRYTRRKNRICYLQEIFSNEMAKVDDSFFHRLEESFLVEEDKKHERHPIFGNIVDEVAYHEKYPTIYHLRKKLVDSTDKADLRLIYLALAHMIKFRGHFLIEGDLNPDNSDVDKLFIQLVQTYNQLFEENPINASGVDAKAILSARLSKSRRLENLIAQLPGEKKNGLFGNLIALSLGLTPNFKSNFDLAEDAKLQLSKDTYDDDLDNLLAQIGDQYADLFLAAKNLSDAILLSDILRVNTEITKAPLSASMIKRYDEHHQDLTLLKALVRQQLPEKYKEIFFDQSKNGYAGYIDGGASQEEFYKFIKPILEKMDGTEELLVKLNREDLLRKQRTFDNGSIPHQIHLGELHAILRRQEDFYPFLKDNREKIEKILTFRIPYYVGPLARGNSRFAWMTRKSEETITPWNFEEVVDKGASAQSFIERMTNFDKNLPNEKVLPKHSLLYEYFTVYNELTKVKYVTEGMRKPAFLSGEQKKAIVDLLFKTNRKVTVKQLKEDYFKKIECFDSVEISGVEDRFNASLGTYHDLLKIIKDKDFLDNEENEDILEDIVLTLTLFEDREMIEERLKTYAHLFDDKVMKQLKRRRYTGWGRLSRKLINGIRDKQSGKTILDFLKSDGFANRNFMQLIHDDSLTFKEDIQKAQVSGQGDSLHEHIANLAGSPAIKKGILQTVKVVDELVKVMGRHKPENIVIEMARENQTTQKGQKNSRERMKRIEEGIKELGSQILKEHPVENTQLQNEKLYLYYLQNGRDMYVDQELDINRLSDYDVDHIVPQSFLKDDSIDNKVLTRSDKARGKSDNVPSEEVVKKMKNYWRQLLNAKLITQRKFDNLTKAERGGLSELDKAGFIKRQLVETRQITKHVAQILDSRMNTKYDENDKLIREVKVITLKSKLVSDFRKDFQFYKVREINNYHHAHDAYLNAVVGTALIKKYPKLESEFVYGDYKVYDVRKMIAKSEQEIGKATAKYFFYSNIMNFFKTEITLANGEIRKRPLIETNGETGEIVWDKGRDFATVRKVLSMPQVNIVKKTEVQTGGFSKESILPKRNSDKLIARKKDWDPKKYGGFDSPTVAYSVLVVAKVEKGKSKKLKSVKELLGITIMERSSFEKNPIDFLEAKGYKEVKKDLIIKLPKYSLFELENGRKRMLASAGELQKGNELALPSKYVNFLYLASHYEKLKGSPEDNEQKQLFVEQHKHYLDEIIEQISEFSKRVILADANLDKVLSAYNKHRDKPIREQAENIIHLFTLTNLGAPAAFKYFDTTIDRKRYTSTKEVLDATLIHQSITGLYETRIDLSQLGGDGGGSSGSSGSSGGTLNIEDEYRLHETSKGPDVPLGSTWLSDFPQAWAETGGMGLAVRQAPLIIPLKATSTPVSIKQYPMSQEARLGIKPHIQRLLDQGILVPCQSPWNTPLLPVKKPGTNDYRPVQDLREVNKRVEDIHPTVPNPYNLLSGLPPSHQWYTVLDLKDAFFCLRLHPTSQSLFAFEWRDPEMGISGQLTWTRLPQGFKNSPTLFNEALHRDLADFRIQHPDLILLQYVDDLLLAATSELDCQQGTRALLQTLGDLGYRASAKKAQICQKQVKYLGYLLKEGQRWLTEARKETVMGQPTPKTPRQLREFLGTAGFCRLWIPGFAEMAAPLYPLTKPGTLFEWGPDQQKAYQEIKQALLTAPALGLPDLTKPFELFVDEKQGYAKGVLTQKLGPWRRPVAYLSKKLDPVAAGWPPCLRMVAAIAVLTKDAGKLTMGQPLVILAPHAVEALVKQPPDRWLSNARMTHYQALLLDTDRVQFGPIVALNPATLLPLPEEGLQHDCLDILAEAHGTRPDLTDQPLPDADHTWYTDGSSFLQEGQRKAGAAVTTETEVVWAKALPAGTSAQRAELIALTQALKMAEGKKLNVYTDSRYAFATAHIHGEIYRRRGWLTSEGKEIKNKDEILALLKALFLPKRLSIIHCPGHQKGNRAEARGNRMADQAAREVATRETPETSTLLAGKRTADGSEFEKRTADGSEFESPKKKAKVE

SEQ ID NO: 2472 - protein, 2096 aa, synthetic construct
MPAAKRVKLDGGDKKYSIGLDIGTNSVGWAVITDEYKVPSKKFKVLGNTDRHSIKKNLIGALLFDSGETAEATRLKRTARRRYTRRKNRICYLQEIFSNEMAKVDDSFFHRLEESFLVEEDKKHERHPIFGNIVDEVAYHEKYPTIYHLRKKLVDSTDKADLRLIYLALAHMIKFRGHFLIEGDLNPDNSDVDKLFIQLVQTYNQLFEENPINASGVDAKAILSARLSKSRRLENLIAQLPGEKKNGLFGNLIALSLGLTPNFKSNFDLAEDAKLQLSKDTYDDDLDNLLAQIGDQYADLFLAAKNLSDAILLSDILRVNTEITKAPLSASMIKRYDEHHQDLTLLKALVRQQLPEKYKEIFFDQSKNGYAGYIDGGASQEEFYKFIKPILEKMDGTEELLVKLNREDLLRKQRTFDNGSIPHQIHLGELHAILRRQEDFYPFLKDNREKIEKILTFRIPYYVGPLARGNSRFAWMTRKSEETITPWNFEEVVDKGASAQSFIERMTNFDKNLPNEKVLPKHSLLYEYFTVYNELTKVKYVTEGMRKPAFLSGEQKKAIVDLLFKTNRKVTVKQLKEDYFKKIECFDSVEISGVEDRFNASLGTYHDLLKIIKDKDFLDNEENEDILEDIVLTLTLFEDREMIEERLKTYAHLFDDKVMKQLKRRRYTGWGRLSRKLINGIRDKQSGKTILDFLKSDGFANRNFMQLIHDDSLTFKEDIQKAQVSGQGDSLHEHIANLAGSPAIKKGILQTVKVVDELVKVMGRHKPENIVIEMARENQTTQKGQKNSRERMKRIEEGIKELGSQILKEHPVENTQLQNEKLYLYYLQNGRDMYVDQELDINRLSDYDVDHIVPQSFLKDDSIDNKVLTRSDKARGKSDNVPSEEVVKKMKNYWRQLLNAKLITQRKFDNLTKAERGGLSELDKAGFIKRQLVETRQITKHVAQILDSRMNTKYDENDKLIREVKVITLKSKLVSDFRKDFQFYKVREINNYHHAHDAYLNAVVGTALIKKYPKLESEFVYGDYKVYDVRKMIAKSEQEIGKATAKYFFYSNIMNFFKTEITLANGEIRKRPLIETNGETGEIVWDKGRDFATVRKVLSMPQVNIVKKTEVQTGGFSKESILPKRNSDKLIARKKDWDPKKYGGFDSPTVAYSVLVVAKVEKGKSKKLKSVKELLGITIMERSSFEKNPIDFLEAKGYKEVKKDLIIKLPKYSLFELENGRKRMLASAGELQKGNELALPSKYVNFLYLASHYEKLKGSPEDNEQKQLFVEQHKHYLDEIIEQISEFSKRVILADANLDKVLSAYNKHRDKPIREQAENIIHLFTLTNLGAPAAFKYFDTTIDRKRYTSTKEVLDATLIHQSITGLYETRIDLSQLGGDGGGGGPAPEAAAKGGTLNIEDEYRLHETSKGPDVPLGSTWLSDFPQAWAETGGMGLAVRQAPLIIPLKATSTPVSIKQYPMSQEARLGIKPHIQRLLDQGILVPCQSPWNTPLLPVKKPGTNDYRPVQDLREVNKRVEDIHPTVPNPYNLLSGLPPSHQWYTVLDLKDAFFCLRLHPTSQSLFAFEWRDPEMGISGQLTWTRLPQGFKNSPTLFNEALHRDLADFRIQHPDLILLQYVDDLLLAATSELDCQQGTRALLQTLGDLGYRASAKKAQICQKQVKYLGYLLKEGQRWLTEARKETVMGQPTPKTPRQLREFLGTAGFCRLWIPGFAEMAAPLYPLTKPGTLFEWGPDQQKAYQEIKQALLTAPALGLPDLTKPFELFVDEKQGYAKGVLTQKLGPWRRPVAYLSKKLDPVAAGWPPCLRMVAAIAVLTKDAGKLTMGQPLVILAPHAVEALVKQPPDRWLSNARMTHYQALLLDTDRVQFGPIVALNPATLLPLPEEGLQHDCLDILAEAHGTRPDLTDQPLPDADHTWYTDGSSFLQEGQRKAGAAVTTETEVVWAKALPAGTSAQRAELIALTQALKMAEGKKLNVYTDSRYAFATAHIHGEIYRRRGWLTSEGKEIKNKDEILALLKALFLPKRLSIIHCPGHQKGNRAEARGNRMADQAAREVATRETPETSTLLAGKRTADGSEFEKRTADGSEFESPKKKAKVE

SEQ ID NO: 2473 - protein, 2096 aa, synthetic construct
MPAAKRVKLDGGDKKYSIGLDIGTNSVGWAVITDEYKVPSKKFKVLGNTDRHSIKKNLIGALLFDSGETAEATRLKRTARRRYTRRKNRICYLQEIFSNEMAKVDDSFFHRLEESFLVEEDKKHERHPIFGNIVDEVAYHEKYPTIYHLRKKLVDSTDKADLRLIYLALAHMIKFRGHFLIEGDLNPDNSDVDKLFIQLVQTYNQLFEENPINASGVDAKAILSARLSKSRRLENLIAQLPGEKKNGLFGNLIALSLGLTPNFKSNFDLAEDAKLQLSKDTYDDDLDNLLAQIGDQYADLFLAAKNLSDAILLSDILRVNTEITKAPLSASMIKRYDEHHQDLTLLKALVRQQLPEKYKEIFFDQSKNGYAGYIDGGASQEEFYKFIKPILEKMDGTEELLVKLNREDLLRKQRTFDNGSIPHQIHLGELHAILRRQEDFYPFLKDNREKIEKILTFRIPYYVGPLARGNSRFAWMTRKSEETITPWNFEEVVDKGASAQSFIERMTNFDKNLPNEKVLPKHSLLYEYFTVYNELTKVKYVTEGMRKPAFLSGEQKKAIVDLLFKTNRKVTVKQLKEDYFKKIECFDSVEISGVEDRFNASLGTYHDLLKIIKDKDFLDNEENEDILEDIVLTLTLFEDREMIEERLKTYAHLFDDKVMKQLKRRRYTGWGRLSRKLINGIRDKQSGKTILDFLKSDGFANRNFMQLIHDDSLTFKEDIQKAQVSGQGDSLHEHIANLAGSPAIKKGILQTVKVVDELVKVMGRHKPENIVIEMARENQTTQKGQKNSRERMKRIEEGIKELGSQILKEHPVENTQLQNEKLYLYYLQNGRDMYVDQELDINRLSDYDVDHIVPQSFLKDDSIDNKVLTRSDKARGKSDNVPSEEVVKKMKNYWRQLLNAKLITQRKFDNLTKAERGGLSELDKAGFIKRQLVETRQITKHVAQILDSRMNTKYDENDKLIREVKVITLKSKLVSDFRKDFQFYKVREINNYHHAHDAYLNAVVGTALIKKYPKLESEFVYGDYKVYDVRKMIAKSEQEIGKATAKYFFYSNIMNFFKTEITLANGEIRKRPLIETNGETGEIVWDKGRDFATVRKVLSMPQVNIVKKTEVQTGGFSKESILPKRNSDKLIARKKDWDPKKYGGFDSPTVAYSVLVVAKVEKGKSKKLKSVKELLGITIMERSSFEKNPIDFLEAKGYKEVKKDLIIKLPKYSLFELENGRKRMLASAGELQKGNELALPSKYVNFLYLASHYEKLKGSPEDNEQKQLFVEQHKHYLDEIIEQISEFSKRVILADANLDKVLSAYNKHRDKPIREQAENIIHLFTLTNLGAPAAFKYFDTTIDRKRYTSTKEVLDATLIHQSITGLYETRIDLSQLGGDGGEAAAKPAPGSSGGTLNIEDEYRLHETSKGPDVPLGSTWLSDFPQAWAETGGMGLAVRQAPLIIPLKATSTPVSIKQYPMSQEARLGIKPHIQRLLDQGILVPCQSPWNTPLLPVKKPGTNDYRPVQDLREVNKRVEDIHPTVPNPYNLLSGLPPSHQWYTVLDLKDAFFCLRLHPTSQSLFAFEWRDPEMGISGQLTWTRLPQGFKNSPTLFNEALHRDLADFRIQHPDLILLQYVDDLLLAATSELDCQQGTRALLQTLGDLGYRASAKKAQICQKQVKYLGYLLKEGQRWLTEARKETVMGQPTPKTPRQLREFLGTAGFCRLWIPGFAEMAAPLYPLTKPGTLFEWGPDQQKAYQEIKQALLTAPALGLPDLTKPFELFVDEKQGYAKGVLTQKLGPWRRPVAYLSKKLDPVAAGWPPCLRMVAAIAVLTKDAGKLTMGQPLVILAPHAVEALVKQPPDRWLSNARMTHYQALLLDTDRVQFGPIVALNPATLLPLPEEGLQHDCLDILAEAHGTRPDLTDQPLPDADHTWYTDGSSFLQEGQRKAGAAVTTETEVVWAKALPAGTSAQRAELIALTQALKMAEGKKLNVYTDSRYAFATAHIHGEIYRRRGWLTSEGKEIKNKDEILALLKALFLPKRLSIIHCPGHQKGNRAEARGNRMADQAAREVATRETPETSTLLAGKRTADGSEFEKRTADGSEFESPKKKAKVE

SEQ ID NO: 2474 - protein, 2096 aa, synthetic construct
MPAAKRVKLDGGDKKYSIGLDIGTNSVGWAVITDEYKVPSKKFKVLGNTDRHSIKKNLIGALLFDSGETAEATRLKRTARRRYTRRKNRICYLQEIFSNEMAKVDDSFFHRLEESFLVEEDKKHERHPIFGNIVDEVAYHEKYPTIYHLRKKLVDSTDKADLRLIYLALAHMIKFRGHFLIEGDLNPDNSDVDKLFIQLVQTYNQLFEENPINASGVDAKAILSARLSKSRRLENLIAQLPGEKKNGLFGNLIALSLGLTPNFKSNFDLAEDAKLQLSKDTYDDDLDNLLAQIGDQYADLFLAAKNLSDAILLSDILRVNTEITKAPLSASMIKRYDEHHQDLTLLKALVRQQLPEKYKEIFFDQSKNGYAGYIDGGASQEEFYKFIKPILEKMDGTEELLVKLNREDLLRKQRTFDNGSIPHQIHLGELHAILRRQEDFYPFLKDNREKIEKILTFRIPYYVGPLARGNSRFAWMTRKSEETITPWNFEEVVDKGASAQSFIERMTNFDKNLPNEKVLPKHSLLYEYFTVYNELTKVKYVTEGMRKPAFLSGEQKKAIVDLLFKTNRKVTVKQLKEDYFKKIECFDSVEISGVEDRFNASLGTYHDLLKIIKDKDFLDNEENEDILEDIVLTLTLFEDREMIEERLKTYAHLFDDKVMKQLKRRRYTGWGRLSRKLINGIRDKQSGKTILDFLKSDGFANRNFMQLIHDDSLTFKEDIQKAQVSGQGDSLHEHIANLAGSPAIKKGILQTVKVVDELVKVMGRHKPENIVIEMARENQTTQKGQKNSRERMKRIEEGIKELGSQILKEHPVENTQLQNEKLYLYYLQNGRDMYVDQELDINRLSDYDVDHIVPQSFLKDDSIDNKVLTRSDKARGKSDNVPSEEVVKKMKNYWRQLLNAKLITQRKFDNLTKAERGGLSELDKAGFIKRQLVETRQITKHVAQILDSRMNTKYDENDKLIREVKVITLKSKLVSDFRKDFQFYKVREINNYHHAHDAYLNAVVGTALIKKYPKLESEFVYGDYKVYDVRKMIAKSEQEIGKATAKYFFYSNIMNFFKTEITLANGEIRKRPLIETNGETGEIVWDKGRDFATVRKVLSMPQVNIVKKTEVQTGGFSKESILPKRNSDKLIARKKDWDPKKYGGFDSPTVAYSVLVVAKVEKGKSKKLKSVKELLGITIMERSSFEKNPIDFLEAKGYKEVKKDLIIKLPKYSLFELENGRKRMLASAGELQKGNELALPSKYVNFLYLASHYEKLKGSPEDNEQKQLFVEQHKHYLDEIIEQISEFSKRVILADANLDKVLSAYNKHRDKPIREQAENIIHLFTLTNLGAPAAFKYFDTTIDRKRYTSTKEVLDATLIHQSITGLYETRIDLSQLGGDGGEAAAKGGSPAPGGTLNIEDEYRLHETSKGPDVPLGSTWLSDFPQAWAETGGMGLAVRQAPLIIPLKATSTPVSIKQYPMSQEARLGIKPHIQRLLDQGILVPCQSPWNTPLLPVKKPGTNDYRPVQDLREVNKRVEDIHPTVPNPYNLLSGLPPSHQWYTVLDLKDAFFCLRLHPTSQSLFAFEWRDPEMGISGQLTWTRLPQGFKNSPTLFNEALHRDLADFRIQHPDLILLQYVDDLLLAATSELDCQQGTRALLQTLGDLGYRASAKKAQICQKQVKYLGYLLKEGQRWLTEARKETVMGQPTPKTPRQLREFLGTAGFCRLWIPGFAEMAAPLYPLTKPGTLFEWGPDQQKAYQEIKQALLTAPALGLPDLTKPFELFVDEKQGYAKGVLTQKLGPWRRPVAYLSKKLDPVAAGWPPCLRMVAAIAVLTKDAGKLTMGQPLVILAPHAVEALVKQPPDRWLSNARMTHYQALLLDTDRVQFGPIVALNPATLLPLPEEGLQHDCLDILAEAHGTRPDLTDQPLPDADHTWYTDGSSFLQEGQRKAGAAVTTETEVVWAKALPAGTSAQRAELIALTQALKMAEGKKLNVYTDSRYAFATAHIHGEIYRRRGWLTSEGKEIKNKDEILALLKALFLPKRLSIIHCPGHQKGNRAEARGNRMADQAAREVATRETPETSTLLAGKRTADGSEFEKRTADGSEFESPKKKAKVE

SEQ ID NO: 2475 - protein, 2093 aa, synthetic construct
MPAAKRVKLDGGDKKYSIGLDIGTNSVGWAVITDEYKVPSKKFKVLGNTDRHSIKKNLIGALLFDSGETAEATRLKRTARRRYTRRKNRICYLQEIFSNEMAKVDDSFFHRLEESFLVEEDKKHERHPIFGNIVDEVAYHEKYPTIYHLRKKLVDSTDKADLRLIYLALAHMIKFRGHFLIEGDLNPDNSDVDKLFIQLVQTYNQLFEENPINASGVDAKAILSARLSKSRRLENLIAQLPGEKKNGLFGNLIALSLGLTPNFKSNFDLAEDAKLQLSKDTYDDDLDNLLAQIGDQYADLFLAAKNLSDAILLSDILRVNTEITKAPLSASMIKRYDEHHQDLTLLKALVRQQLPEKYKEIFFDQSKNGYAGYIDGGASQEEFYKFIKPILEKMDGTEELLVKLNREDLLRKQRTFDNGSIPHQIHLGELHAILRRQEDFYPFLKDNREKIEKILTFRIPYYVGPLARGNSRFAWMTRKSEETITPWNFEEVVDKGASAQSFIERMTNFDKNLPNEKVLPKHSLLYEYFTVYNELTKVKYVTEGMRKPAFLSGEQKKAIVDLLFKTNRKVTVKQLKEDYFKKIECFDSVEISGVEDRFNASLGTYHDLLKIIKDKDFLDNEENEDILEDIVLTLTLFEDREMIEERLKTYAHLFDDKVMKQLKRRRYTGWGRLSRKLINGIRDKQSGKTILDFLKSDGFANRNFMQLIHDDSLTFKEDIQKAQVSGQGDSLHEHIANLAGSPAIKKGILQTVKVVDELVKVMGRHKPENIVIEMARENQTTQKGQKNSRERMKRIEEGIKELGSQILKEHPVENTQLQNEKLYLYYLQNGRDMYVDQELDINRLSDYDVDHIVPQSFLKDDSIDNKVLTRSDKARGKSDNVPSEEVVKKMKNYWRQLLNAKLITQRKFDNLTKAERGGLSELDKAGFIKRQLVETRQITKHVAQILDSRMNTKYDENDKLIREVKVITLKSKLVSDFRKDFQFYKVREINNYHHAHDAYLNAVVGTALIKKYPKLESEFVYGDYKVYDVRKMIAKSEQEIGKATAKYFFYSNIMNFFKTEITLANGEIRKRPLIETNGETGEIVWDKGRDFATVRKVLSMPQVNIVKKTEVQTGGFSKESILPKRNSDKLIARKKDWDPKKYGGFDSPTVAYSVLVVAKVEKGKSKKLKSVKELLGITIMERSSFEKNPIDFLEAKGYKEVKKDLIIKLPKYSLFELENGRKRMLASAGELQKGNELALPSKYVNFLYLASHYEKLKGSPEDNEQKQLFVEQHKHYLDEIIEQISEFSKRVILADANLDKVLSAYNKHRDKPIREQAENIIHLFTLTNLGAPAAFKYFDTTIDRKRYTSTKEVLDATLIHQSITGLYETRIDLSQLGGDGGGSSEAAAKGGTLNIEDEYRLHETSKGPDVPLGSTWLSDFPQAWAETGGMGLAVRQAPLIIPLKATSTPVSIKQYPMSQEARLGIKPHIQRLLDQGILVPCQSPWNTPLLPVKKPGTNDYRPVQDLREVNKRVEDIHPTVPNPYNLLSGLPPSHQWYTVLDLKDAFFCLRLHPTSQSLFAFEWRDPEMGISGQLTWTRLPQGFKNSPTLFNEALHRDLADFRIQHPDLILLQYVDDLLLAATSELDCQQGTRALLQTLGDLGYRASAKKAQICQKQVKYLGYLLKEGQRWLTEARKETVMGQPTPKTPRQLREFLGTAGFCRLWIPGFAEMAAPLYPLTKPGTLFEWGPDQQKAYQEIKQALLTAPALGLPDLTKPFELFVDEKQGYAKGVLTQKLGPWRRPVAYLSKKLDPVAAGWPPCLRMVAAIAVLTKDAGKLTMGQPLVILAPHAVEALVKQPPDRWLSNARMTHYQALLLDTDRVQFGPIVALNPATLLPLPEEGLQHDCLDILAEAHGTRPDLTDQPLPDADHTWYTDGSSFLQEGQRKAGAAVTTETEVVWAKALPAGTSAQRAELIALTQALKMAEGKKLNVYTDSRYAFATAHIHGEIYRRRGWLTSEGKEIKNKDEILALLKALFLPKRLSIIHCPGHQKGNRAEARGNRMADQAAREVATRETPETSTLLAGKRTADGSEFEKRTADGSEFESPKKKAKVE

SEQ ID NO: 2476 - protein, 2094 aa, synthetic construct
MPAAKRVKLDGGDKKYSIGLDIGTNSVGWAVITDEYKVPSKKFKVLGNTDRHSIKKNLIGALLFDSGETAEATRLKRTARRRYTRRKNRICYLQEIFSNEMAKVDDSFFHRLEESFLVEEDKKHERHPIFGNIVDEVAYHEKYPTIYHLRKKLVDSTDKADLRLIYLALAHMIKFRGHFLIEGDLNPDNSDVDKLFIQLVQTYNQLFEENPINASGVDAKAILSARLSKSRRLENLIAQLPGEKKNGLFGNLIALSLGLTPNFKSNFDLAEDAKLQLSKDTYDDDLDNLLAQIGDQYADLFLAAKNLSDAILLSDILRVNTEITKAPLSASMIKRYDEHHQDLTLLKALVRQQLPEKYKEIFFDQSKNGYAGYIDGGASQEEFYKFIKPILEKMDGTEELLVKLNREDLLRKQRTFDNGSIPHQIHLGELHAILRRQEDFYPFLKDNREKIEKILTFRIPYYVGPLARGNSRFAWMTRKSEETITPWNFEEVVDKGASAQSFIERMTNFDKNLPNEKVLPKHSLLYEYFTVYNELTKVKYVTEGMRKPAFLSGEQKKAIVDLLFKTNRKVTVKQLKEDYFKKIECFDSVEISGVEDRFNASLGTYHDLLKIIKDKDFLDNEENEDILEDIVLTLTLFEDREMIEERLKTYAHLFDDKVMKQLKRRRYTGWGRLSRKLINGIRDKQSGKTILDFLKSDGFANRNFMQLIHDDSLTFKEDIQKAQVSGQGDSLHEHIANLAGSPAIKKGILQTVKVVDELVKVMGRHKPENIVIEMARENQTTQKGQKNSRERMKRIEEGIKELGSQILKEHPVENTQLQNEKLYLYYLQNGRDMYVDQELDINRLSDYDVDHIVPQSFLKDDSIDNKVLTRSDKARGKSDNVPSEEVVKKMKNYWRQLLNAKLITQRKFDNLTKAERGGLSELDKAGFIKRQLVETRQITKHVAQILDSRMNTKYDENDKLIREVKVITLKSKLVSDFRKDFQFYKVREINNYHHAHDAYLNAVVGTALIKKYPKLESEFVYGDYKVYDVRKMIAKSEQEIGKATAKYFFYSNIMNFFKTEITLANGEIRKRPLIETNGETGEIVWDKGRDFATVRKVLSMPQVNIVKKTEVQTGGFSKESILPKRNSDKLIARKKDWDPKKYGGFDSPTVAYSVLVVAKVEKGKSKKLKSVKELLGITIMERSSFEKNPIDFLEAKGYKEVKKDLIIKLPKYSLFELENGRKRMLASAGELQKGNELALPSKYVNFLYLASHYEKLKGSPEDNEQKQLFVEQHKHYLDEIIEQISEFSKRVILADANLDKVLSAYNKHRDKPIREQAENIIHLFTLTNLGAPAAFKYFDTTIDRKRYTSTKEVLDATLIHQSITGLYETRIDLSQLGGDGGGGSPAPGGGGGTLNIEDEYRLHETSKGPDVPLGSTWLSDFPQAWAETGGMGLAVRQAPLIIPLKATSTPVSIKQYPMSQEARLGIKPHIQRLLDQGILVPCQSPWNTPLLPVKKPGTNDYRPVQDLREVNKRVEDIHPTVPNPYNLLSGLPPSHQWYTVLDLKDAFFCLRLHPTSQSLFAFEWRDPEMGISGQLTWTRLPQGFKNSPTLFNEALHRDLADFRIQHPDLILLQYVDDLLLAATSELDCQQGTRALLQTLGDLGYRASAKKAQICQKQVKYLGYLLKEGQRWLTEARKETVMGQPTPKTPRQLREFLGTAGFCRLWIPGFAEMAAPLYPLTKPGTLFEWGPDQQKAYQEIKQALLTAPALGLPDLTKPFELFVDEKQGYAKGVLTQKLGPWRRPVAYLSKKLDPVAAGWPPCLRMVAAIAVLTKDAGKLTMGQPLVILAPHAVEALVKQPPDRWLSNARMTHYQALLLDTDRVQFGPIVALNPATLLPLPEEGLQHDCLDILAEAHGTRPDLTDQPLPDADHTWYTDGSSFLQEGQRKAGAAVTTETEVVWAKALPAGTSAQRAELIALTQALKMAEGKKLNVYTDSRYAFATAHIHGEIYRRRGWLTSEGKEIKNKDEILALLKALFLPKRLSIIHCPGHQKGNRAEARGNRMADQAAREVATRETPETSTLLAGKRTADGSEFEKRTADGSEFESPKKKAKVE

SEQ ID NO: 2477 - protein, 2091 aa, synthetic construct
MPAAKRVKLDGGDKKYSIGLDIGTNSVGWAVITDEYKVPSKKFKVLGNTDRHSIKKNLIGALLFDSGETAEATRLKRTARRRYTRRKNRICYLQEIFSNEMAKVDDSFFHRLEESFLVEEDKKHERHPIFGNIVDEVAYHEKYPTIYHLRKKLVDSTDKADLRLIYLALAHMIKFRGHFLIEGDLNPDNSDVDKLFIQLVQTYNQLFEENPINASGVDAKAILSARLSKSRRLENLIAQLPGEKKNGLFGNLIALSLGLTPNFKSNFDLAEDAKLQLSKDTYDDDLDNLLAQIGDQYADLFLAAKNLSDAILLSDILRVNTEITKAPLSASMIKRYDEHHQDLTLLKALVRQQLPEKYKEIFFDQSKNGYAGYIDGGASQEEFYKFIKPILEKMDGTEELLVKLNREDLLRKQRTFDNGSIPHQIHLGELHAILRRQEDFYPFLKDNREKIEKILTFRIPYYVGPLARGNSRFAWMTRKSEETITPWNFEEVVDKGASAQSFIERMTNFDKNLPNEKVLPKHSLLYEYFTVYNELTKVKYVTEGMRKPAFLSGEQKKAIVDLLFKTNRKVTVKQLKEDYFKKIECFDSVEISGVEDRFNASLGTYHDLLKIIKDKDFLDNEENEDILEDIVLTLTLFEDREMIEERLKTYAHLFDDKVMKQLKRRRYTGWGRLSRKLINGIRDKQSGKTILDFLKSDGFANRNFMQLIHDDSLTFKEDIQKAQVSGQGDSLHEHIANLAGSPAIKKGILQTVKVVDELVKVMGRHKPENIVIEMARENQTTQKGQKNSRERMKRIEEGIKELGSQILKEHPVENTQLQNEKLYLYYLQNGRDMYVDQELDINRLSDYDVDHIVPQSFLKDDSIDNKVLTRSDKARGKSDNVPSEEVVKKMKNYWRQLLNAKLITQRKFDNLTKAERGGLSELDKAGFIKRQLVETRQITKHVAQILDSRMNTKYDENDKLIREVKVITLKSKLVSDFRKDFQFYKVREINNYHHAHDAYLNAVVGTALIKKYPKLESEFVYGDYKVYDVRKMIAKSEQEIGKATAKYFFYSNIMNFFKTEITLANGEIRKRPLIETNGETGEIVWDKGRDFATVRKVLSMPQVNIVKKTEVQTGGFSKESILPKRNSDKLIARKKDWDPKKYGGFDSPTVAYSVLVVAKVEKGKSKKLKSVKELLGITIMERSSFEKNPIDFLEAKGYKEVKKDLIIKLPKYSLFELENGRKRMLASAGELQKGNELALPSKYVNFLYLASHYEKLKGSPEDNEQKQLFVEQHKHYLDEIIEQISEFSKRVILADANLDKVLSAYNKHRDKPIREQAENIIHLFTLTNLGAPAAFKYFDTTIDRKRYTSTKEVLDATLIHQSITGLYETRIDLSQLGGDGGGSSPAPGGTLNIEDEYRLHETSKGPDVPLGSTWLSDFPQAWAETGGMGLAVRQAPLIIPLKATSTPVSIKQYPMSQEARLGIKPHIQRLLDQGILVPCQSPWNTPLLPVKKPGTNDYRPVQDLREVNKRVEDIHPTVPNPYNLLSGLPPSHQWYTVLDLKDAFFCLRLHPTSQSLFAFEWRDPEMGISGQLTWTRLPQGFKNSPTLFNEALHRDLADFRIQHPDLILLQYVDDLLLAATSELDCQQGTRALLQTLGDLGYRASAKKAQICQKQVKYLGYLLKEGQRWLTEARKETVMGQPTPKTPRQLREFLGTAGFCRLWIPGFAEMAAPLYPLTKPGTLFEWGPDQQKAYQEIKQALLTAPALGLPDLTKPFELFVDEKQGYAKGVLTQKLGPWRRPVAYLSKKLDPVAAGWPPCLRMVAAIAVLTKDAGKLTMGQPLVILAPHAVEALVKQPPDRWLSNARMTHYQALLLDTDRVQFGPIVALNPATLLPLPEEGLQHDCLDILAEAHGTRPDLTDQPLPDADHTWYTDGSSFLQEGQRKAGAAVTTETEVVWAKALPAGTSAQRAELIALTQALKMAEGKKLNVYTDSRYAFATAHIHGEIYRRRGWLTSEGKEIKNKDEILALLKALFLPKRLSIIHCPGHQKGNRAEARGNRMADQAAREVATRETPETSTLLAGKRTADGSEFEKRTADGSEFESPKKKAKVE

SEQ ID NO: 2478 - protein, 2091 aa, synthetic construct
MPAAKRVKLDGGDKKYSIGLDIGTNSVGWAVITDEYKVPSKKFKVLGNTDRHSIKKNLIGALLFDSGETAEATRLKRTARRRYTRRKNRICYLQEIFSNEMAKVDDSFFHRLEESFLVEEDKKHERHPIFGNIVDEVAYHEKYPTIYHLRKKLVDSTDKADLRLIYLALAHMIKFRGHFLIEGDLNPDNSDVDKLFIQLVQTYNQLFEENPINASGVDAKAILSARLSKSRRLENLIAQLPGEKKNGLFGNLIALSLGLTPNFKSNFDLAEDAKLQLSKDTYDDDLDNLLAQIGDQYADLFLAAKNLSDAILLSDILRVNTEITKAPLSASMIKRYDEHHQDLTLLKALVRQQLPEKYKEIFFDQSKNGYAGYIDGGASQEEFYKFIKPILEKMDGTEELLVKLNREDLLRKQRTFDNGSIPHQIHLGELHAILRRQEDFYPFLKDNREKIEKILTFRIPYYVGPLARGNSRFAWMTRKSEETITPWNFEEVVDKGASAQSFIERMTNFDKNLPNEKVLPKHSLLYEYFTVYNELTKVKYVTEGMRKPAFLSGEQKKAIVDLLFKTNRKVTVKQLKEDYFKKIECFDSVEISGVEDRFNASLGTYHDLLKIIKDKDFLDNEENEDILEDIVLTLTLFEDREMIEERLKTYAHLFDDKVMKQLKRRRYTGWGRLSRKLINGIRDKQSGKTILDFLKSDGFANRNFMQLIHDDSLTFKEDIQKAQVSGQGDSLHEHIANLAGSPAIKKGILQTVKVVDELVKVMGRHKPENIVIEMARENQTTQKGQKNSRERMKRIEEGIKELGSQILKEHPVENTQLQNEKLYLYYLQNGRDMYVDQELDINRLSDYDVDHIVPQSFLKDDSIDNKVLTRSDKARGKSDNVPSEEVVKKMKNYWRQLLNAKLITQRKFDNLTKAERGGLSELDKAGFIKRQLVETRQITKHVAQILDSRMNTKYDENDKLIREVKVITLKSKLVSDFRKDFQFYKVREINNYHHAHDAYLNAVVGTALIKKYPKLESEFVYGDYKVYDVRKMIAKSEQEIGKATAKYFFYSNIMNFFKTEITLANGEIRKRPLIETNGETGEIVWDKGRDFATVRKVLSMPQVNIVKKTEVQTGGFSKESILPKRNSDKLIARKKDWDPKKYGGFDSPTVAYSVLVVAKVEKGKSKKLKSVKELLGITIMERSSFEKNPIDFLEAKGYKEVKKDLIIKLPKYSLFELENGRKRMLASAGELQKGNELALPSKYVNFLYLASHYEKLKGSPEDNEQKQLFVEQHKHYLDEIIEQISEFSKRVILADANLDKVLSAYNKHRDKPIREQAENIIHLFTLTNLGAPAAFKYFDTTIDRKRYTSTKEVLDATLIHQSITGLYETRIDLSQLGGDGGGGSGGGGGTLNIEDEYRLHETSKGPDVPLGSTWLSDFPQAWAETGGMGLAVRQAPLIIPLKATSTPVSIKQYPMSQEARLGIKPHIQRLLDQGILVPCQSPWNTPLLPVKKPGTNDYRPVQDLREVNKRVEDIHPTVPNPYNLLSGLPPSHQWYTVLDLKDAFFCLRLHPTSQSLFAFEWRDPEMGISGQLTWTRLPQGFKNSPTLFNEALHRDLADFRIQHPDLILLQYVDDLLLAATSELDCQQGTRALLQTLGDLGYRASAKKAQICQKQVKYLGYLLKEGQRWLTEARKETVMGQPTPKTPRQLREFLGTAGFCRLWIPGFAEMAAPLYPLTKPGTLFEWGPDQQKAYQEIKQALLTAPALGLPDLTKPFELFVDEKQGYAKGVLTQKLGPWRRPVAYLSKKLDPVAAGWPPCLRMVAAIAVLTKDAGKLTMGQPLVILAPHAVEALVKQPPDRWLSNARMTHYQALLLDTDRVQFGPIVALNPATLLPLPEEGLQHDCLDILAEAHGTRPDLTDQPLPDADHTWYTDGSSFLQEGQRKAGAAVTTETEVVWAKALPAGTSAQRAELIALTQALKMAEGKKLNVYTDSRYAFATAHIHGEIYRRRGWLTSEGKEIKNKDEILALLKALFLPKRLSIIHCPGHQKGNRAEARGNRMADQAAREVATRETPETSTLLAGKRTADGSEFEKRTADGSEFESPKKKAKVE

SEQ ID NO: 2479 - protein, 2094 aa, synthetic construct
MPAAKRVKLDGGDKKYSIGLDIGTNSVGWAVITDEYKVPSKKFKVLGNTDRHSIKKNLIGALLFDSGETAEATRLKRTARRRYTRRKNRICYLQEIFSNEMAKVDDSFFHRLEESFLVEEDKKHERHPIFGNIVDEVAYHEKYPTIYHLRKKLVDSTDKADLRLIYLALAHMIKFRGHFLIEGDLNPDNSDVDKLFIQLVQTYNQLFEENPINASGVDAKAILSARLSKSRRLENLIAQLPGEKKNGLFGNLIALSLGLTPNFKSNFDLAEDAKLQLSKDTYDDDLDNLLAQIGDQYADLFLAAKNLSDAILLSDILRVNTEITKAPLSASMIKRYDEHHQDLTLLKALVRQQLPEKYKEIFFDQSKNGYAGYIDGGASQEEFYKFIKPILEKMDGTEELLVKLNREDLLRKQRTFDNGSIPHQIHLGELHAILRRQEDFYPFLKDNREKIEKILTFRIPYYVGPLARGNSRFAWMTRKSEETITPWNFEEVVDKGASAQSFIERMTNFDKNLPNEKVLPKHSLLYEYFTVYNELTKVKYVTEGMRKPAFLSGEQKKAIVDLLFKTNRKVTVKQLKEDYFKKIECFDSVEISGVEDRFNASLGTYHDLLKIIKDKDFLDNEENEDILEDIVLTLTLFEDREMIEERLKTYAHLFDDKVMKQLKRRRYTGWGRLSRKLINGIRDKQSGKTILDFLKSDGFANRNFMQLIHDDSLTFKEDIQKAQVSGQGDSLHEHIANLAGSPAIKKGILQTVKVVDELVKVMGRHKPENIVIEMARENQTTQKGQKNSRERMKRIEEGIKELGSQILKEHPVENTQLQNEKLYLYYLQNGRDMYVDQELDINRLSDYDVDHIVPQSFLKDDSIDNKVLTRSDKARGKSDNVPSEEVVKKMKNYWRQLLNAKLITQRKFDNLTKAERGGLSELDKAGFIKRQLVETRQITKHVAQILDSRMNTKYDENDKLIREVKVITLKSKLVSDFRKDFQFYKVREINNYHHAHDAYLNAVVGTALIKKYPKLESEFVYGDYKVYDVRKMIAKSEQEIGKATAKYFFYSNIMNFFKTEITLANGEIRKRPLIETNGETGEIVWDKGRDFATVRKVLSMPQVNIVKKTEVQTGGFSKESILPKRNSDKLIARKKDWDPKKYGGFDSPTVAYSVLVVAKVEKGKSKKLKSVKELLGITIMERSSFEKNPIDFLEAKGYKEVKKDLIIKLPKYSLFELENGRKRMLASAGELQKGNELALPSKYVNFLYLASHYEKLKGSPEDNEQKQLFVEQHKHYLDEIIEQISEFSKRVILADANLDKVLSAYNKHRDKPIREQAENIIHLFTLTNLGAPAAFKYFDTTIDRKRYTSTKEVLDATLIHQSITGLYETRIDLSQLGGDGGGGSGGGGSSGGTLNIEDEYRLHETSKGPDVPLGSTWLSDFPQAWAETGGMGLAVRQAPLIIPLKATSTPVSIKQYPMSQEARLGIKPHIQRLLDQGILVPCQSPWNTPLLPVKKPGTNDYRPVQDLREVNKRVEDIHPTVPNPYNLLSGLPPSHQWYTVLDLKDAFFCLRLHPTSQSLFAFEWRDPEMGISGQLTWTRLPQGFKNSPTLFNEALHRDLADFRIQHPDLILLQYVDDLLLAATSELDCQQGTRALLQTLGDLGYRASAKKAQICQKQVKYLGYLLKEGQRWLTEARKETVMGQPTPKTPRQLREFLGTAGFCRLWIPGFAEMAAPLYPLTKPGTLFEWGPDQQKAYQEIKQALLTAPALGLPDLTKPFELFVDEKQGYAKGVLTQKLGPWRRPVAYLSKKLDPVAAGWPPCLRMVAAIAVLTKDAGKLTMGQPLVILAPHAVEALVKQPPDRWLSNARMTHYQALLLDTDRVQFGPIVALNPATLLPLPEEGLQHDCLDILAEAHGTRPDLTDQPLPDADHTWYTDGSSFLQEGQRKAGAAVTTETEVVWAKALPAGTSAQRAELIALTQALKMAEGKKLNVYTDSRYAFATAHIHGEIYRRRGWLTSEGKEIKNKDEILALLKALFLPKRLSIIHCPGHQKGNRAEARGNRMADQAAREVATRETPETSTLLAGKRTADGSEFEKRTADGSEFESPKKKAKVE

SEQ ID NO: 2480 - protein, 2096 aa, synthetic construct
MPAAKRVKLDGGDKKYSIGLDIGTNSVGWAVITDEYKVPSKKFKVLGNTDRHSIKKNLIGALLFDSGETAEATRLKRTARRRYTRRKNRICYLQEIFSNEMAKVDDSFFHRLEESFLVEEDKKHERHPIFGNIVDEVAYHEKYPTIYHLRKKLVDSTDKADLRLIYLALAHMIKFRGHFLIEGDLNPDNSDVDKLFIQLVQTYNQLFEENPINASGVDAKAILSARLSKSRRLENLIAQLPGEKKNGLFGNLIALSLGLTPNFKSNFDLAEDAKLQLSKDTYDDDLDNLLAQIGDQYADLFLAAKNLSDAILLSDILRVNTEITKAPLSASMIKRYDEHHQDLTLLKALVRQQLPEKYKEIFFDQSKNGYAGYIDGGASQEEFYKFIKPILEKMDGTEELLVKLNREDLLRKQRTFDNGSIPHQIHLGELHAILRRQEDFYPFLKDNREKIEKILTFRIPYYVGPLARGNSRFAWMTRKSEETITPWNFEEVVDKGASAQSFIERMTNFDKNLPNEKVLPKHSLLYEYFTVYNELTKVKYVTEGMRKPAFLSGEQKKAIVDLLFKTNRKVTVKQLKEDYFKKIECFDSVEISGVEDRFNASLGTYHDLLKIIKDKDFLDNEENEDILEDIVLTLTLFEDREMIEERLKTYAHLFDDKVMKQLKRRRYTGWGRLSRKLINGIRDKQSGKTILDFLKSDGFANRNFMQLIHDDSLTFKEDIQKAQVSGQGDSLHEHIANLAGSPAIKKGILQTVKVVDELVKVMGRHKPENIVIEMARENQTTQKGQKNSRERMKRIEEGIKELGSQILKEHPVENTQLQNEKLYLYYLQNGRDMYVDQELDINRLSDYDVDHIVPQSFLKDDSIDNKVLTRSDKARGKSDNVPSEEVVKKMKNYWRQLLNAKLITQRKFDNLTKAERGGLSELDKAGFIKRQLVETRQITKHVAQILDSRMNTKYDENDKLIREVKVITLKSKLVSDFRKDFQFYKVREINNYHHAHDAYLNAVVGTALIKKYPKLESEFVYGDYKVYDVRKMIAKSEQEIGKATAKYFFYSNIMNFFKTEITLANGEIRKRPLIETNGETGEIVWDKGRDFATVRKVLSMPQVNIVKKTEVQTGGFSKESILPKRNSDKLIARKKDWDPKKYGGFDSPTVAYSVLVVAKVEKGKSKKLKSVKELLGITIMERSSFEKNPIDFLEAKGYKEVKKDLIIKLPKYSLFELENGRKRMLASAGELQKGNELALPSKYVNFLYLASHYEKLKGSPEDNEQKQLFVEQHKHYLDEIIEQISEFSKRVILADANLDKVLSAYNKHRDKPIREQAENIIHLFTLTNLGAPAAFKYFDTTIDRKRYTSTKEVLDATLIHQSITGLYETRIDLSQLGGDGGGSSPAPEAAAKGGTLNIEDEYRLHETSKGPDVPLGSTWLSDFPQAWAETGGMGLAVRQAPLIIPLKATSTPVSIKQYPMSQEARLGIKPHIQRLLDQGILVPCQSPWNTPLLPVKKPGTNDYRPVQDLREVNKRVEDIHPTVPNPYNLLSGLPPSHQWYTVLDLKDAFFCLRLHPTSQSLFAFEWRDPEMGISGQLTWTRLPQGFKNSPTLFNEALHRDLADFRIQHPDLILLQYVDDLLLAATSELDCQQGTRALLQTLGDLGYRASAKKAQICQKQVKYLGYLLKEGQRWLTEARKETVMGQPTPKTPRQLREFLGTAGFCRLWIPGFAEMAAPLYPLTKPGTLFEWGPDQQKAYQEIKQALLTAPALGLPDLTKPFELFVDEKQGYAKGVLTQKLGPWRRPVAYLSKKLDPVAAGWPPCLRMVAAIAVLTKDAGKLTMGQPLVILAPHAVEALVKQPPDRWLSNARMTHYQALLLDTDRVQFGPIVALNPATLLPLPEEGLQHDCLDILAEAHGTRPDLTDQPLPDADHTWYTDGSSFLQEGQRKAGAAVTTETEVVWAKALPAGTSAQRAELIALTQALKMAEGKKLNVYTDSRYAFATAHIHGEIYRRRGWLTSEGKEIKNKDEILALLKALFLPKRLSIIHCPGHQKGNRAEARGNRMADQAAREVATRETPETSTLLAGKRTADGSEFEKRTADGSEFESPKKKAKVE

SEQ ID NO: 2481 - protein, 2091 aa, synthetic construct
MPAAKRVKLDGGDKKYSIGLDIGTNSVGWAVITDEYKVPSKKFKVLGNTDRHSIKKNLIGALLFDSGETAEATRLKRTARRRYTRRKNRICYLQEIFSNEMAKVDDSFFHRLEESFLVEEDKKHERHPIFGNIVDEVAYHEKYPTIYHLRKKLVDSTDKADLRLIYLALAHMIKFRGHFLIEGDLNPDNSDVDKLFIQLVQTYNQLFEENPINASGVDAKAILSARLSKSRRLENLIAQLPGEKKNGLFGNLIALSLGLTPNFKSNFDLAEDAKLQLSKDTYDDDLDNLLAQIGDQYADLFLAAKNLSDAILLSDILRVNTEITKAPLSASMIKRYDEHHQDLTLLKALVRQQLPEKYKEIFFDQSKNGYAGYIDGGASQEEFYKFIKPILEKMDGTEELLVKLNREDLLRKQRTFDNGSIPHQIHLGELHAILRRQEDFYPFLKDNREKIEKILTFRIPYYVGPLARGNSRFAWMTRKSEETITPWNFEEVVDKGASAQSFIERMTNFDKNLPNEKVLPKHSLLYEYFTVYNELTKVKYVTEGMRKPAFLSGEQKKAIVDLLFKTNRKVTVKQLKEDYFKKIECFDSVEISGVEDRFNASLGTYHDLLKIIKDKDFLDNEENEDILEDIVLTLTLFEDREMIEERLKTYAHLFDDKVMKQLKRRRYTGWGRLSRKLINGIRDKQSGKTILDFLKSDGFANRNFMQLIHDDSLTFKEDIQKAQVSGQGDSLHEHIANLAGSPAIKKGILQTVKVVDELVKVMGRHKPENIVIEMARENQTTQKGQKNSRERMKRIEEGIKELGSQILKEHPVENTQLQNEKLYLYYLQNGRDMYVDQELDINRLSDYDVDHIVPQSFLKDDSIDNKVLTRSDKARGKSDNVPSEEVVKKMKNYWRQLLNAKLITQRKFDNLTKAERGGLSELDKAGFIKRQLVETRQITKHVAQILDSRMNTKYDENDKLIREVKVITLKSKLVSDFRKDFQFYKVREINNYHHAHDAYLNAVVGTALIKKYPKLESEFVYGDYKVYDVRKMIAKSEQEIGKATAKYFFYSNIMNFFKTEITLANGEIRKRPLIETNGETGEIVWDKGRDFATVRKVLSMPQVNIVKKTEVQTGGFSKESILPKRNSDKLIARKKDWDPKKYGGFDSPTVAYSVLVVAKVEKGKSKKLKSVKELLGITIMERSSFEKNPIDFLEAKGYKEVKKDLIIKLPKYSLFELENGRKRMLASAGELQKGNELALPSKYVNFLYLASHYEKLKGSPEDNEQKQLFVEQHKHYLDEIIEQISEFSKRVILADANLDKVLSAYNKHRDKPIREQAENIIHLFTLTNLGAPAAFKYFDTTIDRKRYTSTKEVLDATLIHQSITGLYETRIDLSQLGGDGGGGSPAPGGTLNIEDEYRLHETSKGPDVPLGSTWLSDFPQAWAETGGMGLAVRQAPLIIPLKATSTPVSIKQYPMSQEARLGIKPHIQRLLDQGILVPCQSPWNTPLLPVKKPGTNDYRPVQDLREVNKRVEDIHPTVPNPYNLLSGLPPSHQWYTVLDLKDAFFCLRLHPTSQSLFAFEWRDPEMGISGQLTWTRLPQGFKNSPTLFNEALHRDLADFRIQHPDLILLQYVDDLLLAATSELDCQQGTRALLQTLGDLGYRASAKKAQICQKQVKYLGYLLKEGQRWLTEARKETVMGQPTPKTPRQLREFLGTAGFCRLWIPGFAEMAAPLYPLTKPGTLFEWGPDQQKAYQEIKQALLTAPALGLPDLTKPFELFVDEKQGYAKGVLTQKLGPWRRPVAYLSKKLDPVAAGWPPCLRMVAAIAVLTKDAGKLTMGQPLVILAPHAVEALVKQPPDRWLSNARMTHYQALLLDTDRVQFGPIVALNPATLLPLPEEGLQHDCLDILAEAHGTRPDLTDQPLPDADHTWYTDGSSFLQEGQRKAGAAVTTETEVVWAKALPAGTSAQRAELIALTQALKMAEGKKLNVYTDSRYAFATAHIHGEIYRRRGWLTSEGKEIKNKDEILALLKALFLPKRLSIIHCPGHQKGNRAEARGNRMADQAAREVATRETPETSTLLAGKRTADGSEFEKRTADGSEFESPKKKAKVE

SEQ ID NO: 2482 - protein, 2090 aa, synthetic construct
MPAAKRVKLDGGDKKYSIGLDIGTNSVGWAVITDEYKVPSKKFKVLGNTDRHSIKKNLIGALLFDSGETAEATRLKRTARRRYTRRKNRICYLQEIFSNEMAKVDDSFFHRLEESFLVEEDKKHERHPIFGNIVDEVAYHEKYPTIYHLRKKLVDSTDKADLRLIYLALAHMIKFRGHFLIEGDLNPDNSDVDKLFIQLVQTYNQLFEENPINASGVDAKAILSARLSKSRRLENLIAQLPGEKKNGLFGNLIALSLGLTPNFKSNFDLAEDAKLQLSKDTYDDDLDNLLAQIGDQYADLFLAAKNLSDAILLSDILRVNTEITKAPLSASMIKRYDEHHQDLTLLKALVRQQLPEKYKEIFFDQSKNGYAGYIDGGASQEEFYKFIKPILEKMDGTEELLVKLNREDLLRKQRTFDNGSIPHQIHLGELHAILRRQEDFYPFLKDNREKIEKILTFRIPYYVGPLARGNSRFAWMTRKSEETITPWNFEEVVDKGASAQSFIERMTNFDKNLPNEKVLPKHSLLYEYFTVYNELTKVKYVTEGMRKPAFLSGEQKKAIVDLLFKTNRKVTVKQLKEDYFKKIECFDSVEISGVEDRFNASLGTYHDLLKIIKDKDFLDNEENEDILEDIVLTLTLFEDREMIEERLKTYAHLFDDKVMKQLKRRRYTGWGRLSRKLINGIRDKQSGKTILDFLKSDGFANRNFMQLIHDDSLTFKEDIQKAQVSGQGDSLHEHIANLAGSPAIKKGILQTVKVVDELVKVMGRHKPENIVIEMARENQTTQKGQKNSRERMKRIEEGIKELGSQILKEHPVENTQLQNEKLYLYYLQNGRDMYVDQELDINRLSDYDVDHIVPQSFLKDDSIDNKVLTRSDKARGKSDNVPSEEVVKKMKNYWRQLLNAKLITQRKFDNLTKAERGGLSELDKAGFIKRQLVETRQITKHVAQILDSRMNTKYDENDKLIREVKVITLKSKLVSDFRKDFQFYKVREINNYHHAHDAYLNAVVGTALIKKYPKLESEFVYGDYKVYDVRKMIAKSEQEIGKATAKYFFYSNIMNFFKTEITLANGEIRKRPLIETNGETGEIVWDKGRDFATVRKVLSMPQVNIVKKTEVQTGGFSKESILPKRNSDKLIARKKDWDPKKYGGFDSPTVAYSVLVVAKVEKGKSKKLKSVKELLGITIMERSSFEKNPIDFLEAKGYKEVKKDLIIKLPKYSLFELENGRKRMLASAGELQKGNELALPSKYVNFLYLASHYEKLKGSPEDNEQKQLFVEQHKHYLDEIIEQISEFSKRVILADANLDKVLSAYNKHRDKPIREQAENIIHLFTLTNLGAPAAFKYFDTTIDRKRYTSTKEVLDATLIHQSITGLYETRIDLSQLGGDGGGGGGSGGTLNIEDEYRLHETSKGPDVPLGSTWLSDFPQAWAETGGMGLAVRQAPLIIPLKATSTPVSIKQYPMSQEARLGIKPHIQRLLDQGILVPCQSPWNTPLLPVKKPGTNDYRPVQDLREVNKRVEDIHPTVPNPYNLLSGLPPSHQWYTVLDLKDAFFCLRLHPTSQSLFAFEWRDPEMGISGQLTWTRLPQGFKNSPTLFNEALHRDLADFRIQHPDLILLQYVDDLLLAATSELDCQQGTRALLQTLGDLGYRASAKKAQICQKQVKYLGYLLKEGQRWLTEARKETVMGQPTPKTPRQLREFLGTAGFCRLWIPGFAEMAAPLYPLTKPGTLFEWGPDQQKAYQEIKQALLTAPALGLPDLTKPFELFVDEKQGYAKGVLTQKLGPWRRPVAYLSKKLDPVAAGWPPCLRMVAAIAVLTKDAGKLTMGQPLVILAPHAVEALVKQPPDRWLSNARMTHYQALLLDTDRVQFGPIVALNPATLLPLPEEGLQHDCLDILAEAHGTRPDLTDQPLPDADHTWYTDGSSFLQEGQRKAGAAVTTETEVVWAKALPAGTSAQRAELIALTQALKMAEGKKLNVYTDSRYAFATAHIHGEIYRRRGWLTSEGKEIKNKDEILALLKALFLPKRLSIIHCPGHQKGNRAEARGNRMADQAAREVATRETPETSTLLAGKRTADGSEFEKRTADGSEFESPKKKAKVE

SEQ ID NO: 2483 - protein, 2096 aa, synthetic construct
MPAAKRVKLDGGDKKYSIGLDIGTNSVGWAVITDEYKVPSKKFKVLGNTDRHSIKKNLIGALLFDSGETAEATRLKRTARRRYTRRKNRICYLQEIFSNEMAKVDDSFFHRLEESFLVEEDKKHERHPIFGNIVDEVAYHEKYPTIYHLRKKLVDSTDKADLRLIYLALAHMIKFRGHFLIEGDLNPDNSDVDKLFIQLVQTYNQLFEENPINASGVDAKAILSARLSKSRRLENLIAQLPGEKKNGLFGNLIALSLGLTPNFKSNFDLAEDAKLQLSKDTYDDDLDNLLAQIGDQYADLFLAAKNLSDAILLSDILRVNTEITKAPLSASMIKRYDEHHQDLTLLKALVRQQLPEKYKEIFFDQSKNGYAGYIDGGASQEEFYKFIKPILEKMDGTEELLVKLNREDLLRKQRTFDNGSIPHQIHLGELHAILRRQEDFYPFLKDNREKIEKILTFRIPYYVGPLARGNSRFAWMTRKSEETITPWNFEEVVDKGASAQSFIERMTNFDKNLPNEKVLPKHSLLYEYFTVYNELTKVKYVTEGMRKPAFLSGEQKKAIVDLLFKTNRKVTVKQLKEDYFKKIECFDSVEISGVEDRFNASLGTYHDLLKIIKDKDFLDNEENEDILEDIVLTLTLFEDREMIEERLKTYAHLFDDKVMKQLKRRRYTGWGRLSRKLINGIRDKQSGKTILDFLKSDGFANRNFMQLIHDDSLTFKEDIQKAQVSGQGDSLHEHIANLAGSPAIKKGILQTVKVVDELVKVMGRHKPENIVIEMARENQTTQKGQKNSRERMKRIEEGIKELGSQILKEHPVENTQLQNEKLYLYYLQNGRDMYVDQELDINRLSDYDVDHIVPQSFLKDDSIDNKVLTRSDKARGKSDNVPSEEVVKKMKNYWRQLLNAKLITQRKFDNLTKAERGGLSELDKAGFIKRQLVETRQITKHVAQILDSRMNTKYDENDKLIREVKVITLKSKLVSDFRKDFQFYKVREINNYHHAHDAYLNAVVGTALIKKYPKLESEFVYGDYKVYDVRKMIAKSEQEIGKATAKYFFYSNIMNFFKTEITLANGEIRKRPLIETNGETGEIVWDKGRDFATVRKVLSMPQVNIVKKTEVQTGGFSKESILPKRNSDKLIARKKDWDPKKYGGFDSPTVAYSVLVVAKVEKGKSKKLKSVKELLGITIMERSSFEKNPIDFLEAKGYKEVKKDLIIKLPKYSLFELENGRKRMLASAGELQKGNELALPSKYVNFLYLASHYEKLKGSPEDNEQKQLFVEQHKHYLDEIIEQISEFSKRVILADANLDKVLSAYNKHRDKPIREQAENIIHLFTLTNLGAPAAFKYFDTTIDRKRYTSTKEVLDATLIHQSITGLYETRIDLSQLGGDGGEAAAKGGGGGSGGTLNIEDEYRLHETSKGPDVPLGSTWLSDFPQAWAETGGMGLAVRQAPLIIPLKATSTPVSIKQYPMSQEARLGIKPHIQRLLDQGILVPCQSPWNTPLLPVKKPGTNDYRPVQDLREVNKRVEDIHPTVPNPYNLLSGLPPSHQWYTVLDLKDAFFCLRLHPTSQSLFAFEWRDPEMGISGQLTWTRLPQGFKNSPTLFNEALHRDLADFRIQHPDLILLQYVDDLLLAATSELDCQQGTRALLQTLGDLGYRASAKKAQICQKQVKYLGYLLKEGQRWLTEARKETVMGQPTPKTPRQLREFLGTAGFCRLWIPGFAEMAAPLYPLTKPGTLFEWGPDQQKAYQEIKQALLTAPALGLPDLTKPFELFVDEKQGYAKGVLTQKLGPWRRPVAYLSKKLDPVAAGWPPCLRMVAAIAVLTKDAGKLTMGQPLVILAPHAVEALVKQPPDRWLSNARMTHYQALLLDTDRVQFGPIVALNPATLLPLPEEGLQHDCLDILAEAHGTRPDLTDQPLPDADHTWYTDGSSFLQEGQRKAGAAVTTETEVVWAKALPAGTSAQRAELIALTQALKMAEGKKLNVYTDSRYAFATAHIHGEIYRRRGWLTSEGKEIKNKDEILALLKALFLPKRLSIIHCPGHQKGNRAEARGNRMADQAAREVATRETPETSTLLAGKRTADGSEFEKRTADGSEFESPKKKAKVE

SEQ ID NO: 2484 - protein, 2095 aa, synthetic construct
MPAAKRVKLDGGDKKYSIGLDIGTNSVGWAVITDEYKVPSKKFKVLGNTDRHSIKKNLIGALLFDSGETAEATRLKRTARRRYTRRKNRICYLQEIFSNEMAKVDDSFFHRLEESFLVEEDKKHERHPIFGNIVDEVAYHEKYPTIYHLRKKLVDSTDKADLRLIYLALAHMIKFRGHFLIEGDLNPDNSDVDKLFIQLVQTYNQLFEENPINASGVDAKAILSARLSKSRRLENLIAQLPGEKKNGLFGNLIALSLGLTPNFKSNFDLAEDAKLQLSKDTYDDDLDNLLAQIGDQYADLFLAAKNLSDAILLSDILRVNTEITKAPLSASMIKRYDEHHQDLTLLKALVRQQLPEKYKEIFFDQSKNGYAGYIDGGASQEEFYKFIKPILEKMDGTEELLVKLNREDLLRKQRTFDNGSIPHQIHLGELHAILRRQEDFYPFLKDNREKIEKILTFRIPYYVGPLARGNSRFAWMTRKSEETITPWNFEEVVDKGASAQSFIERMTNFDKNLPNEKVLPKHSLLYEYFTVYNELTKVKYVTEGMRKPAFLSGEQKKAIVDLLFKTNRKVTVKQLKEDYFKKIECFDSVEISGVEDRFNASLGTYHDLLKIIKDKDFLDNEENEDILEDIVLTLTLFEDREMIEERLKTYAHLFDDKVMKQLKRRRYTGWGRLSRKLINGIRDKQSGKTILDFLKSDGFANRNFMQLIHDDSLTFKEDIQKAQVSGQGDSLHEHIANLAGSPAIKKGILQTVKVVDELVKVMGRHKPENIVIEMARENQTTQKGQKNSRERMKRIEEGIKELGSQILKEHPVENTQLQNEKLYLYYLQNGRDMYVDQELDINRLSDYDVDHIVPQSFLKDDSIDNKVLTRSDKARGKSDNVPSEEVVKKMKNYWRQLLNAKLITQRKFDNLTKAERGGLSELDKAGFIKRQLVETRQITKHVAQILDSRMNTKYDENDKLIREVKVITLKSKLVSDFRKDFQFYKVREINNYHHAHDAYLNAVVGTALIKKYPKLESEFVYGDYKVYDVRKMIAKSEQEIGKATAKYFFYSNIMNFFKTEITLANGEIRKRPLIETNGETGEIVWDKGRDFATVRKVLSMPQVNIVKKTEVQTGGFSKESILPKRNSDKLIARKKDWDPKKYGGFDSPTVAYSVLVVAKVEKGKSKKLKSVKELLGITIMERSSFEKNPIDFLEAKGYKEVKKDLIIKLPKYSLFELENGRKRMLASAGELQKGNELALPSKYVNFLYLASHYEKLKGSPEDNEQKQLFVEQHKHYLDEIIEQISEFSKRVILADANLDKVLSAYNKHRDKPIREQAENIIHLFTLTNLGAPAAFKYFDTTIDRKRYTSTKEVLDATLIHQSITGLYETRIDLSQLGGDGGEAAAKEAAAKGGTLNIEDEYRLHETSKGPDVPLGSTWLSDFPQAWAETGGMGLAVRQAPLIIPLKATSTPVSIKQYPMSQEARLGIKPHIQRLLDQGILVPCQSPWNTPLLPVKKPGTNDYRPVQDLREVNKRVEDIHPTVPNPYNLLSGLPPSHQWYTVLDLKDAFFCLRLHPTSQSLFAFEWRDPEMGISGQLTWTRLPQGFKNSPTLFNEALHRDLADFRIQHPDLILLQYVDDLLLAATSELDCQQGTRALLQTLGDLGYRASAKKAQICQKQVKYLGYLLKEGQRWLTEARKETVMGQPTPKTPRQLREFLGTAGFCRLWIPGFAEMAAPLYPLTKPGTLFEWGPDQQKAYQEIKQALLTAPALGLPDLTKPFELFVDEKQGYAKGVLTQKLGPWRRPVAYLSKKLDPVAAGWPPCLRMVAAIAVLTKDAGKLTMGQPLVILAPHAVEALVKQPPDRWLSNARMTHYQALLLDTDRVQFGPIVALNPATLLPLPEEGLQHDCLDILAEAHGTRPDLTDQPLPDADHTWYTDGSSFLQEGQRKAGAAVTTETEVVWAKALPAGTSAQRAELIALTQALKMAEGKKLNVYTDSRYAFATAHIHGEIYRRRGWLTSEGKEIKNKDEILALLKALFLPKRLSIIHCPGHQKGNRAEARGNRMADQAAREVATRETPETSTLLAGKRTADGSEFEKRTADGSEFESPKKKAKVE

SEQ ID NO: 2485 - protein, 2096 aa, synthetic construct
MPAAKRVKLDGGDKKYSIGLDIGTNSVGWAVITDEYKVPSKKFKVLGNTDRHSIKKNLIGALLFDSGETAEATRLKRTARRRYTRRKNRICYLQEIFSNEMAKVDDSFFHRLEESFLVEEDKKHERHPIFGNIVDEVAYHEKYPTIYHLRKKLVDSTDKADLRLIYLALAHMIKFRGHFLIEGDLNPDNSDVDKLFIQLVQTYNQLFEENPINASGVDAKAILSARLSKSRRLENLIAQLPGEKKNGLFGNLIALSLGLTPNFKSNFDLAEDAKLQLSKDTYDDDLDNLLAQIGDQYADLFLAAKNLSDAILLSDILRVNTEITKAPLSASMIKRYDEHHQDLTLLKALVRQQLPEKYKEIFFDQSKNGYAGYIDGGASQEEFYKFIKPILEKMDGTEELLVKLNREDLLRKQRTFDNGSIPHQIHLGELHAILRRQEDFYPFLKDNREKIEKILTFRIPYYVGPLARGNSRFAWMTRKSEETITPWNFEEVVDKGASAQSFIERMTNFDKNLPNEKVLPKHSLLYEYFTVYNELTKVKYVTEGMRKPAFLSGEQKKAIVDLLFKTNRKVTVKQLKEDYFKKIECFDSVEISGVEDRFNASLGTYHDLLKIIKDKDFLDNEENEDILEDIVLTLTLFEDREMIEERLKTYAHLFDDKVMKQLKRRRYTGWGRLSRKLINGIRDKQSGKTILDFLKSDGFANRNFMQLIHDDSLTFKEDIQKAQVSGQGDSLHEHIANLAGSPAIKKGILQTVKVVDELVKVMGRHKPENIVIEMARENQTTQKGQKNSRERMKRIEEGIKELGSQILKEHPVENTQLQNEKLYLYYLQNGRDMYVDQELDINRLSDYDVDHIVPQSFLKDDSIDNKVLTRSDKARGKSDNVPSEEVVKKMKNYWRQLLNAKLITQRKFDNLTKAERGGLSELDKAGFIKRQLVETRQITKHVAQILDSRMNTKYDENDKLIREVKVITLKSKLVSDFRKDFQFYKVREINNYHHAHDAYLNAVVGTALIKKYPKLESEFVYGDYKVYDVRKMIAKSEQEIGKATAKYFFYSNIMNFFKTEITLANGEIRKRPLIETNGETGEIVWDKGRDFATVRKVLSMPQVNIVKKTEVQTGGFSKESILPKRNSDKLIARKKDWDPKKYGGFDSPTVAYSVLVVAKVEKGKSKKLKSVKELLGITIMERSSFEKNPIDFLEAKGYKEVKKDLIIKLPKYSLFELENGRKRMLASAGELQKGNELALPSKYVNFLYLASHYEKLKGSPEDNEQKQLFVEQHKHYLDEIIEQISEFSKRVILADANLDKVLSAYNKHRDKPIREQAENIIHLFTLTNLGAPAAFKYFDTTIDRKRYTSTKEVLDATLIHQSITGLYETRIDLSQLGGDGGGSSEAAAKPAPGGTLNIEDEYRLHETSKGPDVPLGSTWLSDFPQAWAETGGMGLAVRQAPLIIPLKATSTPVSIKQYPMSQEARLGIKPHIQRLLDQGILVPCQSPWNTPLLPVKKPGTNDYRPVQDLREVNKRVEDIHPTVPNPYNLLSGLPPSHQWYTVLDLKDAFFCLRLHPTSQSLFAFEWRDPEMGISGQLTWTRLPQGFKNSPTLFNEALHRDLADFRIQHPDLILLQYVDDLLLAATSELDCQQGTRALLQTLGDLGYRASAKKAQICQKQVKYLGYLLKEGQRWLTEARKETVMGQPTPKTPRQLREFLGTAGFCRLWIPGFAEMAAPLYPLTKPGTLFEWGPDQQKAYQEIKQALLTAPALGLPDLTKPFELFVDEKQGYAKGVLTQKLGPWRRPVAYLSKKLDPVAAGWPPCLRMVAAIAVLTKDAGKLTMGQPLVILAPHAVEALVKQPPDRWLSNARMTHYQALLLDTDRVQFGPIVALNPATLLPLPEEGLQHDCLDILAEAHGTRPDLTDQPLPDADHTWYTDGSSFLQEGQRKAGAAVTTETEVVWAKALPAGTSAQRAELIALTQALKMAEGKKLNVYTDSRYAFATAHIHGEIYRRRGWLTSEGKEIKNKDEILALLKALFLPKRLSIIHCPGHQKGNRAEARGNRMADQAAREVATRETPETSTLLAGKRTADGSEFEKRTADGSEFESPKKKAKVE

SEQ ID NO: 2486 - protein, 2096 aa, synthetic construct
MPAAKRVKLDGGDKKYSIGLDIGTNSVGWAVITDEYKVPSKKFKVLGNTDRHSIKKNLIGALLFDSGETAEATRLKRTARRRYTRRKNRICYLQEIFSNEMAKVDDSFFHRLEESFLVEEDKKHERHPIFGNIVDEVAYHEKYPTIYHLRKKLVDSTDKADLRLIYLALAHMIKFRGHFLIEGDLNPDNSDVDKLFIQLVQTYNQLFEENPINASGVDAKAILSARLSKSRRLENLIAQLPGEKKNGLFGNLIALSLGLTPNFKSNFDLAEDAKLQLSKDTYDDDLDNLLAQIGDQYADLFLAAKNLSDAILLSDILRVNTEITKAPLSASMIKRYDEHHQDLTLLKALVRQQLPEKYKEIFFDQSKNGYAGYIDGGASQEEFYKFIKPILEKMDGTEELLVKLNREDLLRKQRTFDNGSIPHQIHLGELHAILRRQEDFYPFLKDNREKIEKILTFRIPYYVGPLARGNSRFAWMTRKSEETITPWNFEEVVDKGASAQSFIERMTNFDKNLPNEKVLPKHSLLYEYFTVYNELTKVKYVTEGMRKPAFLSGEQKKAIVDLLFKTNRKVTVKQLKEDYFKKIECFDSVEISGVEDRFNASLGTYHDLLKIIKDKDFLDNEENEDILEDIVLTLTLFEDREMIEERLKTYAHLFDDKVMKQLKRRRYTGWGRLSRKLINGIRDKQSGKTILDFLKSDGFANRNFMQLIHDDSLTFKEDIQKAQVSGQGDSLHEHIANLAGSPAIKKGILQTVKVVDELVKVMGRHKPENIVIEMARENQTTQKGQKNSRERMKRIEEGIKELGSQILKEHPVENTQLQNEKLYLYYLQNGRDMYVDQELDINRLSDYDVDHIVPQSFLKDDSIDNKVLTRSDKARGKSDNVPSEEVVKKMKNYWRQLLNAKLITQRKFDNLTKAERGGLSELDKAGFIKRQLVETRQITKHVAQILDSRMNTKYDENDKLIREVKVITLKSKLVSDFRKDFQFYKVREINNYHHAHDAYLNAVVGTALIKKYPKLESEFVYGDYKVYDVRKMIAKSEQEIGKATAKYFFYSNIMNFFKTEITLANGEIRKRPLIETNGETGEIVWDKGRDFATVRKVLSMPQVNIVKKTEVQTGGFSKESILPKRNSDKLIARKKDWDPKKYGGFDSPTVAYSVLVVAKVEKGKSKKLKSVKELLGITIMERSSFEKNPIDFLEAKGYKEVKKDLIIKLPKYSLFELENGRKRMLASAGELQKGNELALPSKYVNFLYLASHYEKLKGSPEDNEQKQLFVEQHKHYLDEIIEQISEFSKRVILADANLDKVLSAYNKHRDKPIREQAENIIHLFTLTNLGAPAAFKYFDTTIDRKRYTSTKEVLDATLIHQSITGLYETRIDLSQLGGDGGGGSEAAAKPAPGGTLNIEDEYRLHETSKGPDVPLGSTWLSDFPQAWAETGGMGLAVRQAPLIIPLKATSTPVSIKQYPMSQEARLGIKPHIQRLLDQGILVPCQSPWNTPLLPVKKPGTNDYRPVQDLREVNKRVEDIHPTVPNPYNLLSGLPPSHQWYTVLDLKDAFFCLRLHPTSQSLFAFEWRDPEMGISGQLTWTRLPQGFKNSPTLFNEALHRDLADFRIQHPDLILLQYVDDLLLAATSELDCQQGTRALLQTLGDLGYRASAKKAQICQKQVKYLGYLLKEGQRWLTEARKETVMGQPTPKTPRQLREFLGTAGFCRLWIPGFAEMAAPLYPLTKPGTLFEWGPDQQKAYQEIKQALLTAPALGLPDLTKPFELFVDEKQGYAKGVLTQKLGPWRRPVAYLSKKLDPVAAGWPPCLRMVAAIAVLTKDAGKLTMGQPLVILAPHAVEALVKQPPDRWLSNARMTHYQALLLDTDRVQFGPIVALNPATLLPLPEEGLQHDCLDILAEAHGTRPDLTDQPLPDADHTWYTDGSSFLQEGQRKAGAAVTTETEVVWAKALPAGTSAQRAELIALTQALKMAEGKKLNVYTDSRYAFATAHIHGEIYRRRGWLTSEGKEIKNKDEILALLKALFLPKRLSIIHCPGHQKGNRAEARGNRMADQAAREVATRETPETSTLLAGKRTADGSEFEKRTADGSEFESPKKKAKVE
